United States Patent Application Publication US 2022/0290142 A1 - sequence listing, part 23

SEQ ID NO: 15739 - DNA, 62639 bp, Homo sapiens
agccaacggctccatgtctctgaggagcggcgggcggcggcgcgcggacccaggcgcggatggcgaggccagcaggtgaggggcgccctcctgaggctctcgggccggccctccggagggtgccatggggccgtcctcggctggcgccgccgaggcgggagggaggcccggttcccgcagccgcccgcactcgccgcgcctgactggggtagggcggcgcgccccgaccgccgacggaggggctcggggcgggcggaggcgctacgggcgcggcttctttgcggggaaacgaggcgggccgcgcggcctttccctgctcggctctttctgaggtttttcgggcctcgccttccgcgcagctgcgtttgggacctgccgcgcggcgggggcgatgagagcggcgggacccgggccaggccctgcggggtggacgcgcggctggggagggtgcggggaggggcggggccggggaccctgcctgggggcctagcgctgggggaggccgaggcgggcggatcgctggagcccaggatcctgttctagatcagcctgggctacagagagagacctcgtctcctctgttttatttttttgggcagggagtcccgctctgtcgcccaggctggagtgcagtggcgcgatctcggctcactgcaacctctgcttcccgggttcaagcgatcccgctgcctcagcctcccgagtagctggaattacaggcgcccgccaccaggcccggctagtttttgtatttttagtagagaccgggtttcaccatgttggccaggctggtctcgaactcctgacctcaggtgatccgcccgcctcggccttccaaagtgctgggattacagacgtgagactccgcgcccggcccttctcttgtaaaaacaagaaaaattagacaggctggtggtgcgcgcccgaggtcccagctattaatactcccgaatccgagccggaggttcacctgagcccggcaggtcaaggctgctgtgagccgggatcgcgccaccgcactccagcctgggcgacggagccagacccagtctcaaaaaaaatagagcaaggataagacgcggctgcttggtggccagagcaaacggtaaacatgaccggaggactggcctgccataagcagaaaacggatgaggcccggcgcggtggctcacacctgtaatcccagcactttgggaggccgaggcaggaggatcacctgaggtcaggagttcgagaccagcctgaccaacatggagaaatcccgtctccactaaaaaaatacaaaattagcggggcgtggtggcgcatgcctgtaatcccagctacgcaggaggctgaggcaggagaatcacttgaacgcggcaggcggaggttgcggtgaaccgagatcgcgccattgcactccaggctgggcaacaaagaatgaaactctgtctcaaaaaaaaaaaaatagaaaaaacgtgtgagaacgtgaagctttttacagacacttagctgaacaaaattcttcccagaggagaaaccaagtggtaaggatccctaactgctgttgtgctcatcgctgtctgtccatatcaggcaagccctagagaggcaggtacccttagggtctacatggtgtgttggaacttggagcttagagacggttactgactgccctgcttcaggacacaggactgcactcacgtgctccactccactgccctgccccaagctcagtgatggcctccaggcagggggaaggctgctgctgggataagtacaagtgatggcttttaccttacatgctttatgtgggttacctcatctcatccttaaaacagtcctgggaggtgagtgtgccccaggaggcagtgggtgctgtttgcctgcgtttcttcttgtgtgaaatggggacaccagtggcctccctcgtaggggttgtcatgaaaactgaatgagagcatatgtggagtactgggacggtgtgatacagtaaccagtcaatggtagctctctgtgaatgagagcctgtgtggagtactgggacagtgtgatacagtaaccagtcaatggtagctctctgtgaatgagagcctgtgtgtagtactgggacggtgtgatacagtaaccagtcaatggtagctctgtgaatgaaagcctgtgtggagtactgggacggtgtgatatagtaaccagtcaatggtagctctctgtgaatgagagcctgtgtggagtactgggacggtgtgatatagtaaccagtcaatggtagctctgtgaatgagagcctgtggagtactgggattgtgtgatacagtaaccagtcaatggtagctctctgtgaatgagagcctgtgtggagtactgggacggtgtgatacagtaaccagtcaatggtagctctctgtgaatgagagcctgtgtggagtactgggacggtgtgatatagtaaccagtcaatggtagctctctgtgaatgagagcctgtgtggagtactgggacggtgtgatatagtaaccagtcaatggtagctctgtgaatgagagcctgtgtggagtactgggacggtgtgatacagtaaccagtcaatggtagctctctgtgaatgagagcctgtgtggagtactgggacggtgtgatacagtaaccagtcaatggtagctctctgtgaatgagagcctgtgtggagtactgggacggtgtgatacagtaaccagtcaatggtagctctctgtgaatgagagcctgtgtggagtactgggacggtgtgatacagtaaccagtcaatggtagctctctgtgaatgagagcctgtgtggagtactgggacggtgtgatatagtaaccagtcaatggtagctctgtgaatgagagcctgtgtggagtactgggacggtgtgatatagtaaccagtcaatggtagctctgtgaatgagagcctgtgtggagtactgggacggtgtgatacagtaaccagtcaatggtagctctctgtgaatgagagcctgtgtggagtactgggacggtgtgatatagtaaccagtcaatggtagctctgtgaatgagagcctgtgtggagtactgggacggtgtgatacagtaaccagtcaatggtagctctctgtgaatgagagcctgtgtggagtactgggacggtgtgatacagtaaccagtcaatggtagctctctgtgaatgagagcctgtgtggagtactgggacggtgtgatacagtaaccagtcagtggtagctctctgtgaatgagagcctgtgtggagtactgggacggtgtgatacagtaaccagtcaatggtagctctctgtgaatgagagcctgtgtggagtactgggacggtgtgatatagtaaccagtcaatggtagctctctgtgaatgagagcctgtgtggagtactgggacggtgtgatatagtaaccagtcgatggtagctccctgtgtgacacttatccccatttttcagatttcttactgtccctggattaaaagtgagatacacagctcagagaaagcagttttgggaggaaatatggtcccagtgagcagttttctagtctacttaatccaacttacttgaggcaaggatatttggaggactggcatagagggccgtgcgcccctgttaagaggtgatgcctcgtaaatagcacttcattcactcttgattttgataaagatctgggactcagaactgaggctgttctctagcaagatttggaatatagtttttctgtgtttttgattacgggtgcattcaactatttaaaagattaaacctttattatacagtatggtggtgtatcagtttcctattgctgcagtaacacatgatcacttagtgactatataaatttattctcttacggttttagaagtcagaagtcgtaatatgaaagtgtctggttggttatatttattgtgatggttcccgggggagaatctgtttccttgctgcttcttcatcttcagaaccaagggttgcatctcctctcccccctaccctctctctcccatccctttctccttcctgactctagctctcctgcctcactctacaaggattcttgtgattacactgcgcccacccagctaagcagaatctcaaggcccttaatttagtcagatctgcaaagacccttttgtcttgtaagataacattcacaggtttgggggattaggatgtgggtctttcatggggggtgtcatcctgcctgcctaccacaagtggttataatctttcatgagaagtaaggatcctagtcttggaatatggtcattctgctcttgagttgaaggtgatccaaggaataccttcagacaaaggaagggtcttcctttctttttttatcttgttctttttttattttattttttttttagacggagtctcgctctgtcgcccaggctggagtgcagtggcatgatcccagctcactgcaagctctgcctcctggattcacgccattctcctgcctcagcctcccgagtagctgggactacaggcgcccgccaccacgcccggctaatttttcgtatttttagtagagacggggtttcaccatgttagccaggatggtctcaaactcctggcctcaagtcatccaccctccttggcctcccaaagtgctgggattacagttgtgagccactgcgcctggccctcaacctttttttgaggtaattgtagattgattctcatgcatttgtcagaaatgatacagagattcccgtatcacttcaccataacatcttgtgtaagtagagtacaattgtcacaactaagaaattgacattgagacgacccatctaatttattttatcttattttattttatttatttttttgagacgaagtttcactcttgtcacccaggctggagtgcagtggcgcaatcttggctcactgcaacctccacctctagggttcaagtgattctcctgcctcagcctcctgagtagctgggattataggcccaccccaccacacccagctaatttatttatttatttatttatttttatttatttttttttttttgccggagtctcgctctgctgcccaggctggagtgtggtggcgcgttctcggctcactgcaagctccacctcctgggttcacgccattctcctgcctcagcctcctgagtagctgggactataggcacccaccaccacgcctggctaagtttttgtatttttagtaaagacggggtttcactgtattagcaggatggtctagatctcctcacctcgtgatccgcccgcctcggcctcccacggtgctgggatttaattttttgtatttttagtagagacagggtttcaccatgctggccaggctggtctcaaactcctgacctcaggtgatccacccgccttggcctcccaaagttttgggattacaggcgtgagccactgtgcctggcctgacaatccgtctgttttattcaaatcatgtcagtgttacatgcactctcatgagccaccgcgtctggctagttttatgcatttttagtgtcccaagaggcaacagtgtctagccatcatgactctttttgttagtattctggttataaagttgaacaggttttgaagggcctgccctaattgtgtttttccaatgagtccttttatcttaatgagcctttttccaagctcggggtttttcaggaatatatataccctgtcatatccgaaacacttaacactaggtgggatgagggttgcagaagtaggtggcagtcggatcacaaggtcaggagatcgagaccatcctggctaacacggtgaaaccccgtctctactaaaaatacaaaaaattagccaggcgtggtggctgtcgcctgtggtcccagctactcgggaggctgaggcaggagaatggcgtgaacccgggaggcggagcttgcagtgagccgagatcacaccactgcactccagcctaggcgacagagcaagactccgtctcaaaaaaaaagaaaaaaaagaaaaaaagaagcagcagcaggtggcattacaaattaagcacggggttcccttctttcactcagggatgatggcgccacttcctcagtttcggcactcaagcgcctggaacggagtcagtggacggataagatggatttgcggtttggttttgagcggctgaaggagcctggtgagaagacaggctggctcattaacatgcatcctgtaagcactaggtccttctcccacccaggaatatggctgcaacccttctggtcatagcgtggtccttatctaaagagtgggggacacatgagggaactttgagtgaatcaggtgggagatgtgaaggttcccagctctcctttcctctttaacgtcattgagggccacagagaggccactgtgagaagccggaggtgatgggcatctcttttagccatcagaataaagctttcaaggattatgagggagaaattgagagagatccccatttggaggccgttacagtgtggttcttgtgaataaggctggtagtgttaatgtaggggtggagtaaagacctagatgagagggtttgtttctaaagtgctgagtttcccgaaaggtaggaggaaagtttctctaactgtgtagaggatggtcttgtgtctgtgttgactgattctcttgtagaccgagattttagatgaagataagcgcttaggcagtgcagtggattactactttattcaagatgacggaagcagatttaaggtaagcccctgactgcgacaagctaaaacccacttttatgggtgttcatgtagctctgtgactgtcagggagggcatgggaggcttccagtgcacagcagcccatagcccagcagaactcgggcccctggaggccccatcagtcatcacgtaagatgtcctgagagaggtcagttcaggaagactctgaatggtgagaagtagcgtgtctttcagattcttgcccctgtgaaaagtgcgcattctgacttcctgtatgctaccaaggtcaaggctaccctggccctaggctgttcatgggatataggagcaagcaatgtgttttcacttttctctcgctttcttctttctcatcacccctggatgggttggtgactcttaacaggtggctttgccctataaaccgtatttctacattgcgaccagaaaggtgagtgtgtttcatagactcaggtcagacgacctgtgtgtcattctgtggtgggctttgcaactgggaaataggcaaggaaggaaatgtattttaccaatggaaagccttttcattctgatcctgattagggttgtgagcgagaagtttcatcttttctctccaagaagtttcagggcaaaattgcaaaagtggagactgtccccaaagaggatctggacttggtgagtatcacccagactttccaggggtaaatgaggccagagtctacattgttcctggcaggtgggatcggaagaggtagaaattcaggtcatctgttgggtgatggggcggtgtggtgaccgtctataaaattccttccaaagagctctagtggtgttagttggtgccacgtgcagagttggacaaggtgccttgaagtcgccaactctttgacttgtgtgtttacctttgagtgtttaccctctcacccataaagtcctatttctcttgaaccaatgagcgtgatctcttcgcattatagccaaatcacttggtgggtttgaagcgaaattacatcaggctgtccttccacactgtggaggatcttgtcaaagtgaggaaggagatctcccctgccgtgaagaagaacagggagcaggatcacgccagcgacgcgtacacagctctgctttccaggtaaactttggtcttgtgagcaaagcatcagcggttcagaacgacaagatggataggagacaggaacacgtagcaacaaagttaccttaatggctggctctgtttgatacggaaaacttgagcaattaggtagagatttctgtatgttctgtgttaaataaacagtggcttcccaggttatattttatgtgttagctctcttttccaatggaggggtgggtttatggctctaaaattgagtggttgtaatagtaaagtcaccttagaggggaaaagatccctcatcctactgccctaacacaatccatctatgaatttcattaagtgctgagatttacacagcacatctccagagaaccttgggtatcgtccacagaaatttaagcctagaacactaaacactgttcttcaagtatttgagcatcaacaataataggatgcaaagtaaccagttaggaagagaaaatcttgagtaatgaagtttagatgacttcggaagaacctaccttaccctctgacaaaagaggatcagtttgggatgctgaacatttctacagtccctacccggagtccgccttccctggcaatgccacaagttgctttttgaaatattggaaggtgtgatcagagactgagtcctcagagacttgagccatatctgagactcgtctgtctttttccccctgaatagcccgttcagtatttgagcttataggccaatagtggccgcaatggtgggccacttctttagacatggcagagacccatgcacaggctgtgtgaagcccaggcctgctcttcagcctgcatgaggcagcctcctgagtatcaggaccatggtgggatggtcatgcctggctctcctgactggcagcacttaatgttttctttcttttttcttctatttacttatttgttttgagacagggtcttgctctgttgcccaggctggagtgcagtggtgcaatcatagctcactgtggcctcgaactcctgggctcaagcgatcctttcacctcagcctcctgagtaactgggatcacaggtgtgtaccccatgcctggctaattattattattattattattacttttgtagagatgagtctccctatgttgcccaggcctgtcttgaactcctgggccgaagcgatcctcctgcctcccagagtgctgggattagaggcataagccaccatgcttggccctctttttttttttctagttggggtgtaactcacatcatataaaatgaatacatcttacactgaattttctcctgtctgtagagttatcatccaagctattctttatttttttgagatggagtctcgctctgttgcccaggctggagtgcagtggcgcaatctgggttcactgcaacctccgcctcctgggttcaagtgattctcctgcctcagcctcccaggtatctggggttacagacatgcgccaccacgcctggctaatttttgtatttttagtagagatgaggtttcgtcgtgttggccaggctcgtctcgaactcctgacctcgggtgatccgccttccttggcctcccaaagtgctgggattacaggcgtgagctgccacgcctggcccagtccaagccattcttaaaggaaggactgccttggtcgttgaaaccacatcaatttaccttttgtgtttcctcggtttgaactctggtctcacctcttcctactgagttggaactctggtctcacctcctccagaccctggcagctgagttagttgctctcttgttaattcctagtgttctgcagaggggcggtgtcattactgatgaagaggaaacctctaagaagatagctgaccagttggacaacattgtggacatgcgcgagtacgatgttccctaccacatccgcctctccattgacctgaagatccacgtggtgagtggggcagggttgggtcgctgctcacatgaatttcctaacagccaggagatgatcattatgggtgaatccacagaagaatagactttcctggatgtagaactctagttagcacactgtgtgttttgcaggctcattggtacaatgtcagataccgaggaaatgcttttccggtagaaatcacccgccgagatgaccttgttgaacgacctgtaagttttgcttgtgttaccttcatcctaaaatttccagttttctggagagaatattcttcagtgctggagagtgaatctgactcaaagatatgtttgctgcttttcccccaaatactttattaaaggaaatatggagttagaatttttcatcagtttctgacagtatcatttccttttttgttgtatatcactgtatgacatcagtgtttgagctaggcaggatttggacactcgagggaaagctgggacttccgtttgggtagttgatagtgaagggacatggtgaaaaatggatttgtaactagaaggccttggttcaaacatgactttgtggtgttgggaaagtctttgtattcagttttctcttttccgaaatgaagatatcatctctgtgccacagttacctttcagagttgtcataaccaccagaatgaggtgatgtcttttgaagagtttttctcctaaagttctgtgattttaggcttgtcctgtgatcagctgctctcttaggtatgtcagttttcataccatagggagtcgtgatactcttgatgtaggttggttagtcttagggtccttctcccagctctagagccttttgactcttttaacaaccagagggaggtagagcaggctgggggtgggtgttcagggaggcctaatggggagtttagagcttggctttatgcttattttgtccccacaggaccctgtggttttggcatttgacattgagacgaccaaactgcccctcaagtttcctgatgctgagacagaccagattatgatgatttcctacatgatcgatggccaggtgagcaggtggcttctgggaagtaagctcctgggatggggaccttgtctggtccccatactacagcagcatctgccccactgttagtatttgttgagtgaataatgagttagtccaggaatgggagcaaccaagccgttccgacctccagctgtaccctcccctttcgagtgggaatccacacacagagcgtctcttctcaggaagcttaaagcactttcacattgctgtggacttctttgtagtgagaatctctaggcagagtgtgtgggcagggtgggaacgccatttcttggctttgcagcctctgacttgtgctgattgctaatgaacttggctagggctacctcatcaccaacagggagattgtttcagaagatattgaagattttgagttcacccccaagccagaatatgaaggccccttttgtgtcttcaatgaacccgatgaggtaaggaggtatcacttgggaaactacccggtattgtgggaagaacggacatgtggatctttccaaggcctcaggcattccgtcagatcagaattgcagctccatgagctttgttctcagggtatgaccgtcttttctgccagagacgggcggaggggcggggcaggaataagggccaacatgaggctgctgcttctgaactttgggagaggaatttggaatagcttgaagaagagaaagagcagacctctgactgctgtgacttgggttcaggctcatctgatccaaaggtggtttgaacacgtccaggagaccaaacccaccatcatggtcacctacaacggggacttttttgactggtgagtctgtgtcttctctatgagtaactgggcagcatttgagagggagggcgttgcgtggtgcaggggcgcttcccatgtcgacttaggaggtggctcctgggttcactctgcacctcccgtgtctgggttcctccctgggtctgagggaggaatggagaaaggggcattagagcctgacctgcccacttgcttgtctgtcctctttccaacccaggccatttgtggaggcccgggcagcagtccacggtctgagcatgcagcaggagataggcttccagaaggacagccagggggagtacaaggcgccccagtgcatccacatggactgcctcaggtaggggccacagagcagcatggctcctcactgctgtccgtgagcgagatctgaaggcctcttgcagactgtgctgtcaccacatctcatgggaggagggtggcctccgagaggccgtttcaggtcacccaagagtatggcagctgcaaccctgccagggcccgggatgtgctgtctttgactgttgactgacaattcatcagtgaccaggcacattgagcatcagcctctggggtggggaagccgctggaaagacgcactcagctgacaggtcccagacctaggacctcatggagctgctctgcccaggcaaggttgggatgtggcagcccggctgcctcacaggacaagcctcacgggacaaccacagattccatatgagctagggtgggaggcagctcagagcttcggagagtcacggcgttcgggggctctgacatgactggttgggaagacaggtggatgtggaaatgccaacagaaggaggctggaagggaaggaagggaagggagggaggaaaggagggaagggaaggaagggaagggagggagggaaggaagggaagggagggagggaaggaagggaatggaggggcctccacggcctctgtattctgcacagtgccactggggtgcttgcagcctgaatgcgtttctgtttagctctgatgctcagcacttggcttggagagggaggccaggaggctggggccggtttagcgtgtgacggtgtgacagtcctgatccaaggcagggagtgagggttgtgaggattcaggatctgtcatgtggggcagggggaggcccagggatgctggttcttagggaggggttggcacctggggtttttgtgccatccgtggagacagggaatgggtagagaaggggcttgaggcaggaggtgaccctgctaccgatatgctagcctggaagccccacccatatgggggccctgaagaccaccatgaggcttggtttgggctcgcactgtagattgggactcactgggttgcgggtgggtcttggtgaaagctggggtagtggatgaactgaaggcaagaggtaaagtgagagaagaaggccacagggtggaggctgcggggggtggagaccggacatgacccctggacagctgctccagggaatgcgtctgtagggaggaggtagagacaggttccgggtagagtgtggggggccttcttttcttaatttttattttttatttattttttaaatttttattcttcttggcatctgatcacatcttgccttctattaaaggagggtgggcttgagtgtttccgtgctgaagggacagtgtgaggagagaagatcagtgtggttgatagaactaggccccaggggtgcagacctgaggtctggggagaggcccaaggaggtggggcgcccgtcggagaggccacaaactctgctgaggatgggaggaaggcgagggccggaaggaccagtcctggtgcttccttgtgttgtggataggtctgtgagattaactagatcctgatgaagggttttcacaaggtgtctacaccatgtggggccttggtgtgaggctcctgggtgcctgttaggaacttgcatctgtctgtgtggtgcccagttttgccagttctcaggggttcccgggctgcatgttagaatcatcctggcttctgttctcattctccttccaggtgggtgaagagggacagttaccttcctgtgggcagtcataatctcaaggcggccgccaaggccaagctaggctatgatcccgtggagctagacccggaggacatgtgccggatggccacggagcagccccaggcacgtaagccacatcccggctgcccctgctgccgtgtgcacgcatccagatggccacggagcagccccaggcatgtgagccacatcccggctccccctgctgccgtgtgcacgcatgtatgccagcccgctccacccagcaggctgtgtctccgggacacacgtgttttgtcctgtgccggtctccttactgtgtgtgcggcaggctggtcaggccaggctttgctttctgtgcttcacacttgaccctgggctcttgatttttgatggccctgctctctggcgttctctcctcagactctggccacgtattctgtgtcagatgctgtcgccacttactacctgtacatgaagtacgtccacccattcatctttgctctgtgcaccattattcccatggagcccgacgaggtgagcattatctgtcctgtcggcaccctggcctcctcagcccttgccccattccaaatgcactggagctgaatggaggtggatgtcccaggagtgctggcaccagaggcggcagtagaattctggtgtgtgacgtcagggatgtcctttgggaattctctggccctggtgtgaggaagaaaccacaggaggcagaatttgcagccatttaccacgaggttttctctcctttcacactgaagttcagcttaggttcctggactttgcctgcaagtcagggcctttggtgttgcttttggctggaagccttggtttctcttgcaggtgctgcggaagggctctggcactctgtgtgaggccttgctgatggtgcaggccttccacgccaacatcatcttccccaacaagcaagagcaggagttcaataagctgacggacgacggacacgtgctggactctgagacctacgtcgggggccacgtggaggccctcgagtctggggttttccgcagcgatatcccttgccggtttaggatggtgtgcttcttccctgggattcagattcttcccactcttgtgctgtggtaggacccagaagctgcaggggctgaaataaagccccttctccccatcctgtcccacggcccctcaccgggtgtggcttctctggcccagcaccccccgggggcttctttagggcagtgcactgcagattgtgcacatgagtccttccggagctttctcgggcacaacctgccacgtgcagccacagcgtcaaacctgaggcaggctagtgtgggtgtgtttcccctctgaccccgtcgtctcactgttgtgctagaatcctgccgcctttgacttcctgctgcagcgggttgagaagaccttgcgccacgcccttgaggaagaggagaaagtgcctgtggagcaagtcaccaactttgaagaggtaaccatcagggaggcaggaagagccagtctgtgtttggcgccttcttcacagaccacgtctttcagcagcacgtttattgtgcacctgctgcgtgtggtgctgtggacggatgacacagggtctctggtgggacagggcagtcatggttgtgacgtgtgatgctgtcacaaggtcggagggcttcatgagaggtggggtgtgagctgctcctgaaatgcagtaacatggaaggtgggtcctggtgggatgtatcccgtgtcctgttttaaagcattaggactttattttataggcactggggagccattggaggttttaaattttatttactttttgttgttgagacttaaaaatgacagtaaattcctacaaatgacaggattagtgactgtaaaatctgtttacataatggttagaaagcacacttacaaagtgtgttatgtgactggagagggagacaccagttcttctctgatccctgttcctcaggacatggcacatctcaggtcttttttttttttttttttttttttccctttttgagatggagtctcgctgttgttggcctgggctggagtgcaatggcatgagtttggctcactgcaacctctgcctcccgggttcaagcaattctcctgcctcaggctccccagtagctgggattacaggcatccgccaccacacctggctagtttttgtatttttagtagagacagggtttcaccatgttgtccagtctgatcttgaactcctgaccttgtgatccgcctgccttggcctcccaaagtgctgggattacaggtgtgaggcaccgcgcctggcctatctcaggtctttatgtcaggcactgtgcagcactacatcatgttcagtgaggttgctggtttagagtttttaacagttttcacattgatgccaagaaactttttttttttttttttttttttttgagacggagtcttgctctgtcacccacactggagtgcaatggcatgatctcggcttactgcaacctttgcctcctgggttcaagcgattctcctgtctcagcctcctgagtagctgggattacaggtgcccaccaccatgcctggccaatttttgtatttttagtagagatgaggtttcaccacgttggccaggctgctttcgaactcctgactgtaagtgatctgcccacctcagcctcccaaagtgctgggattacaggtgtgagccactgtgcctgccctcaagaaacatcttgtaatagattcactagtcaaaatttaaacaagaatatgtgtacactcttggcaagctgtgaagcactgtttggctattgtcagccacatccattattatacttcagggaactcttatgaaccgatcaggaagagagccttgtctgaataacaaataggagttaaagaatgtcggccatggccgggcacggtggctcacgcctgtaattccagcactttgggaggccgaggtggatcacgaggtcaggagattgagaccatcctggctaacacggtgaaaccccgtctctactaaaaaaatataaaaaaattagccgggcgtggtggcgggcacctgtagtcccagctactcgggaggctgaggcaggagaatagcaagaacccgggaggcggagcttgcagtgagccgagatcgctccactacactccagcctgggcagcctggaatcccagcattttgggaggctgaggcgggtggatcacctgaggtcaggagtttgagaccagcctggccaacatggagaaaccccgtctctactaaaaatacaaaaaaaaattacccaggcgtggtggcgagacgtctcagaatctgagacagagtttcactcttgttgcccaggctggagtgcaatggcatgatctcggctcaccacaacctctgcctcctgggttcaagagattctcctgcctcagcctcctgagtagctgggataacaggcgcttgccaccacgcctgggtaattttttttttgtatttttagtagagacagggtttctccatgttggccaggctggtctcgaactcccgacctcagctgatctgcccgcttggcctcccaaagtgctgggattacaggcgtgagccaccgcgcccgacctagaagcagatatttaaagtctttaagaaacagtgagatgggcaggtagagtgaggctggaggtgtggtagatgtgaggatgccaggctccctggtgagtgaggaagagagctctgtagatgtgaggacgccaggctccctggtgagtgaggaagggagctctgtagatgacattgtcctgttagcgattcctaagtcctcgcaagtgcccttgaaagggaagcccaggatcgcctttgtgtccctgaagggtcacctgttgggcggagggtggctggggggatgtcagcaggggctcacagccacgtggggcatgtccaggtggtgtccccaccatggaaacttggccattcacttgtcccagcccatcctccccttcttgactggacagcctttcagaacacgccgttactgggcagagaagggtgcagtggaggctcttccccggctgattcgtttatctgtaattcaagtagaaacaataggtgttactgttgtggtatttcctgttctatggaatagatgttattccttgtaatcacttttttcttaaaattttaggtgtgttttctatttttactactttggagggttttaaggatttttctttttctttttttttttctgaaacaggatctggctctgttgcccaggctggagtgcagtggtgcaatctgggctcactacagccttgacctcacgggctcaagcgattcttccaccccagcgttccgagtagctgggactacaggtgccaccgccacacacggctaattttttattttttatagagacgggggtcccactgtgttgctcaggctggtctcgaactcctgggctcaagtgatcctctggcctcggtctccgaaagtgctaggattacaagcatgaaccactgcacctggcctaaggattttttttaatactaaggagagtttagtgttcaagtaattttctaatgactccaccaaatttaatgtatttcatagaaatgatggcaacccttcttaacttttttcttctggctagtttttgctctatttatatatttttcagctttttcctctcctgaatgtctaaaaggggttggtgaactgcacacgaggcaagcttggtcaccagcctctactgagtttcgctttctctgcaggtgtgtgatgagattaagagcaagcttgcctccctgaaggacgttcccagccgcatcgagtgtccactcatctaccacctggacgtgggggccatgtaccccaacatcatcctgaccaaccgcctgcaggtgagactttacttcccgtgtcagagtcggagctctctctgcccagccctaagtgctttctcacccctcccagccctctgccatggtggacgaagccacctgtgctgcctgtgacttcaataagcctggagcaaactgccagcggaagatggcctggcagtggaggggcgagttcagtgagtgtcggccgcctgggtgggcactcggtgggaaacgggtgggtgagtgtcggccgcctttctccacttggtgggaagccggtgtgtctgtgcctccttttgaacttgcccccattgcctccttcccagtgccagccagtcgcagcgaataccatcggatccagcaccagctggagtcagagaagttcccccccttgttcccagaggggccagctcgggcctttcatgaactgtcccgcgaggaacaggcgaaatacgagaagagaaggctggcgggtgagtgcctgggcatggtcacggctgtaaagatgtggctcctgctcccactttctgttcttactgggctgcgttggtccatcccagctggggccccagaggtgttgtcacagcagaccagaagctgctctaggtcactgtaagctgtgctctcactgcagggtcctttatttgcttccccatctgcaagtgttagacactgctgctctgtggtcttggggtatttggcctgttcctacccctgggctgtcctatttctttctttttttttttgaaatgaggtctcactctgtcacccaggctggaatgcagtggtgtgatcttggctcactgcagcctcaacctcccaggcaccggcaatcctcccatctcagcctcctaagtagctgggactacaggtgtgcgccaccatgcctagctaattttttgtattttttgtagagatggggtcttgccatgttgcctaggctggtctcaaactcctgggctcaagtgatccgcctgcctcggcctcccaaagtgctgggattacaggtgtgagccaccgtgcccgcccacctttttcggtatgagaaactagcagtgtatctgagctgttgctcctttgtggtgacgtagaagccatgttcttcagcacccctgtgccctggctccctctgctctgggagatctcacccacctgctctgcccatctccgtcgtgcttagattactgccggaaagcctacaagaagatccacatcaccaaggtggaagagcgtctcaccaccatctgccagcgggaaaactccttctacgtggacaccgtgcgtgccttccgggacaggcgttacgagttcaaagggctccacaaggtgagctctgaggggctgcaagctttggcctctgtgagggcagtttcagtcggctcatgaagtgggcactcttggctccttgcctgggatcctctgagcaggcacttgcactcggatggtaacgtgcaattgtttttgacttggaagagttgatggccacgaaggatgcagaccatcatccaccctggtctgaggcctcagaaggaccctaaaggatgatttctaaagtgattatttagagcaggggtcagcaagctacagctggctggccgtttgagtacatcaagttttacgaacccaactgccttcgcctattgtttatctctttcccgctgtcatgggaggtgaggagttcctagaaactctaaggccttctcatctatggtattcaccatccggcccctcgtgtttaactgacgtatttcatccggtaggaacatggaaaatgcatagcaacacctctgttttgataccaacgggtcattattttatatctgatcagattgagccattttttttctgagagaccttcactgtagactcagcacggcccctgctgtgcggccccctggcatcctgcactgccctgctgaactcatcgtcacatgttcttttttataatggtaaggcggacataatatgacatttagtgtttttaagtgctcagttcaggggcatgaagcatattcgcactgttgtgcaactatcaccaccatctacctccagaattcttcgccttctgaaacggaaactcttatctccatcaaacagtagctccccacctcctccctggcccctagtgaccccattccactttctctctctgaattccacgactctagggatgtcatgtaagtgaaccgtgcagtatttgtatctttgtgaccggctttttcacttagcatgatgctttcttttttggagacggggtctcactctgtcaccaaggttggagcacagtggtgtgaccttggctcactgcagcctccacctcccaggctcaagtgatcctcccgcctcagcctccccagttcctgggaccacaggcgtaccatcacgcctgatcgttgtatgtttggtagagacggggtttcaccatgttgcccaggctggtctcaaagtcctgaactcaggtcatctatccaccccagcctcccacagggctgggattacaggcgtgagccaccgcgcccagtcttagtatgatgttttcaaggtttatcaacatacagcgtgtatctgtactgtatttttgtaaatggctgaataatatttcattgtgtggatttgtcacattttgtctatccttcatacaccgacgtgcacttgggttgcttccaccttttggctgtcgcgagcaatcctggtttcaacatgggctgcaagtgcgtcttcaggtctctgcttttggtgattttggatatgtacccagcagtagagttgttgggtcatatgctaattctacatttaccttttaaggagctgccttactatctcactttattttaattaagcaactgctaaattacttgttcatctgtctccctcatcaaataagcaccaaaagtgtagtgactgtctcgtgcttcagagtacaatggagttcctggcacatactaggcactcagtaattatcttaaggaatttgcttttgttccttaaatacccagcctttaaaaaccttttctcatgttgggtggggaatttgatgagacatctgtggtcttagctgcatttcttgattgattttaccaggcacccccgagtagctcttgttccctagaaactgtgctgaagcgtttaggatgtcagaccgtgaaatctacaatgttcaaatgattctgtcaacacagagagacagaataaaggaagtgtgacaaaatattgacagttggccagtctaggagaagaatgtacactcttcattgtactggttttttaggttttctatagatttgaaaattttcaaaatactaaaaacctgggctattgactttgtagaatgtgaaatggaagaatctgtgaggtgctccatgttcatgtgcttctcaggtgtggaaaaagaagctctcggcggccgtggaggtgggcgacgcggctgaggtgaagcgctgcaagaacatggaggtgctgtatgactcgctgcagctggcccacaagtgcatcctgaactccttctatggctatgtcatgcgcaaggggtaggtgggcccgggcccgggagaggcttatgggaggaatggatgagtccacgtttagggcagcttcaggtgtaggctgctgtgcatggagggccgttcatctgattcaaggaatgttggagggagaaggctttgggctggggtggggctgggaggttgaagagagtgggggccacgctgactttgagggtctgggtgtccatgagtgatgcgtgctgtggggtgtatgtgtctctgcatcatgggctggagacacgacttgccattttccagcgcgttcatgtctcccagcgtggatcctcactcagggacttgcagagtgtcgggcagttgcttcacagcatgtctgcgtgtccgggaggggcagagaagcaactgacaaggggcatggggctggtgccgggaggggagggtgggacagctgacagcagggctgggacccaggctggaggagggttgggcctggcagctaggcctgggctttctctgagaagctggaggtgagaatggggcttgggaggaggtgtgaagagagtagagaaggcgtgaatgggtctgggtggtattaagagtcctgctgaggctggagtcctgaacggctggacgcagtggcacatactgcacccttccagatccttcctgggcaccaaggtggggacagagaggtgtcctcgggcagagccagattccaccttagttctgtcctggtgcacgcacatttggctgcttcccttgtccctgtcgcatctctcctttcctcctccctactcctcactgcctctgataccccctggaggagccatgccagccccacccaccagtttgtggtgtcctctcagggctcgctggtactccatggagatggctggcatcgtctgcttcacaggggccaacatcatcacccaggcacgggagctgatcgagcagattgggtgagtgcagaaggggagccgtggggctgggagcaggtcctgggggcaagcatgggcaggaaggaaggagggaaggctggaggccacacactgggcaggaaggaaggagggaaggctggaggccacacactgggcaggaaggaaggagggaaggctggaggccacacactgggtgaaaaggaaaggggaactcacgaccttgctcctctctttctctgaaggaggcccttagagctggacacagatggtatatggtgcgtcctgcccaacagcttcccagaaaattttgtcttcaagacgaccaatgtgaagaagcccaaagtgaccatctcctacccaggcgccatgttgaacatcatggtcaaggtgagtctggggcctctggtcctgaagctctggctggcctggcgtcagtgccctgatgtcactggctctgcagcacctcacagtgtgcatgccttcctggcacccagcactgctcacattgcttttctatagcctgaagaccatggtcagaggtatcaagtgattccactcctttctctttcagcatagctcccagaattttttgcttttaactttttattttgaaataattttaaacttacaggaaattacaaaaatagtacagagaatttctgtatccccttcaacctgccttcccctaatgctgacctcgcataaaccatggtgcgcttgtcaaaactaagaaacctatgtctgtgccccagtaactgcactgcaggcctcacctggatttcccatttcccaccatagcccctcttctctcccaggatcccagcaaggacccacgtggcgccgagttgtcctgtcccggtctgtcctcgtgtcacgacctccccctctggtggtgccggccaggcgatggttggctgtcccttgatcaggggttgtctgttgtttctcgtgactagactgaggtgatttgggtttttggaggagctccacaggtgcgacaccctccccacgttctcacacgcatcgtgttggtttgtggtggtgtgggagtgtgggtgtgttgtggggacggcttagtctcctgcctgaggggcttctgcaggccttactgtggcgctcctgtgccccctcccatacggctcttcagtcgtaaatacacacccagtggggaggatataagcgtccctggaggagggctgtcagagtttctggacctgtattagagccatcacagcagcaaatagatatcgtggagcaggtgcttcgagacagtgtatccacagctgctccataagcttctgcccactgtgttagcgttgctgatgggctgtgtttgctggtgggccgcacctgcagcagttacgcctgaggtttcctgtcgtggtttttctctggcgattgtctgtttccttcattccttctactgtatcaattgggatcctgtagggaagcgttgctatccttctcttccatttgttctcgtttatttgtctgcttattgacatcagtgtggatttgcggatcagagtggacatcccagggttattgttcataggaccggagtggcttcctgctccacgtgttccccttgggccactggggcctcctagtttgtggcgtgttcttgggacacgccctcttctggtctttgtttctggagcactttcctacttcttggtactgtaaggtccaccagcctcatcttgtattttccctgctccaacctggagtcagccagttctccgagaagaatgatgtaaaaacccgagatggggtgcttgctgtgctcactgttcctgggagtgtcatagcttccagtctctcatagtggaggcagccaggaagtatgtctctagtaacgcacgcacacagaactgtttatttctgtgtctgtctgtctgcatggatgcatttaaacacatgagtctgcccctttcttattagtgacttctttctccttcagtgataaacctgtttcgaatttctcaatatatgtgtttgttcaatcctagagtccatgtaaagtagttttagaattgctaacagacttgtgtcccatgagaaataatttcaccagccactgtacagcatttgtagatagttacttttgttttcagccttaccctgtccagtcagcagagttcacgggcagctccttcctccccaccctgttggcatgttctgctgtatgtccacagtgctgttgggctcatttggcccagtctgcacccctcttgggatcccagcaccatggctggatggcttgtaatttgcacacagtgacgttcactctgtagcgtacagccctgtgggtttggacaagtgcatagtgtgtgtgtccagcaccacgaagcaacacaaaacagctgcaacccctttgtcagcaaatcctctccctaccccgaaaccctggcaacccacaatgtgttttttgtactataattttgctttgtcgaaaatgtcatgtaaagggaagcatacggcctgtagcattttgggtctggcttcttggacctaacagatacacctgagtttcaccacttggttgcatgcatcagaacttccttccttcctgctgccaagtcgtgttagttatgtggaaaagcctcggtttgtcaatccatccactcctggagggacaccaggtggtttccaggtttgggccatcatgagtgaagctgccccctcttcactcttgtttctcaggaaggcttcaccaatgaccagtaccaggagctggctgagccgtcctcactcacctacgtcacccgctcagagaacagcatcttttttgaggttgatgggccctaccttgccatgattcttccagcctccaaggaagaaggcaagaaattgaagaagaggtgggactctcatagcttttgtgctttagaaaggacatggattgagatagattaaatttagcccagaaaggaggttggatcaggagccaggatagaaacagacctgggttcttgtgatcttactgattccgtttgcaccagctctgtctgcccgcctgctgtattctggctctgtggctgcaggcccttcagccattttccttttagagaagcagtggcctaagggagagagacgtttgctgcctcgtggatgacaggtggagggttggaaagggaagaggcgggcagagaggatgaggcacagctggtggctccccagcgctccttgccactgctgtgcttgccttttttttttttttcaggtatgctgtgttcaatgaagacggttctctggctgagctcaagggctttgaggtcaaacgccgcggggaactgcagctgattaagatcttccaatcctcggtgtttgaggccttcctcaagggcagcacgctggaagaggtgtatggctctgtagccaaggtggctgactactggctggacgtgctgtacagcaaggtaaaggcctaccctccaccctcacctgctctgagggatgaaggatgaagcaagaaggggaccccgtgcttcctgggctcctggagaccaaggtgaccgaagaacacagggccagtcctaatgaaatcccaagacctcctgagcacaattacccccttggagttcccctcaacttctgcatccagggacacaactctgagggaaacgtttttctaaatagcgtgataagcctggcatggtgatgcgtgcctgtggtcccagctacttgggaggatcacttgagaccaggaagtagaggccacagtgagccgtgactgcaccactgcactccagcctgggatatttgtttatttctatgttactttgtattttttatatttttcaggctacataacattttgacagtttacataccttaatttacgtaactagcccacgattatttactaccagataggtttcacatttccattgttatcaatggtgttgcattgaacgagatatctcggtgcatatgtttcccaggcacaggcgtcttgggtagaaggaatactggaacactctgcagtgctttcctggcttgctttgctgtgtgggcttctgtttcttggcatattgtcttgtatagagtgaaacacacgagcaagggagcaccagggtatcacacagaatattcatgagcccagcactccttacaggatgtggggggcctgtggtcaggaacatgtgtgcaaagcacagctccagctggatgtgggtgccacactggaactgctcaggcctccactgctcaggccactctccagccggccggagtttctctttcctctcttctggctcttcctgccccttctttctcttcctttcaaggagaaaaacttcctgtcttaggccgagcaacatccttttctgcagccttggtgctcttcagtaaattcttcttgatattttgtgcacagtttaataaaataaaagccaagccaggcgtggtggctcacgcctgtaatcccagcacttgggaggcctcggcgggcagaccacttgaggtcaggagttggaaaccagcctggccaacatggcaaaaccctttctctactaaaaatacaaaaattagctggatgtgatggcatgtgcctgtaatctcagctacttgggaggctgaggcacgagaatctcttgaacccaggaggggaggttttagtgagttgagattgcaccactgcactccagcctgggtgacagaatgagactctgtctcaaaaaaaatataaaagctaaagttttgtgtgtgtgtgtatgttttaaagtattgccacacaggcatattagagagctcttgaaattgcagccttctgcgtctcaggctagagaagggcatggcctagaggagcacagtccagggtgagctcagactctgccccttgatttctgcagtgttttacccattgtctttctctaggcagccaacatgcctgactctgagctattcgagctcatctctgagaaccgttccatgtctcggaagctggaagattacggggagcagaagtctacgtccatcagcacagcaaagcgcctggccgagttcctgggagaccagatggtcaaggatgcagggctgagttgccgctacatcatctcccgcaagcccgagggctcccctgtcacggagaggtgagggctccccccatcacggagaggtgagggctcctcccatcacggacaggtgagggctccctccgtcacggagaggtgagggctcccctcatcacagagaggtgagggctgccctgtcacggagaggtaaggggttccttacagatttgggctgtgtttaacaccaagtttggggatggcataagtgtccatcaaccagaaatggataattgccattttgtagggaatgagatacactataccagagttcaaagggttgaattgcagctacaggttacaacactgacagtttgaaaccactttggagaaaaaagcaaaaatcaggttgaaggaagacccttatgcctccgtgtatgtaaaacttaaaaacatggaaactgctctttttttttttttttttttttttttttggtggttatatacaaataggaccagtacaaatgcctgcatggggttgatgaacaccagaataagggttgtctttacttctgtgtgaggagggaataggttggggtcacacagggcttcactctaatcgtctcacaaaggaagtcagagtggccaagtgttgaagcttgatggagccgagtggatcatagtgtgcgtgtcttctttaggtctccttatgtttgcagtattcaccacagatgtttcctccagtgaaagggaagcactgacggttgccagttgctttgctagtgacatgaaaacaggctcgttttttctagaaagcagcctgagtcttctgtgtgttactcagcaaggaacatgtagacatggttatgaacgtgcacgtttgcctgtatgcatgcacgtggttactcagaaacgcagacatgtttacgcacacacgcatgtctttgcctatacgcatgcgcgtggttactcagaaacgtagacatgtttacgcacgcatgcgtttatgtatgtgcatgcacatggttatgccgtgagaaacatgtagacatagttacgaacatgcacgtgtttgcctgtacgcatgcacgtggttactcaatgagaaacgcagacatgtctacgcacacgcatgtgtttatgtatatgcatgcccatggttacgctgtgaggaacatgtagacatgtttacgtgcacacacgcacgtgtttacacatacgcacgtgttactccccgaggaacctgtaggcatgtttgtgcatacatatgcacgcagatgtatacattgatgtttgtgaacagctgttacacgtccttatttccatgttcatttgataagagttaggatcagattttgggtgattttcactgttactgagctgtgtgcctgtcttccttacccagggccatcccacttgccattttccaagcagagcccacggtgaggaagcactttctccggaaatggctcaagagctcttcccttcaagactttgatattcgagcagtgagtgccagttgcgttctctactcttaaaagtttacaaggaaagctagacagagcagaatatgtctgagttggattatgttttttgtctggcgtcttcactcttgacttcctcctttctgataagtaataggtgagcacctaataaccttttagggcaaaactgaaaacatgaagtgcctggggccctttagctgttctattggatggactaaggccaggggtgttggctcagccacctactagctctgtgatctagaggagtcagtgaagctccctgccttggtgtcctctgttgtgcaatgggcacctttcatcatagagtttctgagaggattaaataagacacagtggttagccctgtgctcagcatgaagtgagccccactcttggctgctgccacctgctgttctctgtgcccgtttcctgcacatgcagattctggattgggactactacattgagcggctgggaagcgccatccagaagatcatcaccatccctgcggccctgcagcaggtaagggcggggtcagtggcacgggctgtggggctaaaaactgtgcagttagacaagggtctctctctgatgggtgttggcctcacacaggtaaagaacccagtgccacgtgtcaaacaccccgactggctgcacaaaaaactgctggagaagaatgatgtctacaagcagaagaagatcagtgagctcttcaccctggagggcaggagacaggtgacggtggggccccaaggctgggctgggcgggatccttgtgacacacaggactccaggcttcttgcgctgctgtgtgtgctgtagtgaagcttctgttcaagcatcgaaaatggactttttctgaaaatgtgcccattggcactttactctctaactctgagtgtcactcttttgttaataggacaccattgtgaggctgaggtgagggcaaggaactgtctccttatgtgaaaatattagggtgcactacttagactcagtgccttgggcaaatcactgtctcttgaagccccagttttctgaatgtgaaatgaatatcttccctatggaaacacttagaaacacaggacacagtgtaataaaaggtacagtgaaagtcagaagagcaaaaggaaaattcttaaatgctgaaaattaaaagtaagctataaatcagagcagtatacaaactcacatgacaagaacaaggttctttgaccaggtgcggtggctcacacctgtaatcccagcactttgggaggcctaggtgggcagaccacaaggtcaggagatggagacaatcctggctaacacagtgaaaccccatctctactaaaaatacaaaaaattagccaggcgtagtggtgggcgcctgtagtcctagctactcgggaggctgaggcaggagaacagcgtgaacccgggaggcggagcttgcagtgagccgagatcacgccactgcactcccctgggcgacagagcgagactccgtctcaaaaaaaaaaaaagaaaaaggttctgagatggattggattttaaaatttaactgtcttatttgtaagagttatatatgtattctttcccctgccccccaagacggagtcttgctctattgcccaggcaggagtgcagtggcacaatgcagcttctgcctcctgggtttggctcactgcagcttctgcctcctgggtttaagcagttctcctgcctcagcctctagtgtagctgggattataggcacacaccaccatgcctagctaatttttatttttttaatttttttctgcctcagcctctagtgtagctgggattataggcacgcaccaccatgcctagctaatttttatttttttaattttttttttaaatttttagtagagacggggtttcaccatgttggccaggctggtctcaaactcctgacctcaggtgaatgcacccgccttggcctcgcaaagtgctggaaatacagcactgcgcccagtggcttatgggccagtataacaatttcaagagttatattgaaaagataggacgcaggaaaagcaaaaggagtaaaaaatacgtataccaggtaaatgttaaccaaaagaaagctgatgtggctgtattaataccagacaaaatactctttaggccaaaagtattaggaaacataaggactattgttacataatactgaaagtcacaattctctggaaatatatactaattgtaacaatgtagcctcacattaaataatgtaaacatttacctaattataagaagaatttacctccaatcagtttgggagatgttaacatccctccctcaattgatagttggagcagaccaaaaatcagcaaaaatatgtttggaatgacacaatcaactaactagatttagtcactagctataatacatttagtgaacaaatgtagtcttgcactaaaattagagaatacctatccttttcaagaatacataaaataatgaccatatatataccacagagtaagctgcaaccaattctagataacttaaatacagaccatgtttggaaatttaagaaaaaaaaaacacatttataacttgtggatcaaaaaagtcatagaacttagacaatacttggaactgaatgtaaatacaaatgctattaaaatttgtagtatgcagttaaacaggacttgtatacgcatttatatatctaaatgcatgtattagtaaagaaaaacaaatagaaaattaagtttccaactgaaaaagttagagaacaacagatccatcagaggaagtagacagaagttataaagagttataaaggtaaccaggcatggtggtgcacacctatagtcctagctactcggaaggctgagaggcaggaggattgcttgagcccaggaatttgaggttgtagtgggctatgatggcacctgtgaataggcacttcaccccagcctgggcaacacagggagaacccaactcaagaaagaaaagaaagaggttacaaaattgagccagaatgagtgaaacaaacaatacaaccaaaatgttgttctttgaaaagacttaggaaaatagtcacatctttttcttttcttttgagacagggtctcattgtgtcacccaggctggagtacagtggcgcagtcatggctcactgcagccttgacctcccaggctcaattgatccacctgcctcagcctcctgcatagctgggactataggcgcacaccaccacatccagctaatttttgtaattttttgtagagacaaggttttgtcatgttgtcctggctggtcacatctttttcaggacagagttttttattttaatgaaaacagacatcattatagatatagtaaagcctaaaaaaatggaaggattcccattttctgctaaacagttggaaaacatagatggaacggacagtatcctcaagttatgcactgacctaagaagtaataaaaacctgaatagaactttaaccattacagaaattgacacttaaaaagaaacaggccaggcgcagtggctcacacctgtaatcccagctctcagggaggcagaggcgggaggatagcttgagcccaggagttcgagacctgcctgggcaatatagcgagaccccgttctccacaaaaagaaaaaaaaaagagacgaaaaaaaataagtgtaaaagaaacatcaaacccaaatgatttttaagagaaaaaggaaaaaaaaaacccttagctcatttggtaaccttggcaatccttgttactttggtaacataattgaaaacaggaaaggaaagttacgggccatgaacaatagatgaaaaaatatcaacatacatgaacaataacaatatgaccaactaggacttatgctgggaatagcaagcactgtttaattttagaatttgccaggttagtttttcttgggagaaatccactaattcatcattaaaggagaaggctcgtaagatcatctccaatagatgcagaaacaacatgcggtaaaactttaacatctgctcatgttaaagtttgaacaatcaaaatcagaatagatgagatgtttcttaacctgataaagtgttcttgaaacctaacagcagacctcatacttaaccacaaaacactggaagcattgaagtaaggagtaagaaatggatgcctgttaaccactgcttctgttcaaaacagtttggagatcctagccagcataattaaaccagaaaaagaattaaggattgaaaagggagacatcaacttattatttacaggcgatgtaatttgttaacagaaaatgtaaggaaacctagattttgtgttaacttatatgtatttcagcaacaattagataccaaggtaagatataaaagtctattgctttcatttatactagaaacaaaatattttttgaaagataccatttacaatagcaataaataatgtactaaggaataaattcatggtaacaatgtgtgtaagacttttacagaaaaaattacacaacttttttctttttgagacatggtcttcctttgtcacccaggctagagtgcggtggcaagatcatggctccctacagcctagaactcttaatctcacgttatcctcccacctcagcctcctgagtagctgagactgcaagtgtgcaccaccacacctggctatgtattttttgtagaggctgggtctcactgttgcccaggctgatcttaaactcttgggctcaagtgatcctcctgcctgggccccccccaaagcactgggattacaggtgtgagccaccatgcctggcctatacacaactttattgaacatataaaaatttacctaagtaacaaaaagaggtaccatctttacagatgaaaggactcagtattaaaatatggcagtttgccccatattaattcataaaattcagtgtaattccaataaaaaagaatctgccaaaagctttttggatagaacttgacagacgaatcctaaaattcatataaagggtaaggataagaataaccaaagaattttgaagaataaggagggcacgttgatcttactatgtaacgagacacactatcatggcatcttgacaagatgagaggagagcagtagagccgattgggagcctagaaacagactcccctgttagtcggaagttggtaggtcacagatcgttaaggagagagtggactgcagtgagtgatgctggtgaaaatggtttttcatatttggagaagtaagttgttgtatcacactgagtgtgaaactaaggctgagtgtgatggctcatgcctgtaattgcagtgctttgggagtccaaggaaggaggatcagttgagcccagaagttccagacgagcctgggcaacatagggaggtctcgtctctacaaaaaaaatccggcacaacattaggcatggttgtgcatgcctgtagtcccagctacttgggaggctgaggtgggaggatcacttgagcctgggaggttgaggctgcggtgagccaagatgaccactgcactccagcctaggtgacagagcgagacccctgtgtctttaaaaaaaaaaaaaaaaaaaaaaaggaaactacaatctttggtaaacaactcaggagactatgatgctggggtgggaagggcttttttaaggcacatgtgaaaaacatcacaaagggaaagaatgatcaattaattaaaagttaaatcttgtgtagtctgtgacaagaaaggcagaatgttgataattgttgacactggtgataagaacatgggagctcattactgtgctttcgtgtatgtttgaaaactttcctgataggaagtcaacacacacaaacttacatgtagcacagaagtcaccatgaaacaaaggcctgagtcacattttgaagatgtttagaatgtataaaagttagaaatggctcataaacgtgttagctatctattgctgcatagcaagtaaccccaaaacttagcaacttaaatgcactcgtgtatccgagggctccactggagaaggagccacttccgagctccctcccatggggatggcaggactcggttcctccttggcctttgtctggacgttatccttagtcccctgctccatggggctcttcacaggacagctcacagcatggcactggacttttgagagagtgccagccaggcagaagccacagtgttttatagctgctctcaggagtggcattccatgacttttgctggaatctgttcattacgggcaagtcaccgggtcccacccccactcagggaaggagtcacacagggtgtgaacaccaggaagtgggggtcgttgggccattttgggagctgcctgcacagggccaagatgttcagccttactgttgatgaggtaaatgcagcatgatgtatttagatagcaggtcacactgaaggcaagtaagtgtggtggcatcaagtagcaagattgtgggaagtaggaaatccctggtgctagaggtggaggtggttgttctccgggaccaggcaacacatacagagatggtcattgagtcacagtttgtagttttgaaaaagtaggcgcttgtcattcttcatttgcaaagtcatgggtaggtaggctgatgtgtttatatgataaatcatttcacatcagttacaatgaacgaaccatatgtgcatgtttcacccggtgtcagtctcaaaaatacatggctgaataaagaaacaagttgcagggacaggcatgtggctcacgcctgtaatctcaacactttggaaggctgaggtgggtggatcacttgaggtcaggagttcgagaccagcctggccaacatggtgaaaccccatctttactaaaaatacaacaaaaaattagccgggcttggtggcaggtgcctgtaatcctagcttcttgggaggctgaggcagaattgcttgaacccaggaggcgaggttgcagtgagatgagatcgtgccattgcgctccagcctggacaacagagtgagattctgtctcaaaaaaaaaaaaaaaaaaaaaggaaacaagttgcagtcagatgtgtcccacatgttactatttaggttaaaacttacagctgtggcatgtgtctgtggacatgtggtaaaaatttaaaggtgtgtgggggcagacagaagagggctgtacccattatttgcaatattttctttcttacaaaaagcattctggagcaaacatggcaaaatgcaaagatttacttattggtggtattgagtgacgttttatttttcggtttgatcttttcactttttttttgaaagagggtctcaccctctcgcccaggctggaatgcagtggcgcaaccttggctcactgcaacccctacctcctaggctcaagtgatccttccacctcagcctcccaagtagctgggaccacaggcccacacaaccacacccagctaatttttctattttttgtagagacggagtttcaccatgttggccaggctagtctcaaactcctgggctcaagtgatccgcccacctcagcctctcaaagtgctgggatgacaggcgtgagccaccacacccggccttcactattaaaggttcaataaacttgtgtaaacgaacatcccatttcaggtgatatacttatactagatttcgagaagtagaatttgtggggatgagatcctgagatttttgtttgcttgtttttatgaggcaaggtctcacttgcccaggctggagttcagtggtgtgatcatagttcgccgcagcctccaactcctgggttcaagtgatcctcctgcctcagcctaccaagtagcttgggactacaggcgcactaccacgcctggctaatttgtaatatattttgtagagacagggtcttgctgttacccaggctggtctcaaactcctggccccaagcaattctcctgtcttggcctcccaaagtgctggcattccaggcatgagccaccctgcgcagcccgagatcctgagatttaaggcttcactgggtctttccaggtcacgatggccgaggcctcagaagacagtccgaggccaagtgctcctgacatggaggacttcggcctcgtaaagctgcctcacccagcagcccctgtcactgtgaagaggaagcgagttctttgggagagccaggaggagtcccaggacctcacgccgactgtgccctggcaggaaatcttggggcagcctcccgccctgggaaccagccaggtaaggcacacagctgtgatactgtctgtctctgaggggtctgcacagcccagggagcccgagatgcgtcctgacccctagggaggctgcttgtgagaaagtcatggcgggcattcccatctcaccacttgcacactggctgtgctcaccatccatcccaggaggaatggcttgtctggctccggttccacaagaagaagtggcagctgcaggcccggcagcgcctcgcccgcaggaagaggcagcgtctggagtcggcagagggtgtgctcaggcccggggccatccgggatggtcctgccacggggctggggagcttcttgcgaagaactgcccgcagcatcctggaccttccgtggcagattgtgcaggtatagaccttgatccaaggggagggcagtggctctgctgatggcccagggagggggtgtccagctgggccctgaggtctgggatgggagggttagagtgggcctggagtttcctgcccatcgtagggaggcctaaggccctgtgctgggagctgcaagctacctggaaggtggccccgtctgtgggttccagtgtgtcctgtgatgtgctgtatgtccgtgtggcctttcagatcagcgagaccagccaggccggcctgttcaggctgtgggcgctcgttggcagtgacttgcactgcatcaggctgagcatcccccgtgtgttctacgtgaaccagcgagtcgctaaagcggaggagggtgcttcgtatcgcaaggtagggaggagctggtgctgcctctgcagtcatctgggcagcctgaggtggctttcccatgatctagcctggcctccagcctccatctcctcagtaccttatggggatgttctaggaattcctcaaaacaacgtgtgtgagcgctgagcaccgagcctggggcagagcgagtgccgggaatggagctgctggtgtccttgtcacgatgagcttgtctgcccgcgaggtccatgttgcggggacaaaccaagtggcattggttagagattgtgaactctgtctccgtaggctctttggttgttaacagctttattgggatgtaaagttacgccatccaactcacccatttaaagtgcagaattcaatgacttttagtggcatgactattgccagtcaatagtgacattttctttttttttcttttttttaattttactttgatttctgggatccatgtgcagaaagtgcaggtttgttacataagtaagcacatgccatggtggtttgctgcacccatcaccccgtcacctgggcattaggccccacatgcattagctgtttatcctgatattccccctcccctcacccccccattcggatattttcatcactccaaaaagaaacctggcatcccttacctgtcaccatcctcccccagccctcagtagccactgatccacttcctgtctctgggtttgcctgtttgggcatttgatgtaaatggaaccctacagtaggtgggtctttgtgctgggcttcttccacctgcagaaactgcgagggttttcatgtggccatgagtgcgctgaggctcttagatggcatctccacccgaactccccgttgttaatgtgtcggctcagcacatttcttgactggatgctgtgaatcacgtaagaagtgacacgtagttggggagatgaggtgtgcatatttgtacctacacaaggaggttttctggagaaggtgaaactcgattccagccaggtgattcagtagaatgtgcatatagaaagtagacgcagagccaggtgtggtggttcacacctgtaatccccgcactttgggagaccgaggtgggcggataacaagaggaaagcggacgcagaggcatcgagaccacagagaacaggtgggactgtggggtttctacaccttcctttcgatgcgtggtgctgtggtgctgtggccgtgtggaagtgccctaacttttgggatgtttccctttatgactatcagctcatctcgagggaggttctggcgctgtgtgaatattctgtcctcaacgtttgactggatggtgtcagcatccatgtctcgtggggtccatggggctccaggatgatatcttcagattctgttcctctgtgtgtattagctgtttcctttataacgaagagctttgtgcagatcaggtagaaatgaactctattccttaaaaagcaagatacgagagggataatacgctttttttttttttaagcaagataaatgctttttccctttaaattatttttaattttcaaggtagggcatggcaaaatgggtttattcctttcatttttcctctctttttaaagtattactatggattagaggatttttgtttaacttttttgtttctgtttttgagaaggtctctcactccatcacccaggctggagtgcagtggcatgatcttgcctcactgcagccttgtactcttgggctcaagcaatcctcctgcctcagtgtttaatgttttaacatcaaccgtagccaaatcccgcccaacacacacacgttaggtatgttaaggtacacggtaggccctcactttatgttgttgataggtccttagaaactgcaattttaagtgaaatgactaagtaagatgatgtataatgaaacagattttttttcttctcagaaactataatgaaactgtgttggccaggcgcagtgctgcatatctgtaatcccagcaatttgggaggctgaggctggtggattgcttgagctcaggcattcgagaccagcctgggcaacgtggcaaaaccccttctctacagagtattttttaaatttatttatttttatttgtttgtttgtttgttttgagatggagtttctctcctgttgcccggctggagtccagtggcgcatctcggctcaccgcaacctccgcctcccgggttcaagaaattctcctgcctcagcctcccaagtagctgggattacaggcacgcaccaccacgcccggctaattttgtattttttagtagagatggggtttctctgtgttggttaggctggtctcgaactcctgacctcaggtaatccatccacctcggcctcccaaagtgctgggattacaggttgaaccatggcgcccggccccagaatttttttttttttttttttaaaggaagaaagaatgttgaacaaaatgatgttatttgaggacctgctatacattacttcacttaaccatcacagtttccaggaatccattgatgttaagtgaggacttactgtaatttacatatagttaagtgcagatttttaaatgtgcagttgattgggtttttggacacatgactatgcctgtgtcacccacacccccacccaggtgcagaacgtttccatcacccgggagggtgctcttgtccccctgtgcaaccttctgctggcctgatttctgtatttctgtaactgtgtgcatgtgactttctagaacttcatattaatggaaccagacagtagactctttggtggtcaatatcttcttgagactcaaattatcccaaattgggctggccagatcccttcaagctggcacctgagtccttttgacatgccctgttggtctttgaaaacttccttgctttttggccactaagagaggccaggctcaccttgaacttccagacgtggaattagctgttcctctaaagagcctgagcctcgttgagaggttatgttgagaaaccaagcttagagctcaaggggtatcatttcatctagattccttcagtgaacagccaggaaatatatacattttaaaaagtgcaattacactaattgttccagttcatatttaccagaacataatttttcatttctttgattttgtgtgtgtgtgtgtgggtgtgtgtgtgtgtcggtctaatttcatgttactggaaaaatctaaccctactggttctcttctcgcttgagaattattcagattttcctggttgttgttacgccaaataacgctttattgcaacctggacattttacatatttgagactttgggtatttttaaaaatcctttagcgtgtcaggtttttttgtttgtttgttttagcaacaaccaacacggttaattccagtgcccaagctcttccttgcctctttgtgcaaagcttccaatgtcagctcagcctccagagcctctgctgcgttgttttgggtcacctgtgcaagtgcagctcgtagtgagcctgggacttgtgctgctggttcatgcatgaagctagggtgctcctctccaggattcccccagccccccacacacgaagctagggtgccccctctccagctctcctctccaggattcccccagccctccacacagggagctagggtacccctctccagctcgcctctccagaattcccccagccctccacacagggagctagggtgccccctcttcagctctcccagaccccccaggaccccacacaggaagctagggtgcaccctctccagctctcccagaccccccaggaccccacacaggaagctagggtgccccctctccagctctcccagacccccccaggaccccacacagggagctagggtgcccctctccagctctcccagacccccccaggaccccacacaggaagctagggtgccccctctccagctttcccaggcccccccaggaccccattcacgaagctagggtgcccctctccagctctcccagacccccccaggaccccacacaggaagctagggtgcccctctccagctctcccagacccccccaggaccccacacagggagctagggtgccccctctccagctctcccagacccccccaggaccccacacagggagctagggtgcccctctccagctctcccagacccccccaggaccccacacagggagctagggtgccccctctccagctctcccagacccctccaggaccccattcacgaagctagggtgcccctctccagctctcccagagccccccaggaccccacacacacactctggctcccccaggggctctctttccgtttctctgactaggaaaatgtgatttctctcagtttttgccatctacaccctcaggttaaacccatgagagaatggaggaagatgaactgggaacctccccagatcagtgttgactgctgtattctgacagctcttgtctattctcagaggctgcaggttgcttttcaaaattgcgtccagaggccaggcatagtggctcacacctgcagttccagcgatttgggaggatcacttgagtccaggagtttgagaccagcctgggcctcatagtgagacctcctttctacaaaaaaaaaaaaaaaaaaaaaaagccatccgtggtggtgtgttccttgtcccagctactcaggaggctgaggctggaggaccacttgagcccaggagttggaggctgcagtgagctgtgatcacactgctgcactccagcctgggcaacagactaagaccctgtctgtaaaaaataaataaataacataaaaattacatccagagtttttagttgtaatcattgagagaggtggactgtggcgtggtgggtgtaccccgtcgctaggggcaccagaagtctaggactccgaatagcgtgtgctttgtgtgtgtaccacagacattaccacttacgcccagtgacgagatcatcgtcgtattctcgccaggtaaatcgggtccttcctcgctccaacatggtctacaatctctatgagtattcagtgccagaggacatgtaccaggaacacatcaacgagatcaacgctgagctgtcagcgccagacatcgagggcgtatatgagactcaggtgactccccagccaccctcgactgaactgggggaggctccagcagggtggtatggaggaaagaaacccgcccagggtgtgggctggggaacagcagcgacagtggactcgttcccacaggtgaggtgaatgtcagcagtgtgtctgccaaaagtggcctttgggcagtgggccgggcagctgcaggggcacagccacatcccgggcagaagtcacgtgggcagccagagcccccaccatccagcccttgccggcctgtctgcccgattcttccaggttccgttactgttccgggccctggtgcacctgggctgtgtgtgtgtggtcaataaacagctggtgaggcacctttcaggctgggaagcagagacctttgctcttgagcacctggagatgcgctctctggcccagttcagctacctggaaccaggtatggcctgcaccagccgcccatcatgtgcctgcctcccacacatctggggtgacggtcttgtttccttctccagggagtatccgccatatctacctgtaccaccacgcacaggcccacaaagcgctcttcgggatcttcatcccctcacagcgcagggcatccgtctttgtgctggacactgtgagtcctgggccctccatggcagcacattggctggggcagggtttggggaaggaggacatctcccagggtgcccaggccctccaggtcttgtcctcaagggcctttgcccatgagtgcttgtcgtgattgaattggcagtgccgtggcagtggtggagtctgccccagggctgcccccacttcctcctgcgcagggggaggctgacgtggcctgcgttggtctaggtgcgcagcaaccagatgcccagccttggcgccctgtactcagcagagcacggcctcctcctggagaaggtgggccctgagctcctgccaccccccaaacacaccttcgaagttcgggcagaaactgacctgaagaccatctgcagagccatccagcgattcctgctcgcctacaaggtgagagtggttggggtcttgctgtgtgagccccatcttctttgaggctgggtccacccaggtcttttcttccattttgccttgacccaggaggagcgccgggggcccacactcatcgctgttcagtccagctgggagctgaagaggctggccagtgaaattcctgtcttggaggaattcccactggtgcctatctgtgtggctgacaagatcaactatggggtcctggactggcagcgccatggagcccggcgcatgatccgtcactacctcaacctggacacctgcctgtcgcaggccttcgagatgagcaggtgagcacagtactgtcgttgtgggccagtggtccccaggcagagccggcctcggtggtctctgtgacccggcgatgtgccccggtgctgacctgtgccctggtgcaggtactttcacattcccattgggaacctaccagaggacatctccacattcggctccgacctcttctttgcccgccacctccagcgccacaaccacctgctctggctgtcccctacagcccgccctgacctgggtggaaaggaggctgatgacaactgtcttgtcatggagttcgatgaccaagccactgttgagatcaacagttcaggctgttactccacaggtaagtgggcgggaggacgaggcccatgagacctggctggtgtttctgccattctgtgacatcttctcaaggcaatagtgccgaggatgggctcagagttcgaccgcgcaggtcagagctgaggctgcaggagacggtcctggggtcaaggtccaggtggggcctcctgtgccctcgggaatctgaatagcctggcaggtgtgaggatgggtgtgggcaggtctgttgctggttctggaggtggtggtggctggagtcaggcccagggggctggtggtgctggagctggcaggatgctggctgagcatggcgtcttcctgtgcagtgtgtgtggagctggaccttcagaacctggccgtcaacaccattctccagtctcaccatgtcaacgacatggagggggccgacagcatggggatcagcttcgacgtgatccagcaggcctccctggaggacatgatcacgggtggtcaggctgccagtgccccggccagctacgatgagacagccctgtgctctaacaccttcaggtgccaccctctctgggaaggagtgttactaatagaagggtcttatcctttgcccttaatttggaaagctaaggtctaagacagggtccattgggcttcccttagtcttaatggcagagccagagaccactgtgtggcgagttttccatagtctattgtctttaccactgtgggggtccggcctggtccctggcgactgttcagtgtgctgcctctgacctccctgtggccagaggtacttcacacagagtctttctaaccagggccacttttcgatgtgaccaaaggtacatcacagggatctccagccagctctactgagtatgatgtgtgaggcatcagcacttaggtgtcaggagccgtcggtctgctgcagagggcgtggttgagggtcaggagccatcagtctgcggagagcatggttgagggcagctactcgcattacccaccagcggtggttcatgctgggcaatgcttgctgtgtaccaggaggtgggccgagcacttcgcattctgcctctgtccccacatcagcccagggacggggagcggttattgtctgtttttcagataaggaaactgaggtcagaggggctgcctttgtggtcataccacaaatgaatggaagggtaggtgctcaaaaacaagtctttgtaattccagagcctgtactcagctgtagttttaatgactccatacaaaaggggagagggagcatgccagagctgggaaatgaggcagggagaggactggtggaaagaggcagggaggcagttgggagccgggagcagggtcttggcagagagacagtagcccaggcctgaaaggtagaaggagtccaacagcagatacccaaactgccgctctggagaatgtggggtttgccaaattattgaagagtttgtgatgaaagggagttttaggaatgggacttggacctctgtaggttctcttgtaacattctgttcttgaccccattgaagttcccgcttcttcagtagggtgatgtgcagttttggaatcctttagctgaattggggttccagtaccagagcagctggcatctctgccccatgggaagtgaagggggccagacagggcgtgtacagtgcactggccaatgcctagctgtctggcctgtgaccagggccccccggaacgggaaacttgtttacactggcacacgcccttgtggcttttgtgtgacctgtgtctaggtaccacctgcctgaccattgcttcggtgtaggggcccagccttgtgttccccctagtgtcgtagggaagacccagcccagggcagcccctgcctcttcagagggaaggcacaaaatcagtcaccaccacaatagggaacaagtgcaaagatgtgttccttacagctcctgggcagggagggtgccgtgagtagggaggccatcctccatccctgggtcctgcaaggcaggactgaagagtcagacagggagggtgcccagggcagctaggcgtgtgagggaatggggtgtaggcatgtgttagttcacgggcgagcgcctgaatggtccatttaaaggaagtggcgggaaggcagggcccagcctgctaggcgggagagaggcctctaagttcttgtttctgaccagctggggccatgtgggtatggtgatgttttgttttgttttgttttgttttgttttgttttgttttgtttttgttttttgagacagtctcactctgtcacccaggctggaatgcagtggcaccatcttgggtcactgcaacctccacctcccgggttcaagcgattctcctgccttagcctcccgagtagcaggattacaggcatgcactagcccagctaatttttgtatttttaatagagacggggtttcaccatgttggccaggttggtctcaaactcttgacctcaggtgatccacctgcctcggcctcccaaagtggtgggattacaggcgtgagcctctgcatccggcctagtgtggtgttctgatgtctaggcagtggctttgctgtgtccttcctgtcagggtccccggcccgtcacacacttgctgctttgtactgtgctgccctcccgtcctgctttagaacacacagagtttgggatgcggtgaagcctgaacaagtttaaggaatgaaatgggaagaaacagatgaggcatgagggtgaagggatgaaatttggaccgtgacttaaggtggggacagtgagaaggggaggcgacagtgacggatttggacccagccgtgtagggaaaacctgtgcccatttcagttggagcgtcccgcgtggcagcagcgtgggaggctgagggtacgagggtgtcgtgcaccttctctttcaggatcctgaagagcatggtcgtgggctgggtgaaggagatcacccagtaccacaacatctatgcagacaaccaggtgatgcacttctaccgctggcttcggtcgccatcctctctgcttcatgaccctgccctgcaccgcacactccacaacatgatgaagaagctcttcctgcagtgagtgctcctcctccctgggctgtccaccgcgtcctcagctgggctggtcccttactccccagaaccagagacatggccagccagtgcctctgggataagtagtgtatttctgagtttgtggagcataacaatccaaaggatcccagagaaacacgcagctgctgctgcagcgtcgcctgcacatcctgcagagaacactaggtggcacctcctctcctgcccctttcctgcacaaagtcatgctacacattgtattgctgtgtgccttgttgttttagtgaaaatatgcctgtgtcaggagatctgtgtgaggacatgccatatgaaagaacatttagcctctctccagccttgtgccgttgttacaaatagcaaatcagtgagaggcttcatgcatgagctcatgcagatagatccgtggggtaattgctggggcgtagccctcttgcaggcctcagaggtgttgtaactcgggatgaatcctgatttgatggacttcaccagagcggccccacagaggccccttgtggacacttcttccctggccgcgcctcaccaacatggccggggattattacccaactgctgggataaaagtgcttcttggtgcagtcttaacttaggattcttacaatgaatgaagtcgaattttctcttctagtcctttgtctatttttctgtagttttggtggttcttctcttattaaatatcgaatgagttgtctccatacaaaaagttgccatttttctgtgataagaatttgctaattttttcctgtttttggttatcttttgcctttgtttgtggtggatttttgccatgcagaaatctttgctcttcattagcttctgggttctagtgtatctcggaggcttttctgcttcaggaccctcagctcttttccctcttggattttctgggtgccctctggctctccatgactgtggcgtctccaccacggactctcaacttgctccacaggctcatcgctgagttcaagcgcctggggtcatcagtcatctacgccaacttcaaccgcatcatcctctgtacaaagaagcgccgtgtggaagatgccatcgcttacgtggagtacatcaccagcaggtgcggctggctggtcctggtgacgcagcactgtggctttgagagggatgctaaaatgaccccctgaggtgccagctctcctcctgggtgggctgggaggtcgttagaagtgcaggactcaccatggtgaatctgagcagcgtgaaaagggggttaccgccacctgtgcgcggtagcagatcggaggccactcagctgtgcagcttgagttgggcaagttcaggaagtggcctgcctttgctaagaaggttccacagtgatttttgtttgtttgctttttttccccatggatattcagggcacagattcaaggtgccctgaatatatgcaccccgtaagtgttgacgttgtaagccttttcatagacgtcagtgttggcgagtggagtggtgtggttcccgggtgctcaggtgtgcacagctctcagctgtcagagcctggtgtggttttgacttcctgccttccaggccatgttcctgaggttccctcctaggccttgctgtgcttctcacacactcagcactatttaaatctaaatagaagacaaagcaacagaaaaatctccaccagcaacttttgttcaactgatagtaggaagctccctcctaggtgcgctcaccctggggatgaatgcagccctttctgagcacagaggggagttgcttgtggaggcacagagagtctgcatgggtctgatctttgcatggttacaggggtagcatctgggggcgctgcagaaaaggctgacactaaattgataataggccttatcactgagaagtaggaaggtagagcttataagactttcattcctaatcaaaccatatgcactggattaatttgaaacacaaaagcactgttgtcctcctgcagacccactgtggccccttatgtctatccaagatgagccttgatggtcagtggtcacgctgtgtgcctgggaaagctggcttgggctagaattgtatttcggagcatggctgagataatgggaaggatgtgcctctccccacgttggccatgggcagctccaggggtgccctgtacctgaggaggccggggttgctcatgtcgagaaacaggctgctattcttccttagcgcgaagagcagagttagggagaacataaagttctcctgcaggagctgcgatgtgggctactcagctgcattttgaaactgtgatttaggatgttcctccttccttcctctctttctttgtttattcttccattttttggggttttgtttgttttttaggagatggggtcttgctctgtcacccaggctggagtgcagtggtgcagtcatggctcactgcggcctcaaactctgggctcaagctatctgcccacctcagcccactgagtagatgggactagaggtgcatgccagcatgcccagccaatttttgtattttttgtagagacagggttttgccacgttgcctggggtggtcttgaactcctgaactcaggcgatcctcctgcctcagcctcccaaagtgctaggattacaggcgtgagccaccgtgcctggcctgttctttttttttttttttttttttttttttccttaaatggatctaatgtgcagaggattgggtcagcgctagggaggcttaaccgaggagtgacaaggatgacgatagcttaaaagagcttggcagtgggaagcactgtggttggttaccagcaggtgcaggtcacctaaggccgcagagcagaggcagaacaccctgtgggccatccccagcacgaggaggcacccagctctctttgtggcgccagctcccaggggcctggtgggcctccttagttttacgtttaccacatttccccaggaagcctgagggatgatgtggtctgaatgaactttcaaattcagtgttaagtaagtggagggtacagatagatacaaggggaaataaaggaaagttgagaacaaggtcgatttcactgaagcagcgtcttcaatgcttcctctgcagcatccattcaaaggagaccttccattctctgacaatttctttctctcgatgctgggaatttcttctctggatggatccatctaactatggcggaatcaaaggaaaagtttcatctcgtattcactgtggactggtaagcgagctgcagtgtggcacccgagccagctttgggggtcgcgttcattcctgcagcaagtgctgagtgctcagggccccggcgggcctggccgtgagcagcagacactgcacccgcatcctgccctcatgaacacggggagggaccatgcgcagacaagcacgtcagtgtggagtgtggcgtcagccctggtgatggcaaggcttgccgtgggcaacagggaggtggaggcccatgaggtggtgacagggaatccgagagctgatgaagtgcaccatagttgtgcgagcataaggcgcctccagcggatggacaccagggaggcaaagcacaagtcagtggagcagtggttgcagatgcaggcagagagctgacagagccaggcaacttgggcatggcagggcagggcctcggctttcgtggggatgggagcttctgtgtgggtgatgttggagctttcttggccccatgtggataacccaccattggagggcacaggcaggtaaagccggttagtgcctgtgtcagggagatgctgggcagcgaggttggtgagaagggcctgggtgggctttgaagtggagccaaggggccagcggatcggatgtgtgtaaatgcccaggtgcgggccaggctgtgggtgagtggaggtggctgtcgggagcagtctggggaaggggtcacgtctggctggggctcatggtgtttgcaaggttgagacgtgggtggtcagctggtgcaggagtggccagagagtggctgggtgggttgagaggaggcctgtgtcctccacaggggccctcatagtggactgagaggaagctgtgggtaccagagccaggggctcagatgtcagagggaaagccctttgtaaggacgcagacgcttctgggagctggcaggatgaagccaagactgcccaggacacctggatgggagcgattctggttggagttgggggataaaccctgattgaagggattcagaacaaagtgggagggtagaaactcaggcagtgtagaccgctctgaggaggggatcagcgtgtggtcagggcaggtggcagtgggtgtcggtgtctacacagacgtggatggtgccgtggcacgaacacaggctgcgcgggaggctgggtctgtgatggggtcgtgccgtcccaggagattcatggactcagaggagagaacagtcaccgggaagctctggctggttctttcgtccttggggggtgggagttcaacaattaaagtgaactctggaagagcagagtgaagctcacagtcccaggtcacgagcacttctgtgtgccaggcgcttcccacaaagcactttgtactgggagccaccctgggggattcacgcaggctccaggggatgccttgactgcgaggaaggcctctggtcaaacggggcagatggacccaggttggaggagccttcgctgtggcatcctacccctctaccaggccgcgatggtgcaaacacagccgcgttgtctcatgtgttacagcaagactcccagaaagcagggggagcagaggatgagcaggaaaatgaggacgatgaggaggaaagagatggggaggaggaggaagaggcggaggaatccaacgtggaggatttactggaaaacaactggaacattttgcagtttttgccacaggcagcctcctgccagaactacttcctcatgattgtttcaggtaagcccagagcccagggctgcgcagcccccactgaagggactcatggttagtagatgtggctcctgtgccatggtatcgcaagaagggagacagggaaaatcagatcgggcggagcctgcccagcagttgggactttgtgagccgaggggcctcctctccaggctccaggcatgttccactggagggcccggagaggggtgactgtcttccctccagcctttgctctcaggaaactccatggggagcggctgcccctggccgtgtcattgaggagtttcctagctctgctcccgccatctgattcggtaactcagtcacatacattcccagggaacatttgtgtgtgtgcacgttcagtagctgaagataaagccctgggtcaggtcagctgccccctggctggtctgtgaggcctaactttctggtgggggagttcctatgccttggtttgggtctgcaggcttagagtttgcaaatcaagctatgcaggttagtgtgcagatgaagtgtatcgaggaagcactgtttgtagttgacagccctaagttaaagaatgccctaagtaaaaacagcaggttgtgatgtgcacacacaggtggatgcggtcacagaggccttcgttgatgatcattttatatttttgtctacttgtccttgagtctttaactttctcagttctctcttgcaactttctatgtctcttttgaaaagttccgggttggccgggcgcagtggctcatgcctgtaatcccagcactttagggggctgaggcgggtggatcacgtgaggtcaagagtttgagaccagcctggccaacatggtgaaaccccatctctactaaaaatacaaaaagtagccaggtgtggtgcgcacacctttaataccagctactcaggaagctgaggcaggagaatcacttgaacccaggaggcggaggttgcagtgagctgagattgcgccattgcactacagtctgggcaacaagaatgaaactgtgtctcaaaaaaaaaaaaaaaaaagggtaagtgccaggtgacaggcccggagtagtttttggagaagcttgctgatgccaggggccctgcctttgcttgtgttgggagctgtctttcacgcgctacccagtgagaggcttagtgtacatggccccatttatacagttttctctctgacaatgaactcaggtgtcagcgagtgttccttctcatttccacttctcacttctctaatttacttttagctcatctaaaggctgcagataaaattattaacaatgacattttagcctcatctgtgaggcaatctgaccagccatgggtcccctcagattctagggtgtttgcagcagcccgactcagggcctgtggtgtgtgtgcctctccacagcgtacatcgtggccgtgtaccactgcatgaaggacgggctgaggcgcagtgctccagggagcacccccgtgaggaggaggggggccagccagctctcccaggaggccgagggggcggtcggagcccttcccggtgagcagtcttttgtcttttgaggccactgccatgtgccagtgacctaactcctctgtgtgccatgggtggtccccggtgccagtcccccaggtgggaggtccccagtgccagacaggtcccagacccctccctcagcatccttatacttccaggaatgatcaccttctctcaggattatgtcgcaaatgagctcactcagagcttcttcaccatcactcagaagattcagaagaaagtcacaggctctcggaactccactgagctctcagagatgtttcctgtcctccccggttcccacttgctgctcaataaccctgccctggagttcatcaaatacgtgtgcaaggtgagagtgccagcgtgcgtgtgaggagaggacactaacgtacatgtgtaaggcgagaatgttactgtgtgcaaggtgaggctgtaatgcgtgcaccatgaacgtgctagcgtatgtgtgcaagataaggacaccgacatacctgtgcatggtaaggatgttaatgaatgcaggatgaggctttcagctgtgcaagggggaggtacctacatgtgtagggtcagggtgccagcgtgtgcaaggtgaggagcaggtgtaagttacttgttcattccaccaacatttatcatgtccctgtcacatgcagccacagttgcggcatctgtgctcaggtgtgagcaagacaggaaaggtcctgccttgtggggcctgtctgctgccagccgacccgagaagggagagggccgttcagaggcgcaggtgctgtggggatggagcctgtgaggggcgctgggaccaggtgcaggaggagggaagacgcaaaggccctggggggtgagcttggtgtgttggtgaaggcacagccgaacacccagtgccaccggctgggaggatgggtcaccggagaccagtaggctggaccaggacccagagctgatgagatgagagcttgctcggatgctgaggcctttctgggaaaggcaggctgagtccaaggagggataatattaccagataacgaccgcgggtgtcagcccttacagagcagagtgcttcactgtccatttcctcactcagccttcccagcaaactgcatctcacacacggctaaggttacgctggagatcaggtgacagcctcaaggtctggttgtggtgaagaagtgtttttagctcaccattttaattcctttattgacttttacatattttaaattcatttttattaaggtgtaatttatatacagtaaaatgtactctgtggcgtgcagttctgtgatttttcctaggtgaatggaattgcatcatcatcagcaggatacaggatagtcaccgcccgaaaacattccccgcactgccctcctcacctgacaccctttagccactggtgtgtcttccgtccctgcattttttttctcttctagagcgtcacataagtagagacattgtgcagccttttggatgtggcttcttagcaaaacacacctggaattggttcatccacgcgctcgtgtgtatcagaactccctttctgttgcgagcagtgtccattgtgtgggcaaaccacagcttgcttttcattcactggtggaaggacatttgcgttgctttcactttggggtgattaataacaaagctgctgtaaacattctgtaggtgtaggtttttgtgtgaacataaatttcaattctctgaggtcattttttaagtgtttgtttaacttgataagaaactgccaaactcttttctgaagtggctgcaccgtgtcagggtctcctcagcagtgtgtggcaagagttgctgttccacatcctcaccaggacttggtatcattgggtttttaaattgcagctattccagtaggtgtgtagtggtatcgcattgtgtttctgatttgcatttccctggcgactaatgatgtggagcttttttttggagatggagattcactctcattgcccaggctggggtgcagtggcgcgatctcagctcactgcaacctctgcctcctggttagctgggattacaggtgcctgccaccacgcccccccaattttttgtatttttagtggagacggagtttcaccatgttggccaggctggtctcgaactcctgacctcaagtgatccacctgcttcggcctcccaaagtgctgggattacaggcgtgagccaccacgcctggctgtggggcattttttaatgggcttctttgctgtcctggtgtctgtcctctttggtgaagttttaggttttatccatttgagttaatttttatacaatgtgcatgctgtagatccaagtccatatttctgcatgggatatctgattgcaggcatatcctgtcttattgtgcttcgaagcggttacctgtatttttataaatggaaggtttgtgggaatcttgtcttgagcaagtctcatctttccaacagcatgtgctcactgtgtctgtgtcacatgttggtaactctcaggatatttcagacttttccactattattatatcagccgtgataacctttgatgcttctatggcaattgttttggggcgccatgaaccgtgcgcatagaagacaatgagcttcatcaatgttgtgtgtgtcctgattgctccactcacgggccattctgccatctcgccctttctccttgggcctccccagtcccggtgacacaacactatagaaattaggtaagttaatagccctgcaatggcctctacgtgttcaagtgaaaggaagagtcacacgtctctcactttacataaagagctagaaatggctaaacttaggaaggcatgttgaaagtcgagacaggctgaaagctaggcctctcacaccagttagccaagtcaactgcaaaggaaaggttcttgaaggaaattacaagtgctcctccagtgaacacatgaaagataaagaagtgaagcatcctgttgctgatatggagaaagttgagtctggatagatcaaaccagatataacatcccctcaagccagagcctaatccagagcaaggctctcactctgttcagttccatgaaggctgagagctgaggaggctgtagaaggaaagcttgaagctggcggaggttggttcatggggtttagggagagaagccgtcccagtaacataaaagggcaaatgaggcaacaggtgcgggtggagaggctgcagcgagttctccagaagatctgtctgggatcattggcgaaggtggctacactgacaacatattttccgtgtagacaaaacagccttcttttggaagaagatgccatctaggactttcatagctagagaggaggcctcagagcctggcttcagaggaaaggctgactcttgttagcggcagatgcagctggtgactttaagtcgaagccactgctcattcagtcttttaaggccactacctgcagctcagaaaaagattccttccaaaatagtactgctcattgacagtggacctggtcacccaagagctctgatggagacgtacaaggagatgaatgttgctttcatgcctgcggacacagcatcccttctgcagcccatggatcaaggagcaatttcgactttcaacgtttattatttaaaaatatatttcatgaggctatagctgccatagatagtgattcccctgatggaactgggcacagtaaattgaaaaccttctagaaaggattcaccattctggatgccattaagaacatttgtgactcatgggagaaggggtcaaaatatcaacattaacaggagtgtggaagaagttgattctgaccctcatggatgactttgagggattcaagactattgtgggaggcgtgactgcagatgtggtggaaacagcaagggaactagaattagaagtggagcctgaagatgtgaccaagttgctgcaatctcaggacaaaatttaacagataaagagtggcttttcatggatgagcagtaaagtagttttttgttttgttttgttttgttttgttttgttttgttttgttttgagatggagcctccttgctctgtcgcccaggctggaatacagtggtgcggtcttggctcgctgcaacctccgcctcctgggttcaagtgattttcctacatcagcctcccaagtagctgggattacaggtgcccgccacaatgctcagctaatttttgtatttttaatagagacagagtttcaccatattggtcaggctggtctcaaactcctgacctcaggtgatccacccgccttggcctcccaaagtgctgggattacaggcacaagccaccacgcccagcccaaaaaagtagttttttttttaagatggagtctcgcactctcgcccaggctggagtgcagtggcgcgatcttggctcactgcaagctccctcccaggttcacgccattctcctgcctcagcctcccgagtagctgggactacaggcaagcgccaccacacctggctaattttcgtatttttagtagagacagggtttcaccatgttagccaggatggtctcgatctcctgaccttgtgatctgcccacctcggcctcccaaagtgctgggattacaggcgtgagccaccgcacctggccaaaaagtagtttcttgagatgaaagtgaacattgtggaaatgacaaaggattgagaatattccataaacttagttgccaaagcagcagcagaatttgagaggaccgactccaattttgaaagaagttctactgtgggtgaaatgttatcaaacagcatcacatgctacagagtctttcatggaaggaagagtcagttgatgcagcaaacttcattgttgtcttgttttaagaaattgccacagccaccccaactctcagcaataccaccctgatcagtcagcagccgtttacattgaggcaagaccctccaccagcaaaacgattgcgactcactgaaggctcagatgatcgttaatatttctgagcaataaaacattttaaaattaaggtacatacattgttttttagacataatgctgttatgcacttaatagactacagtatagggtaaacctaagttttgtctgggtagagtgactcacacctgtaatcccagcactttgggaggtcagggtgggttgactgtttgagcccagcagttcaagaccagcctgggcaacatggcaaaacccatctttacaacgattacaaacattacctgggcatggtggcgcatgcctgtcgtcccagctactgggaaggctgaggtagaaggatcaattgagccccaagaggtcaatgctgcagtgagccatgattgtgccactgcagtccattctgggtgacagagtgaaatcctgtcccaaaataaaaaaaatcacatagctttttttttttttgagatggagtctcactctgtcactcaggctggagtgcagtggtgcaatcttggctaactgcaacctccacctcctgggttcaagcgattccctgcttcagcctcccaggtagctgggatcacaggtgcacccgccaccatgcccagccaatttttgtatttttaatagaaatggggtttcactgtgttggccaggatggtcttgaactcctgacctcaggccatccacctgccttggcctaccaaagtgctgggattacaggcgtgagccaccacaaatcacgtaacttttatatgtactgagaaaacaagcgtgagccaaaaatcatgtaacttttatatgcactgagaaaccaaataatttgtgtgatttgctttattgtgatgttagtccattgaggtggtttgaaaccgaacttgccatatctccaagatacgcttgtattcaagaaccatttgttgaaaagactattctttttctatcgaatcatctttgtacctttttccataacttagtaaccttatctatgtgagtctctttctggattatgtattctttttttcgatcttgcattcaatttgctaatatctcgttgcgcatttttgtgtctgtgctcaggctgttattggtctgtagtttcttagtacggtctttggttctagtatcaggggatgctggcctcatagaatgggttgagtgctctctctcttcagtgttttgaaagatactgtgtagaatcagcagcatttcttccttaaatgtttagtaaattccccagggaagcctgtcctcaccgatggaaaactgctaatgtagagaagtcagctgaggcgtctaaagggactaaggaagggaggaaaggacaccaggaaactgtagcctaaggtccagagggttctggtccagacagagcagcagggaggccccgggagctccttcccgatgtgggctgtggtctctgcaggtgctgtccctggacaccaacatcacaaaccaggtgaataagctgaaccgagacctgcttcgcctggtggatgtcggcgagttctccgaggaggcccagttccgagacccctgccgctcctacgtgcttcctgaggtcatctgccgcagctgtaacttctgccgcgacctggacctgtgtaaagactcttccttctcagaggtgcggctgagctccagcgggcccttcactgtggagcagaacatccgagggcactgcggtgtcttgagggcttctgcagctccagctctgtgggtcacacctgctgcccctctgactcacatggattggcaacaggccccttcccaggcctccccacaccatgttcggaatgttgtcctaggaagggctcaagtgcaggtgggaggccagagtgcgtgcagctgcactcaggagactcgcccgtcaccaggcgcttctcacagccccttcctctcctgagatcctgcccatggcactgtggtctggaggctgggctggtgacctctcgcactcttgctctgcctaggatggggcggtcctgcctcagtggctctgctccaactgtcaggcgccctacgactcctctgccatcgagatgacgctggtggaagttctacagaagaagctgatggccttcaccctgcaggacctggtgagtcgtgcatgccgcctgcccgtgtgccctggagtccacaggggggtttctgtgcactcccgggagccggggtgtgtgcaggtcctgaggcacgccctggtgtcttccaaggggcctgccctgcagaccagtccatgccctgagcctgatggactgttctgtccacactggttgagcacctgccttgggtcaagagctggccttgtgggtgcttcgttctagcggaaggaggcagacactcccaagtgtgaagagaaggaaaggaggaagagggagttgcacagctcggccacaggaaggtcttgccgaggggcatctgagcagaggctgggggacgcgccaagctgccgtgtggtggtgcacggcgttcaggcctgcaggatggagggagtgagcagggcctggaggaggcctcaggactgggcatctggggtggaacatccacagcgagggtgggtgtagggaaggcgctggcaccgtgggatgaggtcgtgcattttactcataaccgagggctggctgcacacagcaggggctcgaggcttactgatgggcccacgaatgtgtctcgcgagcctgtgaagaagcagcaggcaggtctggccagcgcgggagggctggcgcccatcggggctgctccctttcaggtctgcctgaagtgccgcggggtgaaggagaccagcatgcctgtgtactgcagctgcgcgggagacttcgccctcaccatccacacccaggtgggctctccctcatctgcctcggctcagcctggcctccttggcctcctctctgagtggactggggtctcactgtgcctgtttattcctgcaggtcttcatggaacagatcggaatattccggaacattgcccagcactacggcatgtcgtacctcctggagaccctggagtggctgctgcagaagaacccacagctgggccattagccagccc

SEQ ID NO: 15740 - DNA, 63085 bp, Homo sapiens
cccctgaagcagaggtggtagccaacggctccatgtctctgaggagcggcgggcggcggcgcgcggacccaggcgcggatggcgaggccagcaggtgaggggcgccctcctgaggctctcgggccggccctccggagggtgccatggggccgtcctcggctggcgccgccgaggcgggagggaggcccggttcccgcagccgcccgcactcgccgcgcctgactggggtagggcggcgcgccccgaccgccgacggaggggctcggggcgggcggaggcgctacgggcgcggcttctttgcggggaaacgaggcgggccgcgcggcctttccctgctcggctctttctgaggtttttcgggcctcgccttccgcgcagctgcgtttgggacctgccgcgcggcgggggcgatgagagcggcgggacccgggccaggccctgcggggtggacgcgcggctggggagggtgcggggaggggcggggccggggaccctgcctgggggcctagcgctgggggaggccgaggcgggcggatcgctggagcccaggatcctgttctagatcagcctgggctacagagagagacctcgtctcctctgttttatttttttgggcagggagtcccgctctgtcgcccaggctggagtgcagtggcgcgatctcggctcactgcaacctctgcttcccgggttcaagcgatcccgctgcctcagcctcccgagtagctggaattacaggcgcccgccaccaggcccggctagtttttgtatttttagtagagaccgggtttcaccatgttggccaggctggtctcgaactcctgacctcaggtgatccgcccgcctcggccttccaaagtgctgggattacagacgtgagactccgcgcccggcccttctcttgtaaaaacaagaaaaattagacaggctggtggtgcgcgcccgaggtcccagctattaatactcccgaatccgagccggaggttcacctgagcccggcaggtcaaggctgctgtgagccgggatcgcgccaccgcactccagcctgggcgacggagccagacccagtctcaaaaaaaatagagcaaggataagacgcggctgcttggtggccagagcaaacggtaaacatgaccggaggactggcctgccataagcagaaaacggatgaggcccggcgcggtggctcacacctgtaatcccagcactttgggaggccgaggcaggaggatcacctgaggtcaggagttcgagaccagcctgaccaacatggagaaatcccgtctccactaaaaaaatacaaaattagcggggcgtggtggcgcatgcctgtaatcccagctacgcaggaggctgaggcaggagaatcacttgaacgcggcaggcggaggttgcggtgaaccgagatcgcgccattgcactccaggctgggcaacaaagaatgaaactctgtctcaaaaaaaaaaaaatagaaaaaacgtgtgagaacgtgaagctttttacagacacttagctgaacaaaattcttcccagaggagaaaccaagtggtaaggatccctaactgctgttgtgctcatcgctgtctgtccatatcaggcaagccctagagaggcaggtacccttagggtctacatggtgtgttggaacttggagcttagagacggttactgactgccctgcttcaggacacaggactgcactcacgtgctccactccactgccctgccccaagctcagtgatggcctccaggcagggggaaggctgctgctgggataagtacaagtgatggcttttaccttacatgctttatgtgggttacctcatctcatccttaaaacagtcctgggaggtgagtgtgccccaggaggcagtgggtgctgtttgcctgcgtttcttcttgtgtgaaatggggacaccagtggcctccctcgtaggggttgtcatgaaaactgaatgagagcatatgtggagtactgggacggtgtgatacagtaaccagtcaatggtagctctctgtgaatgagagcctgtgtggagtactgggacagtgtgatacagtaaccagtcaatggtagctctctgtgaatgagagcctgtgtgtagtactgggacggtgtgatacagtaaccagtcaatggtagctctgtgaatgaaagcctgtgtggagtactgggacggtgtgatatagtaaccagtcaatggtagctctctgtgaatgagagcctgtgtggagtactgggacggtgtgatatagtaaccagtcaatggtagctctgtgaatgagagcctgtggagtactgggattgtgtgatacagtaaccagtcaatggtagctctctgtgaatgagagcctgtgtggagtactgggacggtgtgatacagtaaccagtcaatggtagctctctgtgaatgagagcctgtgtggagtactgggacggtgtgatatagtaaccagtcaatggtagctctctgtgaatgagagcctgtgtggagtactgggacggtgtgatatagtaaccagtcaatggtagctctgtgaatgagagcctgtgtggagtactgggacggtgtgatacagtaaccagtcaatggtagctctctgtgaatgagagcctgtgtggagtactgggacggtgtgatacagtaaccagtcaatggtagctctctgtgaatgagagcctgtgtggagtactgggacggtgtgatacagtaaccagtcaatggtagctctctgtgaatgagagcctgtgtggagtactgggacggtgtgatacagtaaccagtcaatggtagctctctgtgaatgagagcctgtgtggagtactgggacggtgtgatatagtaaccagtcaatggtagctctgtgaatgagagcctgtgtggagtactgggacggtgtgatatagtaaccagtcaatggtagctctgtgaatgagagcctgtgtggagtactgggacggtgtgatacagtaaccagtcaatggtagctctctgtgaatgagagcctgtgtggagtactgggacggtgtgatatagtaaccagtcaatggtagctctgtgaatgagagcctgtgtggagtactgggacggtgtgatacagtaaccagtcaatggtagctctctgtgaatgagagcctgtgtggagtactgggacggtgtgatacagtaaccagtcaatggtagctctctgtgaatgagagcctgtgtggagtactgggacggtgtgatacagtaaccagtcagtggtagctctctgtgaatgagagcctgtgtggagtactgggacggtgtgatacagtaaccagtcaatggtagctctctgtgaatgagagcctgtgtggagtactgggacggtgtgatatagtaaccagtcaatggtagctctctgtgaatgagagcctgtgtggagtactgggacggtgtgatatagtaaccagtcgatggtagctccctgtgtgacacttatccccatttttcagatttcttactgtccctggattaaaagtgagatacacagctcagagaaagcagttttgggaggaaatatggtcccagtgagcagttttctagtctacttaatccaacttacttgaggcaaggatatttggaggactggcatagagggccgtgcgcccctgttaagaggtgatgcctcgtaaatagcacttcattcactcttgattttgataaagatctgggactcagaactgaggctgttctctagcaagatttggaatatagtttttctgtgtttttgattacgggtgcattcaactatttaaaagattaaacctttattatacagtatggtggtgtatcagtttcctattgctgcagtaacacatgatcacttagtgactatataaatttattctcttacggttttagaagtcagaagtcgtaatatgaaagtgtctggttggttatatttattgtgatggttcccgggggagaatctgtttccttgctgcttcttcatcttcagaaccaagggttgcatctcctctcccccctaccctctctctcccatccctttctccttcctgactctagctctcctgcctcactctacaaggattcttgtgattacactgcgcccacccagctaagcagaatctcaaggcccttaatttagtcagatctgcaaagacccttttgtcttgtaagataacattcacaggtttgggggattaggatgtgggtctttcatggggggtgtcatcctgcctgcctaccacaagtggttataatctttcatgagaagtaaggatcctagtcttggaatatggtcattctgctcttgagttgaaggtgatccaaggaataccttcagacaaaggaagggtcttcctttctttttttatcttgttctttttttattttattttttttttagacggagtctcgctctgtcgcccaggctggagtgcagtggcatgatcccagctcactgcaagctctgcctcctggattcacgccattctcctgcctcagcctcccgagtagctgggactacaggcgcccgccaccacgcccggctaatttttcgtatttttagtagagacggggtttcaccatgttagccaggatggtctcaaactcctggcctcaagtcatccaccctccttggcctcccaaagtgctgggattacagttgtgagccactgcgcctggccctcaacctttttttgaggtaattgtagattgattctcatgcatttgtcagaaatgatacagagattcccgtatcacttcaccataacatcttgtgtaagtagagtacaattgtcacaactaagaaattgacattgagacgacccatctaatttattttatcttattttattttatttatttttttgagacgaagtttcactcttgtcacccaggctggagtgcagtggcgcaatcttggctcactgcaacctccacctctagggttcaagtgattctcctgcctcagcctcctgagtagctgggattataggcccaccccaccacacccagctaatttatttatttatttatttatttttatttatttttttttttttgccggagtctcgctctgctgcccaggctggagtgtggtggcgcgttctcggctcactgcaagctccacctcctgggttcacgccattctcctgcctcagcctcctgagtagctgggactataggcacccaccaccacgcctggctaagtttttgtatttttagtaaagacggggtttcactgtattagcaggatggtctagatctcctcacctcgtgatccgcccgcctcggcctcccacggtgctgggatttaattttttgtatttttagtagagacagggtttcaccatgctggccaggctggtctcaaactcctgacctcaggtgatccacccgccttggcctcccaaagttttgggattacaggcgtgagccactgtgcctggcctgacaatccgtctgttttattcaaatcatgtcagtgttacatgcactctcatgagccaccgcgtctggctagttttatgcatttttagtgtcccaagaggcaacagtgtctagccatcatgactctttttgttagtattctggttataaagttgaacaggttttgaagggcctgccctaattgtgtttttccaatgagtccttttatcttaatgagcctttttccaagctcggggtttttcaggaatatatataccctgtcatatccgaaacacttaacactaggtgggatgagggttgcagaagtaggtggcagtcggatcacaaggtcaggagatcgagaccatcctggctaacacggtgaaaccccgtctctactaaaaatacaaaaaattagccaggcgtggtggctgtcgcctgtggtcccagctactcgggaggctgaggcaggagaatggcgtgaacccgggaggcggagcttgcagtgagccgagatcacaccactgcactccagcctaggcgacagagcaagactccgtctcaaaaaaaaagaaaaaaaagaaaaaaagaagcagcagcaggtggcattacaaattaagcacggggttcccttctttcactcagggatgatggcgccacttcctcagtttcggcactcaagcgcctggaacggagtcagtggacggataagatggatttgcggtttggttttgagcggctgaaggagcctggtgagaagacaggctggctcattaacatgcatcctgtaagcactaggtccttctcccacccaggaatatggctgcaacccttctggtcatagcgtggtccttatctaaagagtgggggacacatgagggaactttgagtgaatcaggtgggagatgtgaaggttcccagctctcctttcctctttaacgtcattgagggccacagagaggccactgtgagaagccggaggtgatgggcatctcttttagccatcagaataaagctttcaaggattatgagggagaaattgagagagatccccatttggaggccgttacagtgtggttcttgtgaataaggctggtagtgttaatgtaggggtggagtaaagacctagatgagagggtttgtttctaaagtgctgagtttcccgaaaggtaggaggaaagtttctctaactgtgtagaggatggtcttgtgtctgtgttgactgattctcttgtagaccgagattttagatgaagataagcgcttaggcagtgcagtggattactactttattcaagatgacggaagcagatttaaggtaagcccctgactgcgacaagctaaaacccacttttatgggtgttcatgtagctctgtgactgtcagggagggcatgggaggcttccagtgcacagcagcccatagcccagcagaactcgggcccctggaggccccatcagtcatcacgtaagatgtcctgagagaggtcagttcaggaagactctgaatggtgagaagtagcgtgtctttcagattcttgcccctgtgaaaagtgcgcattctgacttcctgtatgctaccaaggtcaaggctaccctggccctaggctgttcatgggatataggagcaagcaatgtgttttcacttttctctcgctttcttctttctcatcacccctggatgggttggtgactcttaacaggtggctttgccctataaaccgtatttctacattgcgaccagaaaggtgagtgtgtttcatagactcaggtcagacgacctgtgtgtcattctgtggtgggctttgcaactgggaaataggcaaggaaggaaatgtattttaccaatggaaagccttttcattctgatcctgattagggttgtgagcgagaagtttcatcttttctctccaagaagtttcagggcaaaattgcaaaagtggagactgtccccaaagaggatctggacttggtgagtatcacccagactttccaggggtaaatgaggccagagtctacattgttcctggcaggtgggatcggaagaggtagaaattcaggtcatctgttgggtgatggggcggtgtggtgaccgtctataaaattccttccaaagagctctagtggtgttagttggtgccacgtgcagagttggacaaggtgccttgaagtcgccaactctttgacttgtgtgtttacctttgagtgtttaccctctcacccataaagtcctatttctcttgaaccaatgagcgtgatctcttcgcattatagccaaatcacttggtgggtttgaagcgaaattacatcaggctgtccttccacactgtggaggatcttgtcaaagtgaggaaggagatctcccctgccgtgaagaagaacagggagcaggatcacgccagcgacgcgtacacagctctgctttccaggtaaactttggtcttgtgagcaaagcatcagcggttcagaacgacaagatggataggagacaggaacacgtagcaacaaagttaccttaatggctggctctgtttgatacggaaaacttgagcaattaggtagagatttctgtatgttctgtgttaaataaacagtggcttcccaggttatattttatgtgttagctctcttttccaatggaggggtgggtttatggctctaaaattgagtggttgtaatagtaaagtcaccttagaggggaaaagatccctcatcctactgccctaacacaatccatctatgaatttcattaagtgctgagatttacacagcacatctccagagaaccttgggtatcgtccacagaaatttaagcctagaacactaaacactgttcttcaagtatttgagcatcaacaataataggatgcaaagtaaccagttaggaagagaaaatcttgagtaatgaagtttagatgacttcggaagaacctaccttaccctctgacaaaagaggatcagtttgggatgctgaacatttctacagtccctacccggagtccgccttccctggcaatgccacaagttgctttttgaaatattggaaggtgtgatcagagactgagtcctcagagacttgagccatatctgagactcgtctgtctttttccccctgaatagcccgttcagtatttgagcttataggccaatagtggccgcaatggtgggccacttctttagacatggcagagacccatgcacaggctgtgtgaagcccaggcctgctcttcagcctgcatgaggcagcctcctgagtatcaggaccatggtgggatggtcatgcctggctctcctgactggcagcacttaatgttttctttcttttttcttctatttacttatttgttttgagacagggtcttgctctgttgcccaggctggagtgcagtggtgcaatcatagctcactgtggcctcgaactcctgggctcaagcgatcctttcacctcagcctcctgagtaactgggatcacaggtgtgtaccccatgcctggctaattattattattattattattacttttgtagagatgagtctccctatgttgcccaggcctgtcttgaactcctgggccgaagcgatcctcctgcctcccagagtgctgggattagaggcataagccaccatgcttggccctctttttttttttctagttggggtgtaactcacatcatataaaatgaatacatcttacactgaattttctcctgtctgtagagttatcatccaagctattctttatttttttgagatggagtctcgctctgttgcccaggctggagtgcagtggcgcaatctgggttcactgcaacctccgcctcctgggttcaagtgattctcctgcctcagcctcccaggtatctggggttacagacatgcgccaccacgcctggctaatttttgtatttttagtagagatgaggtttcgtcgtgttggccaggctcgtctcgaactcctgacctcgggtgatccgccttccttggcctcccaaagtgctgggattacaggcgtgagctgccacgcctggcccagtccaagccattcttaaaggaaggactgccttggtcgttgaaaccacatcaatttaccttttgtgtttcctcggtttgaactctggtctcacctcttcctactgagttggaactctggtctcacctcctccagaccctggcagctgagttagttgctctcttgttaattcctagtgttctgcagaggggcggtgtcattactgatgaagaggaaacctctaagaagatagctgaccagttggacaacattgtggacatgcgcgagtacgatgttccctaccacatccgcctctccattgacctgaagatccacgtggtgagtggggcagggttgggtcgctgctcacatgaatttcctaacagccaggagatgatcattatgggtgaatccacagaagaatagactttcctggatgtagaactctagttagcacactgtgtgttttgcaggctcattggtacaatgtcagataccgaggaaatgcttttccggtagaaatcacccgccgagatgaccttgttgaacgacctgtaagttttgcttgtgttaccttcatcctaaaatttccagttttctggagagaatattcttcagtgctggagagtgaatctgactcaaagatatgtttgctgcttttcccccaaatactttattaaaggaaatatggagttagaatttttcatcagtttctgacagtatcatttccttttttgttgtatatcactgtatgacatcagtgtttgagctaggcaggatttggacactcgagggaaagctgggacttccgtttgggtagttgatagtgaagggacatggtgaaaaatggatttgtaactagaaggccttggttcaaacatgactttgtggtgttgggaaagtctttgtattcagttttctcttttccgaaatgaagatatcatctctgtgccacagttacctttcagagttgtcataaccaccagaatgaggtgatgtcttttgaagagtttttctcctaaagttctgtgattttaggcttgtcctgtgatcagctgctctcttaggtatgtcagttttcataccatagggagtcgtgatactcttgatgtaggttggttagtcttagggtccttctcccagctctagagccttttgactcttttaacaaccagagggaggtagagcaggctgggggtgggtgttcagggaggcctaatggggagtttagagcttggctttatgcttattttgtccccacaggaccctgtggttttggcatttgacattgagacgaccaaactgcccctcaagtttcctgatgctgagacagaccagattatgatgatttcctacatgatcgatggccaggtgagcaggtggcttctgggaagtaagctcctgggatggggaccttgtctggtccccatactacagcagcatctgccccactgttagtatttgttgagtgaataatgagttagtccaggaatgggagcaaccaagccgttccgacctccagctgtaccctcccctttcgagtgggaatccacacacagagcgtctcttctcaggaagcttaaagcactttcacattgctgtggacttctttgtagtgagaatctctaggcagagtgtgtgggcagggtgggaacgccatttcttggctttgcagcctctgacttgtgctgattgctaatgaacttggctagggctacctcatcaccaacagggagattgtttcagaagatattgaagattttgagttcacccccaagccagaatatgaaggccccttttgtgtcttcaatgaacccgatgaggtaaggaggtatcacttgggaaactacccggtattgtgggaagaacggacatgtggatctttccaaggcctcaggcattccgtcagatcagaattgcagctccatgagctttgttctcagggtatgaccgtcttttctgccagagacgggcggaggggcggggcaggaataagggccaacatgaggctgctgcttctgaactttgggagaggaatttggaatagcttgaagaagagaaagagcagacctctgactgctgtgacttgggttcaggctcatctgatccaaaggtggtttgaacacgtccaggagaccaaacccaccatcatggtcacctacaacggggacttttttgactggtgagtctgtgtcttctctatgagtaactgggcagcatttgagagggagggcgttgcgtggtgcaggggcgcttcccatgtcgacttaggaggtggctcctgggttcactctgcacctcccgtgtctgggttcctccctgggtctgagggaggaatggagaaaggggcattagagcctgacctgcccacttgcttgtctgtcctctttccaacccaggccatttgtggaggcccgggcagcagtccacggtctgagcatgcagcaggagataggcttccagaaggacagccagggggagtacaaggcgccccagtgcatccacatggactgcctcaggtaggggccacagagcagcatggctcctcactgctgtccgtgagcgagatctgaaggcctcttgcagactgtgctgtcaccacatctcatgggaggagggtggcctccgagaggccgtttcaggtcacccaagagtatggcagctgcaaccctgccagggcccgggatgtgctgtctttgactgttgactgacaattcatcagtgaccaggcacattgagcatcagcctctggggtggggaagccgctggaaagacgcactcagctgacaggtcccagacctaggacctcatggagctgctctgcccaggcaaggttgggatgtggcagcccggctgcctcacaggacaagcctcacgggacaaccacagattccatatgagctagggtgggaggcagctcagagcttcggagagtcacggcgttcgggggctctgacatgactggttgggaagacaggtggatgtggaaatgccaacagaaggaggctggaagggaaggaagggaagggagggaggaaaggagggaagggaaggaagggaagggagggagggaaggaagggaagggagggagggaaggaagggaatggaggggcctccacggcctctgtattctgcacagtgccactggggtgcttgcagcctgaatgcgtttctgtttagctctgatgctcagcacttggcttggagagggaggccaggaggctggggccggtttagcgtgtgacggtgtgacagtcctgatccaaggcagggagtgagggttgtgaggattcaggatctgtcatgtggggcagggggaggcccagggatgctggttcttagggaggggttggcacctggggtttttgtgccatccgtggagacagggaatgggtagagaaggggcttgaggcaggaggtgaccctgctaccgatatgctagcctggaagccccacccatatgggggccctgaagaccaccatgaggcttggtttgggctcgcactgtagattgggactcactgggttgcgggtgggtcttggtgaaagctggggtagtggatgaactgaaggcaagaggtaaagtgagagaagaaggccacagggtggaggctgcggggggtggagaccggacatgacccctggacagctgctccagggaatgcgtctgtagggaggaggtagagacaggttccgggtagagtgtggggggccttcttttcttaatttttattttttatttattttttaaatttttattcttcttggcatctgatcacatcttgccttctattaaaggagggtgggcttgagtgtttccgtgctgaagggacagtgtgaggagagaagatcagtgtggttgatagaactaggccccaggggtgcagacctgaggtctggggagaggcccaaggaggtggggcgcccgtcggagaggccacaaactctgctgaggatgggaggaaggcgagggccggaaggaccagtcctggtgcttccttgtgttgtggataggtctgtgagattaactagatcctgatgaagggttttcacaaggtgtctacaccatgtggggccttggtgtgaggctcctgggtgcctgttaggaacttgcatctgtctgtgtggtgcccagttttgccagttctcaggggttcccgggctgcatgttagaatcatcctggcttctgttctcattctccttccaggtgggtgaagagggacagttaccttcctgtgggcagtcataatctcaaggcggccgccaaggccaagctaggctatgatcccgtggagctagacccggaggacatgtgccggatggccacggagcagccccaggcacgtaagccacatcccggctgcccctgctgccgtgtgcacgcatccagatggccacggagcagccccaggcatgtgagccacatcccggctccccctgctgccgtgtgcacgcatgtatgccagcccgctccacccagcaggctgtgtctccgggacacacgtgttttgtcctgtgccggtctccttactgtgtgtgcggcaggctggtcaggccaggctttgctttctgtgcttcacacttgaccctgggctcttgatttttgatggccctgctctctggcgttctctcctcagactctggccacgtattctgtgtcagatgctgtcgccacttactacctgtacatgaagtacgtccacccattcatctttgctctgtgcaccattattcccatggagcccgacgaggtgagcattatctgtcctgtcggcaccctggcctcctcagcccttgccccattccaaatgcactggagctgaatggaggtggatgtcccaggagtgctggcaccagaggcggcagtagaattctggtgtgtgacgtcagggatgtcctttgggaattctctggccctggtgtgaggaagaaaccacaggaggcagaatttgcagccatttaccacgaggttttctctcctttcacactgaagttcagcttaggttcctggactttgcctgcaagtcagggcctttggtgttgcttttggctggaagccttggtttctcttgcaggtgctgcggaagggctctggcactctgtgtgaggccttgctgatggtgcaggccttccacgccaacatcatcttccccaacaagcaagagcaggagttcaataagctgacggacgacggacacgtgctggactctgagacctacgtcgggggccacgtggaggccctcgagtctggggttttccgcagcgatatcccttgccggtttaggatggtgtgcttcttccctgggattcagattcttcccactcttgtgctgtggtaggacccagaagctgcaggggctgaaataaagccccttctccccatcctgtcccacggcccctcaccgggtgtggcttctctggcccagcaccccccgggggcttctttagggcagtgcactgcagattgtgcacatgagtccttccggagctttctcgggcacaacctgccacgtgcagccacagcgtcaaacctgaggcaggctagtgtgggtgtgtttcccctctgaccccgtcgtctcactgttgtgctagaatcctgccgcctttgacttcctgctgcagcgggttgagaagaccttgcgccacgcccttgaggaagaggagaaagtgcctgtggagcaagtcaccaactttgaagaggtaaccatcagggaggcaggaagagccagtctgtgtttggcgccttcttcacagaccacgtctttcagcagcacgtttattgtgcacctgctgcgtgtggtgctgtggacggatgacacagggtctctggtgggacagggcagtcatggttgtgacgtgtgatgctgtcacaaggtcggagggcttcatgagaggtggggtgtgagctgctcctgaaatgcagtaacatggaaggtgggtcctggtgggatgtatcccgtgtcctgttttaaagcattaggactttattttataggcactggggagccattggaggttttaaattttatttactttttgttgttgagacttaaaaatgacagtaaattcctacaaatgacaggattagtgactgtaaaatctgtttacataatggttagaaagcacacttacaaagtgtgttatgtgactggagagggagacaccagttcttctctgatccctgttcctcaggacatggcacatctcaggtcttttttttttttttttttttttttccctttttgagatggagtctcgctgttgttggcctgggctggagtgcaatggcatgagtttggctcactgcaacctctgcctcccgggttcaagcaattctcctgcctcaggctccccagtagctgggattacaggcatccgccaccacacctggctagtttttgtatttttagtagagacagggtttcaccatgttgtccagtctgatcttgaactcctgaccttgtgatccgcctgccttggcctcccaaagtgctgggattacaggtgtgaggcaccgcgcctggcctatctcaggtctttatgtcaggcactgtgcagcactacatcatgttcagtgaggttgctggtttagagtttttaacagttttcacattgatgccaagaaactttttttttttttttttttttttttgagacggagtcttgctctgtcacccacactggagtgcaatggcatgatctcggcttactgcaacctttgcctcctgggttcaagcgattctcctgtctcagcctcctgagtagctgggattacaggtgcccaccaccatgcctggccaatttttgtatttttagtagagatgaggtttcaccacgttggccaggctgctttcgaactcctgactgtaagtgatctgcccacctcagcctcccaaagtgctgggattacaggtgtgagccactgtgcctgccctcaagaaacatcttgtaatagattcactagtcaaaatttaaacaagaatatgtgtacactcttggcaagctgtgaagcactgtttggctattgtcagccacatccattattatacttcagggaactcttatgaaccgatcaggaagagagccttgtctgaataacaaataggagttaaagaatgtcggccatggccgggcacggtggctcacgcctgtaattccagcactttgggaggccgaggtggatcacgaggtcaggagattgagaccatcctggctaacacggtgaaaccccgtctctactaaaaaaatataaaaaaattagccgggcgtggtggcgggcacctgtagtcccagctactcgggaggctgaggcaggagaatagcaagaacccgggaggcggagcttgcagtgagccgagatcgctccactacactccagcctgggcagcctggaatcccagcattttgggaggctgaggcgggtggatcacctgaggtcaggagtttgagaccagcctggccaacatggagaaaccccgtctctactaaaaatacaaaaaaaaattacccaggcgtggtggcgagacgtctcagaatctgagacagagtttcactcttgttgcccaggctggagtgcaatggcatgatctcggctcaccacaacctctgcctcctgggttcaagagattctcctgcctcagcctcctgagtagctgggataacaggcgcttgccaccacgcctgggtaattttttttttgtatttttagtagagacagggtttctccatgttggccaggctggtctcgaactcccgacctcagctgatctgcccgcttggcctcccaaagtgctgggattacaggcgtgagccaccgcgcccgacctagaagcagatatttaaagtctttaagaaacagtgagatgggcaggtagagtgaggctggaggtgtggtagatgtgaggatgccaggctccctggtgagtgaggaagagagctctgtagatgtgaggacgccaggctccctggtgagtgaggaagggagctctgtagatgacattgtcctgttagcgattcctaagtcctcgcaagtgcccttgaaagggaagcccaggatcgcctttgtgtccctgaagggtcacctgttgggcggagggtggctggggggatgtcagcaggggctcacagccacgtggggcatgtccaggtggtgtccccaccatggaaacttggccattcacttgtcccagcccatcctccccttcttgactggacagcctttcagaacacgccgttactgggcagagaagggtgcagtggaggctcttccccggctgattcgtttatctgtaattcaagtagaaacaataggtgttactgttgtggtatttcctgttctatggaatagatgttattccttgtaatcacttttttcttaaaattttaggtgtgttttctatttttactactttggagggttttaaggatttttctttttctttttttttttctgaaacaggatctggctctgttgcccaggctggagtgcagtggtgcaatctgggctcactacagccttgacctcacgggctcaagcgattcttccaccccagcgttccgagtagctgggactacaggtgccaccgccacacacggctaattttttattttttatagagacgggggtcccactgtgttgctcaggctggtctcgaactcctgggctcaagtgatcctctggcctcggtctccgaaagtgctaggattacaagcatgaaccactgcacctggcctaaggattttttttaatactaaggagagtttagtgttcaagtaattttctaatgactccaccaaatttaatgtatttcatagaaatgatggcaacccttcttaacttttttcttctggctagtttttgctctatttatatatttttcagctttttcctctcctgaatgtctaaaaggggttggtgaactgcacacgaggcaagcttggtcaccagcctctactgagtttcgctttctctgcaggtgtgtgatgagattaagagcaagcttgcctccctgaaggacgttcccagccgcatcgagtgtccactcatctaccacctggacgtgggggccatgtaccccaacatcatcctgaccaaccgcctgcaggtgagactttacttcccgtgtcagagtcggagctctctctgcccagccctaagtgctttctcacccctcccagccctctgccatggtggacgaagccacctgtgctgcctgtgacttcaataagcctggagcaaactgccagcggaagatggcctggcagtggaggggcgagttcagtgagtgtcggccgcctgggtgggcactcggtgggaaacgggtgggtgagtgtcggccgcctttctccacttggtgggaagccggtgtgtctgtgcctccttttgaacttgcccccattgcctccttcccagtgccagccagtcgcagcgaataccatcggatccagcaccagctggagtcagagaagttcccccccttgttcccagaggggccagctcgggcctttcatgaactgtcccgcgaggaacaggcgaaatacgagaagagaaggctggcgggtgagtgcctgggcatggtcacggctgtaaagatgtggctcctgctcccactttctgttcttactgggctgcgttggtccatcccagctggggccccagaggtgttgtcacagcagaccagaagctgctctaggtcactgtaagctgtgctctcactgcagggtcctttatttgcttccccatctgcaagtgttagacactgctgctctgtggtcttggggtatttggcctgttcctacccctgggctgtcctatttctttctttttttttttgaaatgaggtctcactctgtcacccaggctggaatgcagtggtgtgatcttggctcactgcagcctcaacctcccaggcaccggcaatcctcccatctcagcctcctaagtagctgggactacaggtgtgcgccaccatgcctagctaattttttgtattttttgtagagatggggtcttgccatgttgcctaggctggtctcaaactcctgggctcaagtgatccgcctgcctcggcctcccaaagtgctgggattacaggtgtgagccaccgtgcccgcccacctttttcggtatgagaaactagcagtgtatctgagctgttgctcctttgtggtgacgtagaagccatgttcttcagcacccctgtgccctggctccctctgctctgggagatctcacccacctgctctgcccatctccgtcgtgcttagattactgccggaaagcctacaagaagatccacatcaccaaggtggaagagcgtctcaccaccatctgccagcgggaaaactccttctacgtggacaccgtgcgtgccttccgggacaggcgttacgagttcaaagggctccacaaggtgagctctgaggggctgcaagctttggcctctgtgagggcagtttcagtcggctcatgaagtgggcactcttggctccttgcctgggatcctctgagcaggcacttgcactcggatggtaacgtgcaattgtttttgacttggaagagttgatggccacgaaggatgcagaccatcatccaccctggtctgaggcctcagaaggaccctaaaggatgatttctaaagtgattatttagagcaggggtcagcaagctacagctggctggccgtttgagtacatcaagttttacgaacccaactgccttcgcctattgtttatctctttcccgctgtcatgggaggtgaggagttcctagaaactctaaggccttctcatctatggtattcaccatccggcccctcgtgtttaactgacgtatttcatccggtaggaacatggaaaatgcatagcaacacctctgttttgataccaacgggtcattattttatatctgatcagattgagccattttttttctgagagaccttcactgtagactcagcacggcccctgctgtgcggccccctggcatcctgcactgccctgctgaactcatcgtcacatgttcttttttataatggtaaggcggacataatatgacatttagtgtttttaagtgctcagttcaggggcatgaagcatattcgcactgttgtgcaactatcaccaccatctacctccagaattcttcgccttctgaaacggaaactcttatctccatcaaacagtagctccccacctcctccctggcccctagtgaccccattccactttctctctctgaattccacgactctagggatgtcatgtaagtgaaccgtgcagtatttgtatctttgtgaccggctttttcacttagcatgatgctttcttttttggagacggggtctcactctgtcaccaaggttggagcacagtggtgtgaccttggctcactgcagcctccacctcccaggctcaagtgatcctcccgcctcagcctccccagttcctgggaccacaggcgtaccatcacgcctgatcgttgtatgtttggtagagacggggtttcaccatgttgcccaggctggtctcaaagtcctgaactcaggtcatctatccaccccagcctcccacagggctgggattacaggcgtgagccaccgcgcccagtcttagtatgatgttttcaaggtttatcaacatacagcgtgtatctgtactgtatttttgtaaatggctgaataatatttcattgtgtggatttgtcacattttgtctatccttcatacaccgacgtgcacttgggttgcttccaccttttggctgtcgcgagcaatcctggtttcaacatgggctgcaagtgcgtcttcaggtctctgcttttggtgattttggatatgtacccagcagtagagttgttgggtcatatgctaattctacatttaccttttaaggagctgccttactatctcactttattttaattaagcaactgctaaattacttgttcatctgtctccctcatcaaataagcaccaaaagtgtagtgactgtctcgtgcttcagagtacaatggagttcctggcacatactaggcactcagtaattatcttaaggaatttgcttttgttccttaaatacccagcctttaaaaaccttttctcatgttgggtggggaatttgatgagacatctgtggtcttagctgcatttcttgattgattttaccaggcacccccgagtagctcttgttccctagaaactgtgctgaagcgtttaggatgtcagaccgtgaaatctacaatgttcaaatgattctgtcaacacagagagacagaataaaggaagtgtgacaaaatattgacagttggccagtctaggagaagaatgtacactcttcattgtactggttttttaggttttctatagatttgaaaattttcaaaatactaaaaacctgggctattgactttgtagaatgtgaaatggaagaatctgtgaggtgctccatgttcatgtgcttctcaggtgtggaaaaagaagctctcggcggccgtggaggtgggcgacgcggctgaggtgaagcgctgcaagaacatggaggtgctgtatgactcgctgcagctggcccacaagtgcatcctgaactccttctatggctatgtcatgcgcaaggggtaggtgggcccgggcccgggagaggcttatgggaggaatggatgagtccacgtttagggcagcttcaggtgtaggctgctgtgcatggagggccgttcatctgattcaaggaatgttggagggagaaggctttgggctggggtggggctgggaggttgaagagagtgggggccacgctgactttgagggtctgggtgtccatgagtgatgcgtgctgtggggtgtatgtgtctctgcatcatgggctggagacacgacttgccattttccagcgcgttcatgtctcccagcgtggatcctcactcagggacttgcagagtgtcgggcagttgcttcacagcatgtctgcgtgtccgggaggggcagagaagcaactgacaaggggcatggggctggtgccgggaggggagggtgggacagctgacagcagggctgggacccaggctggaggagggttgggcctggcagctaggcctgggctttctctgagaagctggaggtgagaatggggcttgggaggaggtgtgaagagagtagagaaggcgtgaatgggtctgggtggtattaagagtcctgctgaggctggagtcctgaacggctggacgcagtggcacatactgcacccttccagatccttcctgggcaccaaggtggggacagagaggtgtcctcgggcagagccagattccaccttagttctgtcctggtgcacgcacatttggctgcttcccttgtccctgtcgcatctctcctttcctcctccctactcctcactgcctctgataccccctggaggagccatgccagccccacccaccagtttgtggtgtcctctcagggctcgctggtactccatggagatggctggcatcgtctgcttcacaggggccaacatcatcacccaggcacgggagctgatcgagcagattgggtgagtgcagaaggggagccgtggggctgggagcaggtcctgggggcaagcatgggcaggaaggaaggagggaaggctggaggccacacactgggcaggaaggaaggagggaaggctggaggccacacactgggcaggaaggaaggagggaaggctggaggccacacactgggtgaaaaggaaaggggaactcacgaccttgctcctctctttctctgaaggaggcccttagagctggacacagatggtatatggtgcgtcctgcccaacagcttcccagaaaattttgtcttcaagacgaccaatgtgaagaagcccaaagtgaccatctcctacccaggcgccatgttgaacatcatggtcaaggtgagtctggggcctctggtcctgaagctctggctggcctggcgtcagtgccctgatgtcactggctctgcagcacctcacagtgtgcatgccttcctggcacccagcactgctcacattgcttttctatagcctgaagaccatggtcagaggtatcaagtgattccactcctttctctttcagcatagctcccagaattttttgcttttaactttttattttgaaataattttaaacttacaggaaattacaaaaatagtacagagaatttctgtatccccttcaacctgccttcccctaatgctgacctcgcataaaccatggtgcgcttgtcaaaactaagaaacctatgtctgtgccccagtaactgcactgcaggcctcacctggatttcccatttcccaccatagcccctcttctctcccaggatcccagcaaggacccacgtggcgccgagttgtcctgtcccggtctgtcctcgtgtcacgacctccccctctggtggtgccggccaggcgatggttggctgtcccttgatcaggggttgtctgttgtttctcgtgactagactgaggtgatttgggtttttggaggagctccacaggtgcgacaccctccccacgttctcacacgcatcgtgttggtttgtggtggtgtgggagtgtgggtgtgttgtggggacggcttagtctcctgcctgaggggcttctgcaggccttactgtggcgctcctgtgccccctcccatacggctcttcagtcgtaaatacacacccagtggggaggatataagcgtccctggaggagggctgtcagagtttctggacctgtattagagccatcacagcagcaaatagatatcgtggagcaggtgcttcgagacagtgtatccacagctgctccataagcttctgcccactgtgttagcgttgctgatgggctgtgtttgctggtgggccgcacctgcagcagttacgcctgaggtttcctgtcgtggtttttctctggcgattgtctgtttccttcattccttctactgtatcaattgggatcctgtagggaagcgttgctatccttctcttccatttgttctcgtttatttgtctgcttattgacatcagtgtggatttgcggatcagagtggacatcccagggttattgttcataggaccggagtggcttcctgctccacgtgttccccttgggccactggggcctcctagtttgtggcgtgttcttgggacacgccctcttctggtctttgtttctggagcactttcctacttcttggtactgtaaggtccaccagcctcatcttgtattttccctgctccaacctggagtcagccagttctccgagaagaatgatgtaaaaacccgagatggggtgcttgctgtgctcactgttcctgggagtgtcatagcttccagtctctcatagtggaggcagccaggaagtatgtctctagtaacgcacgcacacagaactgtttatttctgtgtctgtctgtctgcatggatgcatttaaacacatgagtctgcccctttcttattagtgacttctttctccttcagtgataaacctgtttcgaatttctcaatatatgtgtttgttcaatcctagagtccatgtaaagtagttttagaattgctaacagacttgtgtcccatgagaaataatttcaccagccactgtacagcatttgtagatagttacttttgttttcagccttaccctgtccagtcagcagagttcacgggcagctccttcctccccaccctgttggcatgttctgctgtatgtccacagtgctgttgggctcatttggcccagtctgcacccctcttgggatcccagcaccatggctggatggcttgtaatttgcacacagtgacgttcactctgtagcgtacagccctgtgggtttggacaagtgcatagtgtgtgtgtccagcaccacgaagcaacacaaaacagctgcaacccctttgtcagcaaatcctctccctaccccgaaaccctggcaacccacaatgtgttttttgtactataattttgctttgtcgaaaatgtcatgtaaagggaagcatacggcctgtagcattttgggtctggcttcttggacctaacagatacacctgagtttcaccacttggttgcatgcatcagaacttccttccttcctgctgccaagtcgtgttagttatgtggaaaagcctcggtttgtcaatccatccactcctggagggacaccaggtggtttccaggtttgggccatcatgagtgaagctgccccctcttcactcttgtttctcaggaaggcttcaccaatgaccagtaccaggagctggctgagccgtcctcactcacctacgtcacccgctcagagaacagcatcttttttgaggttgatgggccctaccttgccatgattcttccagcctccaaggaagaaggcaagaaattgaagaagaggtgggactctcatagcttttgtgctttagaaaggacatggattgagatagattaaatttagcccagaaaggaggttggatcaggagccaggatagaaacagacctgggttcttgtgatcttactgattccgtttgcaccagctctgtctgcccgcctgctgtattctggctctgtggctgcaggcccttcagccattttccttttagagaagcagtggcctaagggagagagacgtttgctgcctcgtggatgacaggtggagggttggaaagggaagaggcgggcagagaggatgaggcacagctggtggctccccagcgctccttgccactgctgtgcttgccttttttttttttttcaggtatgctgtgttcaatgaagacggttctctggctgagctcaagggctttgaggtcaaacgccgcggggaactgcagctgattaagatcttccaatcctcggtgtttgaggccttcctcaagggcagcacgctggaagaggtgtatggctctgtagccaaggtggctgactactggctggacgtgctgtacagcaaggtaaaggcctaccctccaccctcacctgctctgagggatgaaggatgaagcaagaaggggaccccgtgcttcctgggctcctggagaccaaggtgaccgaagaacacagggccagtcctaatgaaatcccaagacctcctgagcacaattacccccttggagttcccctcaacttctgcatccagggacacaactctgagggaaacgtttttctaaatagcgtgataagcctggcatggtgatgcgtgcctgtggtcccagctacttgggaggatcacttgagaccaggaagtagaggccacagtgagccgtgactgcaccactgcactccagcctgggatatttgtttatttctatgttactttgtattttttatatttttcaggctacataacattttgacagtttacataccttaatttacgtaactagcccacgattatttactaccagataggtttcacatttccattgttatcaatggtgttgcattgaacgagatatctcggtgcatatgtttcccaggcacaggcgtcttgggtagaaggaatactggaacactctgcagtgctttcctggcttgctttgctgtgtgggcttctgtttcttggcatattgtcttgtatagagtgaaacacacgagcaagggagcaccagggtatcacacagaatattcatgagcccagcactccttacaggatgtggggggcctgtggtcaggaacatgtgtgcaaagcacagctccagctggatgtgggtgccacactggaactgctcaggcctccactgctcaggccactctccagccggccggagtttctctttcctctcttctggctcttcctgccccttctttctcttcctttcaaggagaaaaacttcctgtcttaggccgagcaacatccttttctgcagccttggtgctcttcagtaaattcttcttgatattttgtgcacagtttaataaaataaaagccaagccaggcgtggtggctcacgcctgtaatcccagcacttgggaggcctcggcgggcagaccacttgaggtcaggagttggaaaccagcctggccaacatggcaaaaccctttctctactaaaaatacaaaaattagctggatgtgatggcatgtgcctgtaatctcagctacttgggaggctgaggcacgagaatctcttgaacccaggaggggaggttttagtgagttgagattgcaccactgcactccagcctgggtgacagaatgagactctgtctcaaaaaaaatataaaagctaaagttttgtgtgtgtgtgtatgttttaaagtattgccacacaggcatattagagagctcttgaaattgcagccttctgcgtctcaggctagagaagggcatggcctagaggagcacagtccagggtgagctcagactctgccccttgatttctgcagtgttttacccattgtctttctctaggcagccaacatgcctgactctgagctattcgagctcatctctgagaaccgttccatgtctcggaagctggaagattacggggagcagaagtctacgtccatcagcacagcaaagcgcctggccgagttcctgggagaccagatggtcaaggatgcagggctgagttgccgctacatcatctcccgcaagcccgagggctcccctgtcacggagaggtgagggctccccccatcacggagaggtgagggctcctcccatcacggacaggtgagggctccctccgtcacggagaggtgagggctcccctcatcacagagaggtgagggctgccctgtcacggagaggtaaggggttccttacagatttgggctgtgtttaacaccaagtttggggatggcataagtgtccatcaaccagaaatggataattgccattttgtagggaatgagatacactataccagagttcaaagggttgaattgcagctacaggttacaacactgacagtttgaaaccactttggagaaaaaagcaaaaatcaggttgaaggaagacccttatgcctccgtgtatgtaaaacttaaaaacatggaaactgctctttttttttttttttttttttttttttggtggttatatacaaataggaccagtacaaatgcctgcatggggttgatgaacaccagaataagggttgtctttacttctgtgtgaggagggaataggttggggtcacacagggcttcactctaatcgtctcacaaaggaagtcagagtggccaagtgttgaagcttgatggagccgagtggatcatagtgtgcgtgtcttctttaggtctccttatgtttgcagtattcaccacagatgtttcctccagtgaaagggaagcactgacggttgccagttgctttgctagtgacatgaaaacaggctcgttttttctagaaagcagcctgagtcttctgtgtgttactcagcaaggaacatgtagacatggttatgaacgtgcacgtttgcctgtatgcatgcacgtggttactcagaaacgcagacatgtttacgcacacacgcatgtctttgcctatacgcatgcgcgtggttactcagaaacgtagacatgtttacgcacgcatgcgtttatgtatgtgcatgcacatggttatgccgtgagaaacatgtagacatagttacgaacatgcacgtgtttgcctgtacgcatgcacgtggttactcaatgagaaacgcagacatgtctacgcacacgcatgtgtttatgtatatgcatgcccatggttacgctgtgaggaacatgtagacatgtttacgtgcacacacgcacgtgtttacacatacgcacgtgttactccccgaggaacctgtaggcatgtttgtgcatacatatgcacgcagatgtatacattgatgtttgtgaacagctgttacacgtccttatttccatgttcatttgataagagttaggatcagattttgggtgattttcactgttactgagctgtgtgcctgtcttccttacccagggccatcccacttgccattttccaagcagagcccacggtgaggaagcactttctccggaaatggctcaagagctcttcccttcaagactttgatattcgagcagtgagtgccagttgcgttctctactcttaaaagtttacaaggaaagctagacagagcagaatatgtctgagttggattatgttttttgtctggcgtcttcactcttgacttcctcctttctgataagtaataggtgagcacctaataaccttttagggcaaaactgaaaacatgaagtgcctggggccctttagctgttctattggatggactaaggccaggggtgttggctcagccacctactagctctgtgatctagaggagtcagtgaagctccctgccttggtgtcctctgttgtgcaatgggcacctttcatcatagagtttctgagaggattaaataagacacagtggttagccctgtgctcagcatgaagtgagccccactcttggctgctgccacctgctgttctctgtgcccgtttcctgcacatgcagattctggattgggactactacattgagcggctgggaagcgccatccagaagatcatcaccatccctgcggccctgcagcaggtaagggcggggtcagtggcacgggctgtggggctaaaaactgtgcagttagacaagggtctctctctgatgggtgttggcctcacacaggtaaagaacccagtgccacgtgtcaaacaccccgactggctgcacaaaaaactgctggagaagaatgatgtctacaagcagaagaagatcagtgagctcttcaccctggagggcaggagacaggtgacggtggggccccaaggctgggctgggcgggatccttgtgacacacaggactccaggcttcttgcgctgctgtgtgtgctgtagtgaagcttctgttcaagcatcgaaaatggactttttctgaaaatgtgcccattggcactttactctctaactctgagtgtcactcttttgttaataggacaccattgtgaggctgaggtgagggcaaggaactgtctccttatgtgaaaatattagggtgcactacttagactcagtgccttgggcaaatcactgtctcttgaagccccagttttctgaatgtgaaatgaatatcttccctatggaaacacttagaaacacaggacacagtgtaataaaaggtacagtgaaagtcagaagagcaaaaggaaaattcttaaatgctgaaaattaaaagtaagctataaatcagagcagtatacaaactcacatgacaagaacaaggttctttgaccaggtgcggtggctcacacctgtaatcccagcactttgggaggcctaggtgggcagaccacaaggtcaggagatggagacaatcctggctaacacagtgaaaccccatctctactaaaaatacaaaaaattagccaggcgtagtggtgggcgcctgtagtcctagctactcgggaggctgaggcaggagaacagcgtgaacccgggaggcggagcttgcagtgagccgagatcacgccactgcactcccctgggcgacagagcgagactccgtctcaaaaaaaaaaaaagaaaaaggttctgagatggattggattttaaaatttaactgtcttatttgtaagagttatatatgtattctttcccctgccccccaagacggagtcttgctctattgcccaggcaggagtgcagtggcacaatgcagcttctgcctcctgggtttggctcactgcagcttctgcctcctgggtttaagcagttctcctgcctcagcctctagtgtagctgggattataggcacacaccaccatgcctagctaatttttatttttttaatttttttctgcctcagcctctagtgtagctgggattataggcacgcaccaccatgcctagctaatttttatttttttaattttttttttaaatttttagtagagacggggtttcaccatgttggccaggctggtctcaaactcctgacctcaggtgaatgcacccgccttggcctcgcaaagtgctggaaatacagcactgcgcccagtggcttatgggccagtataacaatttcaagagttatattgaaaagataggacgcaggaaaagcaaaaggagtaaaaaatacgtataccaggtaaatgttaaccaaaagaaagctgatgtggctgtattaataccagacaaaatactctttaggccaaaagtattaggaaacataaggactattgttacataatactgaaagtcacaattctctggaaatatatactaattgtaacaatgtagcctcacattaaataatgtaaacatttacctaattataagaagaatttacctccaatcagtttgggagatgttaacatccctccctcaattgatagttggagcagaccaaaaatcagcaaaaatatgtttggaatgacacaatcaactaactagatttagtcactagctataatacatttagtgaacaaatgtagtcttgcactaaaattagagaatacctatccttttcaagaatacataaaataatgaccatatatataccacagagtaagctgcaaccaattctagataacttaaatacagaccatgtttggaaatttaagaaaaaaaaaacacatttataacttgtggatcaaaaaagtcatagaacttagacaatacttggaactgaatgtaaatacaaatgctattaaaatttgtagtatgcagttaaacaggacttgtatacgcatttatatatctaaatgcatgtattagtaaagaaaaacaaatagaaaattaagtttccaactgaaaaagttagagaacaacagatccatcagaggaagtagacagaagttataaagagttataaaggtaaccaggcatggtggtgcacacctatagtcctagctactcggaaggctgagaggcaggaggattgcttgagcccaggaatttgaggttgtagtgggctatgatggcacctgtgaataggcacttcaccccagcctgggcaacacagggagaacccaactcaagaaagaaaagaaagaggttacaaaattgagccagaatgagtgaaacaaacaatacaaccaaaatgttgttctttgaaaagacttaggaaaatagtcacatctttttcttttcttttgagacagggtctcattgtgtcacccaggctggagtacagtggcgcagtcatggctcactgcagccttgacctcccaggctcaattgatccacctgcctcagcctcctgcatagctgggactataggcgcacaccaccacatccagctaatttttgtaattttttgtagagacaaggttttgtcatgttgtcctggctggtcacatctttttcaggacagagttttttattttaatgaaaacagacatcattatagatatagtaaagcctaaaaaaatggaaggattcccattttctgctaaacagttggaaaacatagatggaacggacagtatcctcaagttatgcactgacctaagaagtaataaaaacctgaatagaactttaaccattacagaaattgacacttaaaaagaaacaggccaggcgcagtggctcacacctgtaatcccagctctcagggaggcagaggcgggaggatagcttgagcccaggagttcgagacctgcctgggcaatatagcgagaccccgttctccacaaaaagaaaaaaaaaagagacgaaaaaaaataagtgtaaaagaaacatcaaacccaaatgatttttaagagaaaaaggaaaaaaaaaacccttagctcatttggtaaccttggcaatccttgttactttggtaacataattgaaaacaggaaaggaaagttacgggccatgaacaatagatgaaaaaatatcaacatacatgaacaataacaatatgaccaactaggacttatgctgggaatagcaagcactgtttaattttagaatttgccaggttagtttttcttgggagaaatccactaattcatcattaaaggagaaggctcgtaagatcatctccaatagatgcagaaacaacatgcggtaaaactttaacatctgctcatgttaaagtttgaacaatcaaaatcagaatagatgagatgtttcttaacctgataaagtgttcttgaaacctaacagcagacctcatacttaaccacaaaacactggaagcattgaagtaaggagtaagaaatggatgcctgttaaccactgcttctgttcaaaacagtttggagatcctagccagcataattaaaccagaaaaagaattaaggattgaaaagggagacatcaacttattatttacaggcgatgtaatttgttaacagaaaatgtaaggaaacctagattttgtgttaacttatatgtatttcagcaacaattagataccaaggtaagatataaaagtctattgctttcatttatactagaaacaaaatattttttgaaagataccatttacaatagcaataaataatgtactaaggaataaattcatggtaacaatgtgtgtaagacttttacagaaaaaattacacaacttttttctttttgagacatggtcttcctttgtcacccaggctagagtgcggtggcaagatcatggctccctacagcctagaactcttaatctcacgttatcctcccacctcagcctcctgagtagctgagactgcaagtgtgcaccaccacacctggctatgtattttttgtagaggctgggtctcactgttgcccaggctgatcttaaactcttgggctcaagtgatcctcctgcctgggccccccccaaagcactgggattacaggtgtgagccaccatgcctggcctatacacaactttattgaacatataaaaatttacctaagtaacaaaaagaggtaccatctttacagatgaaaggactcagtattaaaatatggcagtttgccccatattaattcataaaattcagtgtaattccaataaaaaagaatctgccaaaagctttttggatagaacttgacagacgaatcctaaaattcatataaagggtaaggataagaataaccaaagaattttgaagaataaggagggcacgttgatcttactatgtaacgagacacactatcatggcatcttgacaagatgagaggagagcagtagagccgattgggagcctagaaacagactcccctgttagtcggaagttggtaggtcacagatcgttaaggagagagtggactgcagtgagtgatgctggtgaaaatggtttttcatatttggagaagtaagttgttgtatcacactgagtgtgaaactaaggctgagtgtgatggctcatgcctgtaattgcagtgctttgggagtccaaggaaggaggatcagttgagcccagaagttccagacgagcctgggcaacatagggaggtctcgtctctacaaaaaaaatccggcacaacattaggcatggttgtgcatgcctgtagtcccagctacttgggaggctgaggtgggaggatcacttgagcctgggaggttgaggctgcggtgagccaagatgaccactgcactccagcctaggtgacagagcgagacccctgtgtctttaaaaaaaaaaaaaaaaaaaaaaaggaaactacaatctttggtaaacaactcaggagactatgatgctggggtgggaagggcttttttaaggcacatgtgaaaaacatcacaaagggaaagaatgatcaattaattaaaagttaaatcttgtgtagtctgtgacaagaaaggcagaatgttgataattgttgacactggtgataagaacatgggagctcattactgtgctttcgtgtatgtttgaaaactttcctgataggaagtcaacacacacaaacttacatgtagcacagaagtcaccatgaaacaaaggcctgagtcacattttgaagatgtttagaatgtataaaagttagaaatggctcataaacgtgttagctatctattgctgcatagcaagtaaccccaaaacttagcaacttaaatgcactcgtgtatccgagggctccactggagaaggagccacttccgagctccctcccatggggatggcaggactcggttcctccttggcctttgtctggacgttatccttagtcccctgctccatggggctcttcacaggacagctcacagcatggcactggacttttgagagagtgccagccaggcagaagccacagtgttttatagctgctctcaggagtggcattccatgacttttgctggaatctgttcattacgggcaagtcaccgggtcccacccccactcagggaaggagtcacacagggtgtgaacaccaggaagtgggggtcgttgggccattttgggagctgcctgcacagggccaagatgttcagccttactgttgatgaggtaaatgcagcatgatgtatttagatagcaggtcacactgaaggcaagtaagtgtggtggcatcaagtagcaagattgtgggaagtaggaaatccctggtgctagaggtggaggtggttgttctccgggaccaggcaacacatacagagatggtcattgagtcacagtttgtagttttgaaaaagtaggcgcttgtcattcttcatttgcaaagtcatgggtaggtaggctgatgtgtttatatgataaatcatttcacatcagttacaatgaacgaaccatatgtgcatgtttcacccggtgtcagtctcaaaaatacatggctgaataaagaaacaagttgcagggacaggcatgtggctcacgcctgtaatctcaacactttggaaggctgaggtgggtggatcacttgaggtcaggagttcgagaccagcctggccaacatggtgaaaccccatctttactaaaaatacaacaaaaaattagccgggcttggtggcaggtgcctgtaatcctagcttcttgggaggctgaggcagaattgcttgaacccaggaggcgaggttgcagtgagatgagatcgtgccattgcgctccagcctggacaacagagtgagattctgtctcaaaaaaaaaaaaaaaaaaaaaggaaacaagttgcagtcagatgtgtcccacatgttactatttaggttaaaacttacagctgtggcatgtgtctgtggacatgtggtaaaaatttaaaggtgtgtgggggcagacagaagagggctgtacccattatttgcaatattttctttcttacaaaaagcattctggagcaaacatggcaaaatgcaaagatttacttattggtggtattgagtgacgttttatttttcggtttgatcttttcactttttttttgaaagagggtctcaccctctcgcccaggctggaatgcagtggcgcaaccttggctcactgcaacccctacctcctaggctcaagtgatccttccacctcagcctcccaagtagctgggaccacaggcccacacaaccacacccagctaatttttctattttttgtagagacggagtttcaccatgttggccaggctagtctcaaactcctgggctcaagtgatccgcccacctcagcctctcaaagtgctgggatgacaggcgtgagccaccacacccggccttcactattaaaggttcaataaacttgtgtaaacgaacatcccatttcaggtgatatacttatactagatttcgagaagtagaatttgtggggatgagatcctgagatttttgtttgcttgtttttatgaggcaaggtctcacttgcccaggctggagttcagtggtgtgatcatagttcgccgcagcctccaactcctgggttcaagtgatcctcctgcctcagcctaccaagtagcttgggactacaggcgcactaccacgcctggctaatttgtaatatattttgtagagacagggtcttgctgttacccaggctggtctcaaactcctggccccaagcaattctcctgtcttggcctcccaaagtgctggcattccaggcatgagccaccctgcgcagcccgagatcctgagatttaaggcttcactgggtctttccaggtcacgatggccgaggcctcagaagacagtccgaggccaagtgctcctgacatggaggacttcggcctcgtaaagctgcctcacccagcagcccctgtcactgtgaagaggaagcgagttctttgggagagccaggaggagtcccaggacctcacgccgactgtgccctggcaggaaatcttggggcagcctcccgccctgggaaccagccaggtaaggcacacagctgtgatactgtctgtctctgaggggtctgcacagcccagggagcccgagatgcgtcctgacccctagggaggctgcttgtgagaaagtcatggcgggcattcccatctcaccacttgcacactggctgtgctcaccatccatcccaggaggaatggcttgtctggctccggttccacaagaagaagtggcagctgcaggcccggcagcgcctcgcccgcaggaagaggcagcgtctggagtcggcagagggtgtgctcaggcccggggccatccgggatggtcctgccacggggctggggagcttcttgcgaagaactgcccgcagcatcctggaccttccgtggcagattgtgcaggtatagaccttgatccaaggggagggcagtggctctgctgatggcccagggagggggtgtccagctgggccctgaggtctgggatgggagggttagagtgggcctggagtttcctgcccatcgtagggaggcctaaggccctgtgctgggagctgcaagctacctggaaggtggccccgtctgtgggttccagtgtgtcctgtgatgtgctgtatgtccgtgtggcctttcagatcagcgagaccagccaggccggcctgttcaggctgtgggcgctcgttggcagtgacttgcactgcatcaggctgagcatcccccgtgtgttctacgtgaaccagcgagtcgctaaagcggaggagggtgcttcgtatcgcaaggtagggaggagctggtgctgcctctgcagtcatctgggcagcctgaggtggctttcccatgatctagcctggcctccagcctccatctcctcagtaccttatggggatgttctaggaattcctcaaaacaacgtgtgtgagcgctgagcaccgagcctggggcagagcgagtgccgggaatggagctgctggtgtccttgtcacgatgagcttgtctgcccgcgaggtccatgttgcggggacaaaccaagtggcattggttagagattgtgaactctgtctccgtaggctctttggttgttaacagctttattgggatgtaaagttacgccatccaactcacccatttaaagtgcagaattcaatgacttttagtggcatgactattgccagtcaatagtgacattttctttttttttcttttttttaattttactttgatttctgggatccatgtgcagaaagtgcaggtttgttacataagtaagcacatgccatggtggtttgctgcacccatcaccccgtcacctgggcattaggccccacatgcattagctgtttatcctgatattccccctcccctcacccccccattcggatattttcatcactccaaaaagaaacctggcatcccttacctgtcaccatcctcccccagccctcagtagccactgatccacttcctgtctctgggtttgcctgtttgggcatttgatgtaaatggaaccctacagtaggtgggtctttgtgctgggcttcttccacctgcagaaactgcgagggttttcatgtggccatgagtgcgctgaggctcttagatggcatctccacccgaactccccgttgttaatgtgtcggctcagcacatttcttgactggatgctgtgaatcacgtaagaagtgacacgtagttggggagatgaggtgtgcatatttgtacctacacaaggaggttttctggagaaggtgaaactcgattccagccaggtgattcagtagaatgtgcatatagaaagtagacgcagagccaggtgtggtggttcacacctgtaatccccgcactttgggagaccgaggtgggcggataacaagaggaaagcggacgcagaggcatcgagaccacagagaacaggtgggactgtggggtttctacaccttcctttcgatgcgtggtgctgtggtgctgtggccgtgtggaagtgccctaacttttgggatgtttccctttatgactatcagctcatctcgagggaggttctggcgctgtgtgaatattctgtcctcaacgtttgactggatggtgtcagcatccatgtctcgtggggtccatggggctccaggatgatatcttcagattctgttcctctgtgtgtattagctgtttcctttataacgaagagctttgtgcagatcaggtagaaatgaactctattccttaaaaagcaagatacgagagggataatacgctttttttttttttaagcaagataaatgctttttccctttaaattatttttaattttcaaggtagggcatggcaaaatgggtttattcctttcatttttcctctctttttaaagtattactatggattagaggatttttgtttaacttttttgtttctgtttttgagaaggtctctcactccatcacccaggctggagtgcagtggcatgatcttgcctcactgcagccttgtactcttgggctcaagcaatcctcctgcctcagtgtttaatgttttaacatcaaccgtagccaaatcccgcccaacacacacacgttaggtatgttaaggtacacggtaggccctcactttatgttgttgataggtccttagaaactgcaattttaagtgaaatgactaagtaagatgatgtataatgaaacagattttttttcttctcagaaactataatgaaactgtgttggccaggcgcagtgctgcatatctgtaatcccagcaatttgggaggctgaggctggtggattgcttgagctcaggcattcgagaccagcctgggcaacgtggcaaaaccccttctctacagagtattttttaaatttatttatttttatttgtttgtttgtttgttttgagatggagtttctctcctgttgcccggctggagtccagtggcgcatctcggctcaccgcaacctccgcctcccgggttcaagaaattctcctgcctcagcctcccaagtagctgggattacaggcacgcaccaccacgcccggctaattttgtattttttagtagagatggggtttctctgtgttggttaggctggtctcgaactcctgacctcaggtaatccatccacctcggcctcccaaagtgctgggattacaggttgaaccatggcgcccggccccagaatttttttttttttttttttaaaggaagaaagaatgttgaacaaaatgatgttatttgaggacctgctatacattacttcacttaaccatcacagtttccaggaatccattgatgttaagtgaggacttactgtaatttacatatagttaagtgcagatttttaaatgtgcagttgattgggtttttggacacatgactatgcctgtgtcacccacacccccacccaggtgcagaacgtttccatcacccgggagggtgctcttgtccccctgtgcaaccttctgctggcctgatttctgtatttctgtaactgtgtgcatgtgactttctagaacttcatattaatggaaccagacagtagactctttggtggtcaatatcttcttgagactcaaattatcccaaattgggctggccagatcccttcaagctggcacctgagtccttttgacatgccctgttggtctttgaaaacttccttgctttttggccactaagagaggccaggctcaccttgaacttccagacgtggaattagctgttcctctaaagagcctgagcctcgttgagaggttatgttgagaaaccaagcttagagctcaaggggtatcatttcatctagattccttcagtgaacagccaggaaatatatacattttaaaaagtgcaattacactaattgttccagttcatatttaccagaacataatttttcatttctttgattttgtgtgtgtgtgtgtgggtgtgtgtgtgtgtcggtctaatttcatgttactggaaaaatctaaccctactggttctcttctcgcttgagaattattcagattttcctggttgttgttacgccaaataacgctttattgcaacctggacattttacatatttgagactttgggtatttttaaaaatcctttagcgtgtcaggtttttttgtttgtttgttttagcaacaaccaacacggttaattccagtgcccaagctcttccttgcctctttgtgcaaagcttccaatgtcagctcagcctccagagcctctgctgcgttgttttgggtcacctgtgcaagtgcagctcgtagtgagcctgggacttgtgctgctggttcatgcatgaagctagggtgctcctctccaggattcccccagccccccacacacgaagctagggtgccccctctccagctctcctctccaggattcccccagccctccacacagggagctagggtacccctctccagctcgcctctccagaattcccccagccctccacacagggagctagggtgccccctcttcagctctcccagaccccccaggaccccacacaggaagctagggtgcaccctctccagctctcccagaccccccaggaccccacacaggaagctagggtgccccctctccagctctcccagacccccccaggaccccacacagggagctagggtgcccctctccagctctcccagacccccccaggaccccacacaggaagctagggtgccccctctccagctttcccaggcccccccaggaccccattcacgaagctagggtgcccctctccagctctcccagacccccccaggaccccacacaggaagctagggtgcccctctccagctctcccagacccccccaggaccccacacagggagctagggtgccccctctccagctctcccagacccccccaggaccccacacagggagctagggtgcccctctccagctctcccagacccccccaggaccccacacagggagctagggtgccccctctccagctctcccagacccctccaggaccccattcacgaagctagggtgcccctctccagctctcccagagccccccaggaccccacacacacactctggctcccccaggggctctctttccgtttctctgactaggaaaatgtgatttctctcagtttttgccatctacaccctcaggttaaacccatgagagaatggaggaagatgaactgggaacctccccagatcagtgttgactgctgtattctgacagctcttgtctattctcagaggctgcaggttgcttttcaaaattgcgtccagaggccaggcatagtggctcacacctgcagttccagcgatttgggaggatcacttgagtccaggagtttgagaccagcctgggcctcatagtgagacctcctttctacaaaaaaaaaaaaaaaaaaaaaaagccatccgtggtggtgtgttccttgtcccagctactcaggaggctgaggctggaggaccacttgagcccaggagttggaggctgcagtgagctgtgatcacactgctgcactccagcctgggcaacagactaagaccctgtctgtaaaaaataaataaataacataaaaattacatccagagtttttagttgtaatcattgagagaggtggactgtggcgtggtgggtgtaccccgtcgctaggggcaccagaagtctaggactccgaatagcgtgtgctttgtgtgtgtaccacagacattaccacttacgcccagtgacgagatcatcgtcgtattctcgccaggtaaatcgggtccttcctcgctccaacatggtctacaatctctatgagtattcagtgccagaggacatgtaccaggaacacatcaacgagatcaacgctgagctgtcagcgccagacatcgagggcgtatatgagactcaggtgactccccagccaccctcgactgaactgggggaggctccagcagggtggtatggaggaaagaaacccgcccagggtgtgggctggggaacagcagcgacagtggactcgttcccacaggtgaggtgaatgtcagcagtgtgtctgccaaaagtggcctttgggcagtgggccgggcagctgcaggggcacagccacatcccgggcagaagtcacgtgggcagccagagcccccaccatccagcccttgccggcctgtctgcccgattcttccaggttccgttactgttccgggccctggtgcacctgggctgtgtgtgtgtggtcaataaacagctggtgaggcacctttcaggctgggaagcagagacctttgctcttgagcacctggagatgcgctctctggcccagttcagctacctggaaccaggtatggcctgcaccagccgcccatcatgtgcctgcctcccacacatctggggtgacggtcttgtttccttctccagggagtatccgccatatctacctgtaccaccacgcacaggcccacaaagcgctcttcgggatcttcatcccctcacagcgcagggcatccgtctttgtgctggacactgtgagtcctgggccctccatggcagcacattggctggggcagggtttggggaaggaggacatctcccagggtgcccaggccctccaggtcttgtcctcaagggcctttgcccatgagtgcttgtcgtgattgaattggcagtgccgtggcagtggtggagtctgccccagggctgcccccacttcctcctgcgcagggggaggctgacgtggcctgcgttggtctaggtgcgcagcaaccagatgcccagccttggcgccctgtactcagcagagcacggcctcctcctggagaaggtgggccctgagctcctgccaccccccaaacacaccttcgaagttcgggcagaaactgacctgaagaccatctgcagagccatccagcgattcctgctcgcctacaaggtgagagtggttggggtcttgctgtgtgagccccatcttctttgaggctgggtccacccaggtcttttcttccattttgccttgacccaggaggagcgccgggggcccacactcatcgctgttcagtccagctgggagctgaagaggctggccagtgaaattcctgtcttggaggaattcccactggtgcctatctgtgtggctgacaagatcaactatggggtcctggactggcagcgccatggagcccggcgcatgatccgtcactacctcaacctggacacctgcctgtcgcaggccttcgagatgagcaggtgagcacagtactgtcgttgtgggccagtggtccccaggcagagccggcctcggtggtctctgtgacccggcgatgtgccccggtgctgacctgtgccctggtgcaggtactttcacattcccattgggaacctaccagaggacatctccacattcggctccgacctcttctttgcccgccacctccagcgccacaaccacctgctctggctgtcccctacagcccgccctgacctgggtggaaaggaggctgatgacaactgtcttgtcatggagttcgatgaccaagccactgttgagatcaacagttcaggctgttactccacaggtaagtgggcgggaggacgaggcccatgagacctggctggtgtttctgccattctgtgacatcttctcaaggcaatagtgccgaggatgggctcagagttcgaccgcgcaggtcagagctgaggctgcaggagacggtcctggggtcaaggtccaggtggggcctcctgtgccctcgggaatctgaatagcctggcaggtgtgaggatgggtgtgggcaggtctgttgctggttctggaggtggtggtggctggagtcaggcccagggggctggtggtgctggagctggcaggatgctggctgagcatggcgtcttcctgtgcagtgtgtgtggagctggaccttcagaacctggccgtcaacaccattctccagtctcaccatgtcaacgacatggagggggccgacagcatggggatcagcttcgacgtgatccagcaggcctccctggaggacatgatcacgggtggtcaggctgccagtgccccggccagctacgatgagacagccctgtgctctaacaccttcaggtgccaccctctctgggaaggagtgttactaatagaagggtcttatcctttgcccttaatttggaaagctaaggtctaagacagggtccattgggcttcccttagtcttaatggcagagccagagaccactgtgtggcgagttttccatagtctattgtctttaccactgtgggggtccggcctggtccctggcgactgttcagtgtgctgcctctgacctccctgtggccagaggtacttcacacagagtctttctaaccagggccacttttcgatgtgaccaaaggtacatcacagggatctccagccagctctactgagtatgatgtgtgaggcatcagcacttaggtgtcaggagccgtcggtctgctgcagagggcgtggttgagggtcaggagccatcagtctgcggagagcatggttgagggcagctactcgcattacccaccagcggtggttcatgctgggcaatgcttgctgtgtaccaggaggtgggccgagcacttcgcattctgcctctgtccccacatcagcccagggacggggagcggttattgtctgtttttcagataaggaaactgaggtcagaggggctgcctttgtggtcataccacaaatgaatggaagggtaggtgctcaaaaacaagtctttgtaattccagagcctgtactcagctgtagttttaatgactccatacaaaaggggagagggagcatgccagagctgggaaatgaggcagggagaggactggtggaaagaggcagggaggcagttgggagccgggagcagggtcttggcagagagacagtagcccaggcctgaaaggtagaaggagtccaacagcagatacccaaactgccgctctggagaatgtggggtttgccaaattattgaagagtttgtgatgaaagggagttttaggaatgggacttggacctctgtaggttctcttgtaacattctgttcttgaccccattgaagttcccgcttcttcagtagggtgatgtgcagttttggaatcctttagctgaattggggttccagtaccagagcagctggcatctctgccccatgggaagtgaagggggccagacagggcgtgtacagtgcactggccaatgcctagctgtctggcctgtgaccagggccccccggaacgggaaacttgtttacactggcacacgcccttgtggcttttgtgtgacctgtgtctaggtaccacctgcctgaccattgcttcggtgtaggggcccagccttgtgttccccctagtgtcgtagggaagacccagcccagggcagcccctgcctcttcagagggaaggcacaaaatcagtcaccaccacaatagggaacaagtgcaaagatgtgttccttacagctcctgggcagggagggtgccgtgagtagggaggccatcctccatccctgggtcctgcaaggcaggactgaagagtcagacagggagggtgcccagggcagctaggcgtgtgagggaatggggtgtaggcatgtgttagttcacgggcgagcgcctgaatggtccatttaaaggaagtggcgggaaggcagggcccagcctgctaggcgggagagaggcctctaagttcttgtttctgaccagctggggccatgtgggtatggtgatgttttgttttgttttgttttgttttgttttgttttgttttgtttttgttttttgagacagtctcactctgtcacccaggctggaatgcagtggcaccatcttgggtcactgcaacctccacctcccgggttcaagcgattctcctgccttagcctcccgagtagcaggattacaggcatgcactagcccagctaatttttgtatttttaatagagacggggtttcaccatgttggccaggttggtctcaaactcttgacctcaggtgatccacctgcctcggcctcccaaagtggtgggattacaggcgtgagcctctgcatccggcctagtgtggtgttctgatgtctaggcagtggctttgctgtgtccttcctgtcagggtccccggcccgtcacacacttgctgctttgtactgtgctgccctcccgtcctgctttagaacacacagagtttgggatgcggtgaagcctgaacaagtttaaggaatgaaatgggaagaaacagatgaggcatgagggtgaagggatgaaatttggaccgtgacttaaggtggggacagtgagaaggggaggcgacagtgacggatttggacccagccgtgtagggaaaacctgtgcccatttcagttggagcgtcccgcgtggcagcagcgtgggaggctgagggtacgagggtgtcgtgcaccttctctttcaggatcctgaagagcatggtcgtgggctgggtgaaggagatcacccagtaccacaacatctatgcagacaaccaggtgatgcacttctaccgctggcttcggtcgccatcctctctgcttcatgaccctgccctgcaccgcacactccacaacatgatgaagaagctcttcctgcagtgagtgctcctcctccctgggctgtccaccgcgtcctcagctgggctggtcccttactccccagaaccagagacatggccagccagtgcctctgggataagtagtgtatttctgagtttgtggagcataacaatccaaaggatcccagagaaacacgcagctgctgctgcagcgtcgcctgcacatcctgcagagaacactaggtggcacctcctctcctgcccctttcctgcacaaagtcatgctacacattgtattgctgtgtgccttgttgttttagtgaaaatatgcctgtgtcaggagatctgtgtgaggacatgccatatgaaagaacatttagcctctctccagccttgtgccgttgttacaaatagcaaatcagtgagaggcttcatgcatgagctcatgcagatagatccgtggggtaattgctggggcgtagccctcttgcaggcctcagaggtgttgtaactcgggatgaatcctgatttgatggacttcaccagagcggccccacagaggccccttgtggacacttcttccctggccgcgcctcaccaacatggccggggattattacccaactgctgggataaaagtgcttcttggtgcagtcttaacttaggattcttacaatgaatgaagtcgaattttctcttctagtcctttgtctatttttctgtagttttggtggttcttctcttattaaatatcgaatgagttgtctccatacaaaaagttgccatttttctgtgataagaatttgctaattttttcctgtttttggttatcttttgcctttgtttgtggtggatttttgccatgcagaaatctttgctcttcattagcttctgggttctagtgtatctcggaggcttttctgcttcaggaccctcagctcttttccctcttggattttctgggtgccctctggctctccatgactgtggcgtctccaccacggactctcaacttgctccacaggctcatcgctgagttcaagcgcctggggtcatcagtcatctacgccaacttcaaccgcatcatcctctgtacaaagaagcgccgtgtggaagatgccatcgcttacgtggagtacatcaccagcaggtgcggctggctggtcctggtgacgcagcactgtggctttgagagggatgctaaaatgaccccctgaggtgccagctctcctcctgggtgggctgggaggtcgttagaagtgcaggactcaccatggtgaatctgagcagcgtgaaaagggggttaccgccacctgtgcgcggtagcagatcggaggccactcagctgtgcagcttgagttgggcaagttcaggaagtggcctgcctttgctaagaaggttccacagtgatttttgtttgtttgctttttttccccatggatattcagggcacagattcaaggtgccctgaatatatgcaccccgtaagtgttgacgttgtaagccttttcatagacgtcagtgttggcgagtggagtggtgtggttcccgggtgctcaggtgtgcacagctctcagctgtcagagcctggtgtggttttgacttcctgccttccaggccatgttcctgaggttccctcctaggccttgctgtgcttctcacacactcagcactatttaaatctaaatagaagacaaagcaacagaaaaatctccaccagcaacttttgttcaactgatagtaggaagctccctcctaggtgcgctcaccctggggatgaatgcagccctttctgagcacagaggggagttgcttgtggaggcacagagagtctgcatgggtctgatctttgcatggttacaggggtagcatctgggggcgctgcagaaaaggctgacactaaattgataataggccttatcactgagaagtaggaaggtagagcttataagactttcattcctaatcaaaccatatgcactggattaatttgaaacacaaaagcactgttgtcctcctgcagacccactgtggccccttatgtctatccaagatgagccttgatggtcagtggtcacgctgtgtgcctgggaaagctggcttgggctagaattgtatttcggagcatggctgagataatgggaaggatgtgcctctccccacgttggccatgggcagctccaggggtgccctgtacctgaggaggccggggttgctcatgtcgagaaacaggctgctattcttccttagcgcgaagagcagagttagggagaacataaagttctcctgcaggagctgcgatgtgggctactcagctgcattttgaaactgtgatttaggatgttcctccttccttcctctctttctttgtttattcttccattttttggggttttgtttgttttttaggagatggggtcttgctctgtcacccaggctggagtgcagtggtgcagtcatggctcactgcggcctcaaactctgggctcaagctatctgcccacctcagcccactgagtagatgggactagaggtgcatgccagcatgcccagccaatttttgtattttttgtagagacagggttttgccacgttgcctggggtggtcttgaactcctgaactcaggcgatcctcctgcctcagcctcccaaagtgctaggattacaggcgtgagccaccgtgcctggcctgttctttttttttttttttttttttttttttccttaaatggatctaatgtgcagaggattgggtcagcgctagggaggcttaaccgaggagtgacaaggatgacgatagcttaaaagagcttggcagtgggaagcactgtggttggttaccagcaggtgcaggtcacctaaggccgcagagcagaggcagaacaccctgtgggccatccccagcacgaggaggcacccagctctctttgtggcgccagctcccaggggcctggtgggcctccttagttttacgtttaccacatttccccaggaagcctgagggatgatgtggtctgaatgaactttcaaattcagtgttaagtaagtggagggtacagatagatacaaggggaaataaaggaaagttgagaacaaggtcgatttcactgaagcagcgtcttcaatgcttcctctgcagcatccattcaaaggagaccttccattctctgacaatttctttctctcgatgctgggaatttcttctctggatggatccatctaactatggcggaatcaaaggaaaagtttcatctcgtattcactgtggactggtaagcgagctgcagtgtggcacccgagccagctttgggggtcgcgttcattcctgcagcaagtgctgagtgctcagggccccggcgggcctggccgtgagcagcagacactgcacccgcatcctgccctcatgaacacggggagggaccatgcgcagacaagcacgtcagtgtggagtgtggcgtcagccctggtgatggcaaggcttgccgtgggcaacagggaggtggaggcccatgaggtggtgacagggaatccgagagctgatgaagtgcaccatagttgtgcgagcataaggcgcctccagcggatggacaccagggaggcaaagcacaagtcagtggagcagtggttgcagatgcaggcagagagctgacagagccaggcaacttgggcatggcagggcagggcctcggctttcgtggggatgggagcttctgtgtgggtgatgttggagctttcttggccccatgtggataacccaccattggagggcacaggcaggtaaagccggttagtgcctgtgtcagggagatgctgggcagcgaggttggtgagaagggcctgggtgggctttgaagtggagccaaggggccagcggatcggatgtgtgtaaatgcccaggtgcgggccaggctgtgggtgagtggaggtggctgtcgggagcagtctggggaaggggtcacgtctggctggggctcatggtgtttgcaaggttgagacgtgggtggtcagctggtgcaggagtggccagagagtggctgggtgggttgagaggaggcctgtgtcctccacaggggccctcatagtggactgagaggaagctgtgggtaccagagccaggggctcagatgtcagagggaaagccctttgtaaggacgcagacgcttctgggagctggcaggatgaagccaagactgcccaggacacctggatgggagcgattctggttggagttgggggataaaccctgattgaagggattcagaacaaagtgggagggtagaaactcaggcagtgtagaccgctctgaggaggggatcagcgtgtggtcagggcaggtggcagtgggtgtcggtgtctacacagacgtggatggtgccgtggcacgaacacaggctgcgcgggaggctgggtctgtgatggggtcgtgccgtcccaggagattcatggactcagaggagagaacagtcaccgggaagctctggctggttctttcgtccttggggggtgggagttcaacaattaaagtgaactctggaagagcagagtgaagctcacagtcccaggtcacgagcacttctgtgtgccaggcgcttcccacaaagcactttgtactgggagccaccctgggggattcacgcaggctccaggggatgccttgactgcgaggaaggcctctggtcaaacggggcagatggacccaggttggaggagccttcgctgtggcatcctacccctctaccaggccgcgatggtgcaaacacagccgcgttgtctcatgtgttacagcaagactcccagaaagcagggggagcagaggatgagcaggaaaatgaggacgatgaggaggaaagagatggggaggaggaggaagaggcggaggaatccaacgtggaggatttactggaaaacaactggaacattttgcagtttttgccacaggcagcctcctgccagaactacttcctcatgattgtttcaggtaagcccagagcccagggctgcgcagcccccactgaagggactcatggttagtagatgtggctcctgtgccatggtatcgcaagaagggagacagggaaaatcagatcgggcggagcctgcccagcagttgggactttgtgagccgaggggcctcctctccaggctccaggcatgttccactggagggcccggagaggggtgactgtcttccctccagcctttgctctcaggaaactccatggggagcggctgcccctggccgtgtcattgaggagtttcctagctctgctcccgccatctgattcggtaactcagtcacatacattcccagggaacatttgtgtgtgtgcacgttcagtagctgaagataaagccctgggtcaggtcagctgccccctggctggtctgtgaggcctaactttctggtgggggagttcctatgccttggtttgggtctgcaggcttagagtttgcaaatcaagctatgcaggttagtgtgcagatgaagtgtatcgaggaagcactgtttgtagttgacagccctaagttaaagaatgccctaagtaaaaacagcaggttgtgatgtgcacacacaggtggatgcggtcacagaggccttcgttgatgatcattttatatttttgtctacttgtccttgagtctttaactttctcagttctctcttgcaactttctatgtctcttttgaaaagttccgggttggccgggcgcagtggctcatgcctgtaatcccagcactttagggggctgaggcgggtggatcacgtgaggtcaagagtttgagaccagcctggccaacatggtgaaaccccatctctactaaaaatacaaaaagtagccaggtgtggtgcgcacacctttaataccagctactcaggaagctgaggcaggagaatcacttgaacccaggaggcggaggttgcagtgagctgagattgcgccattgcactacagtctgggcaacaagaatgaaactgtgtctcaaaaaaaaaaaaaaaaaagggtaagtgccaggtgacaggcccggagtagtttttggagaagcttgctgatgccaggggccctgcctttgcttgtgttgggagctgtctttcacgcgctacccagtgagaggcttagtgtacatggccccatttatacagttttctctctgacaatgaactcaggtgtcagcgagtgttccttctcatttccacttctcacttctctaatttacttttagctcatctaaaggctgcagataaaattattaacaatgacattttagcctcatctgtgaggcaatctgaccagccatgggtcccctcagattctagggtgtttgcagcagcccgactcagggcctgtggtgtgtgtgcctctccacagcgtacatcgtggccgtgtaccactgcatgaaggacgggctgaggcgcagtgctccagggagcacccccgtgaggaggaggggggccagccagctctcccaggaggccgagggggcggtcggagcccttcccggtgagcagtcttttgtcttttgaggccactgccatgtgccagtgacctaactcctctgtgtgccatgggtggtccccggtgccagtcccccaggtgggaggtccccagtgccagacaggtcccagacccctccctcagcatccttatacttccaggaatgatcaccttctctcaggattatgtcgcaaatgagctcactcagagcttcttcaccatcactcagaagattcagaagaaagtcacaggctctcggaactccactgagctctcagagatgtttcctgtcctccccggttcccacttgctgctcaataaccctgccctggagttcatcaaatacgtgtgcaaggtgagagtgccagcgtgcgtgtgaggagaggacactaacgtacatgtgtaaggcgagaatgttactgtgtgcaaggtgaggctgtaatgcgtgcaccatgaacgtgctagcgtatgtgtgcaagataaggacaccgacatacctgtgcatggtaaggatgttaatgaatgcaggatgaggctttcagctgtgcaagggggaggtacctacatgtgtagggtcagggtgccagcgtgtgcaaggtgaggagcaggtgtaagttacttgttcattccaccaacatttatcatgtccctgtcacatgcagccacagttgcggcatctgtgctcaggtgtgagcaagacaggaaaggtcctgccttgtggggcctgtctgctgccagccgacccgagaagggagagggccgttcagaggcgcaggtgctgtggggatggagcctgtgaggggcgctgggaccaggtgcaggaggagggaagacgcaaaggccctggggggtgagcttggtgtgttggtgaaggcacagccgaacacccagtgccaccggctgggaggatgggtcaccggagaccagtaggctggaccaggacccagagctgatgagatgagagcttgctcggatgctgaggcctttctgggaaaggcaggctgagtccaaggagggataatattaccagataacgaccgcgggtgtcagcccttacagagcagagtgcttcactgtccatttcctcactcagccttcccagcaaactgcatctcacacacggctaaggttacgctggagatcaggtgacagcctcaaggtctggttgtggtgaagaagtgtttttagctcaccattttaattcctttattgacttttacatattttaaattcatttttattaaggtgtaatttatatacagtaaaatgtactctgtggcgtgcagttctgtgatttttcctaggtgaatggaattgcatcatcatcagcaggatacaggatagtcaccgcccgaaaacattccccgcactgccctcctcacctgacaccctttagccactggtgtgtcttccgtccctgcattttttttctcttctagagcgtcacataagtagagacattgtgcagccttttggatgtggcttcttagcaaaacacacctggaattggttcatccacgcgctcgtgtgtatcagaactccctttctgttgcgagcagtgtccattgtgtgggcaaaccacagcttgcttttcattcactggtggaaggacatttgcgttgctttcactttggggtgattaataacaaagctgctgtaaacattctgtaggtgtaggtttttgtgtgaacataaatttcaattctctgaggtcattttttaagtgtttgtttaacttgataagaaactgccaaactcttttctgaagtggctgcaccgtgtcagggtctcctcagcagtgtgtggcaagagttgctgttccacatcctcaccaggacttggtatcattgggtttttaaattgcagctattccagtaggtgtgtagtggtatcgcattgtgtttctgatttgcatttccctggcgactaatgatgtggagcttttttttggagatggagattcactctcattgcccaggctggggtgcagtggcgcgatctcagctcactgcaacctctgcctcctggttagctgggattacaggtgcctgccaccacgcccccccaattttttgtatttttagtggagacggagtttcaccatgttggccaggctggtctcgaactcctgacctcaagtgatccacctgcttcggcctcccaaagtgctgggattacaggcgtgagccaccacgcctggctgtggggcattttttaatgggcttctttgctgtcctggtgtctgtcctctttggtgaagttttaggttttatccatttgagttaatttttatacaatgtgcatgctgtagatccaagtccatatttctgcatgggatatctgattgcaggcatatcctgtcttattgtgcttcgaagcggttacctgtatttttataaatggaaggtttgtgggaatcttgtcttgagcaagtctcatctttccaacagcatgtgctcactgtgtctgtgtcacatgttggtaactctcaggatatttcagacttttccactattattatatcagccgtgataacctttgatgcttctatggcaattgttttggggcgccatgaaccgtgcgcatagaagacaatgagcttcatcaatgttgtgtgtgtcctgattgctccactcacgggccattctgccatctcgccctttctccttgggcctccccagtcccggtgacacaacactatagaaattaggtaagttaatagccctgcaatggcctctacgtgttcaagtgaaaggaagagtcacacgtctctcactttacataaagagctagaaatggctaaacttaggaaggcatgttgaaagtcgagacaggctgaaagctaggcctctcacaccagttagccaagtcaactgcaaaggaaaggttcttgaaggaaattacaagtgctcctccagtgaacacatgaaagataaagaagtgaagcatcctgttgctgatatggagaaagttgagtctggatagatcaaaccagatataacatcccctcaagccagagcctaatccagagcaaggctctcactctgttcagttccatgaaggctgagagctgaggaggctgtagaaggaaagcttgaagctggcggaggttggttcatggggtttagggagagaagccgtcccagtaacataaaagggcaaatgaggcaacaggtgcgggtggagaggctgcagcgagttctccagaagatctgtctgggatcattggcgaaggtggctacactgacaacatattttccgtgtagacaaaacagccttcttttggaagaagatgccatctaggactttcatagctagagaggaggcctcagagcctggcttcagaggaaaggctgactcttgttagcggcagatgcagctggtgactttaagtcgaagccactgctcattcagtcttttaaggccactacctgcagctcagaaaaagattccttccaaaatagtactgctcattgacagtggacctggtcacccaagagctctgatggagacgtacaaggagatgaatgttgctttcatgcctgcggacacagcatcccttctgcagcccatggatcaaggagcaatttcgactttcaacgtttattatttaaaaatatatttcatgaggctatagctgccatagatagtgattcccctgatggaactgggcacagtaaattgaaaaccttctagaaaggattcaccattctggatgccattaagaacatttgtgactcatgggagaaggggtcaaaatatcaacattaacaggagtgtggaagaagttgattctgaccctcatggatgactttgagggattcaagactattgtgggaggcgtgactgcagatgtggtggaaacagcaagggaactagaattagaagtggagcctgaagatgtgaccaagttgctgcaatctcaggacaaaatttaacagataaagagtggcttttcatggatgagcagtaaagtagttttttgttttgttttgttttgttttgttttgttttgttttgttttgagatggagcctccttgctctgtcgcccaggctggaatacagtggtgcggtcttggctcgctgcaacctccgcctcctgggttcaagtgattttcctacatcagcctcccaagtagctgggattacaggtgcccgccacaatgctcagctaatttttgtatttttaatagagacagagtttcaccatattggtcaggctggtctcaaactcctgacctcaggtgatccacccgccttggcctcccaaagtgctgggattacaggcacaagccaccacgcccagcccaaaaaagtagttttttttttaagatggagtctcgcactctcgcccaggctggagtgcagtggcgcgatcttggctcactgcaagctccctcccaggttcacgccattctcctgcctcagcctcccgagtagctgggactacaggcaagcgccaccacacctggctaattttcgtatttttagtagagacagggtttcaccatgttagccaggatggtctcgatctcctgaccttgtgatctgcccacctcggcctcccaaagtgctgggattacaggcgtgagccaccgcacctggccaaaaagtagtttcttgagatgaaagtgaacattgtggaaatgacaaaggattgagaatattccataaacttagttgccaaagcagcagcagaatttgagaggaccgactccaattttgaaagaagttctactgtgggtgaaatgttatcaaacagcatcacatgctacagagtctttcatggaaggaagagtcagttgatgcagcaaacttcattgttgtcttgttttaagaaattgccacagccaccccaactctcagcaataccaccctgatcagtcagcagccgtttacattgaggcaagaccctccaccagcaaaacgattgcgactcactgaaggctcagatgatcgttaatatttctgagcaataaaacattttaaaattaaggtacatacattgttttttagacataatgctgttatgcacttaatagactacagtatagggtaaacctaagttttgtctgggtagagtgactcacacctgtaatcccagcactttgggaggtcagggtgggttgactgtttgagcccagcagttcaagaccagcctgggcaacatggcaaaacccatctttacaacgattacaaacattacctgggcatggtggcgcatgcctgtcgtcccagctactgggaaggctgaggtagaaggatcaattgagccccaagaggtcaatgctgcagtgagccatgattgtgccactgcagtccattctgggtgacagagtgaaatcctgtcccaaaataaaaaaaatcacatagctttttttttttttgagatggagtctcactctgtcactcaggctggagtgcagtggtgcaatcttggctaactgcaacctccacctcctgggttcaagcgattccctgcttcagcctcccaggtagctgggatcacaggtgcacccgccaccatgcccagccaatttttgtatttttaatagaaatggggtttcactgtgttggccaggatggtcttgaactcctgacctcaggccatccacctgccttggcctaccaaagtgctgggattacaggcgtgagccaccacaaatcacgtaacttttatatgtactgagaaaacaagcgtgagccaaaaatcatgtaacttttatatgcactgagaaaccaaataatttgtgtgatttgctttattgtgatgttagtccattgaggtggtttgaaaccgaacttgccatatctccaagatacgcttgtattcaagaaccatttgttgaaaagactattctttttctatcgaatcatctttgtacctttttccataacttagtaaccttatctatgtgagtctctttctggattatgtattctttttttcgatcttgcattcaatttgctaatatctcgttgcgcatttttgtgtctgtgctcaggctgttattggtctgtagtttcttagtacggtctttggttctagtatcaggggatgctggcctcatagaatgggttgagtgctctctctcttcagtgttttgaaagatactgtgtagaatcagcagcatttcttccttaaatgtttagtaaattccccagggaagcctgtcctcaccgatggaaaactgctaatgtagagaagtcagctgaggcgtctaaagggactaaggaagggaggaaaggacaccaggaaactgtagcctaaggtccagagggttctggtccagacagagcagcagggaggccccgggagctccttcccgatgtgggctgtggtctctgcaggtgctgtccctggacaccaacatcacaaaccaggtgaataagctgaaccgagacctgcttcgcctggtggatgtcggcgagttctccgaggaggcccagttccgagacccctgccgctcctacgtgcttcctgaggtcatctgccgcagctgtaacttctgccgcgacctggacctgtgtaaagactcttccttctcagaggtgcggctgagctccagcgggcccttcactgtggagcagaacatccgagggcactgcggtgtcttgagggcttctgcagctccagctctgtgggtcacacctgctgcccctctgactcacatggattggcaacaggccccttcccaggcctccccacaccatgttcggaatgttgtcctaggaagggctcaagtgcaggtgggaggccagagtgcgtgcagctgcactcaggagactcgcccgtcaccaggcgcttctcacagccccttcctctcctgagatcctgcccatggcactgtggtctggaggctgggctggtgacctctcgcactcttgctctgcctaggatggggcggtcctgcctcagtggctctgctccaactgtcaggcgccctacgactcctctgccatcgagatgacgctggtggaagttctacagaagaagctgatggccttcaccctgcaggacctggtgagtcgtgcatgccgcctgcccgtgtgccctggagtccacaggggggtttctgtgcactcccgggagccggggtgtgtgcaggtcctgaggcacgccctggtgtcttccaaggggcctgccctgcagaccagtccatgccctgagcctgatggactgttctgtccacactggttgagcacctgccttgggtcaagagctggccttgtgggtgcttcgttctagcggaaggaggcagacactcccaagtgtgaagagaaggaaaggaggaagagggagttgcacagctcggccacaggaaggtcttgccgaggggcatctgagcagaggctgggggacgcgccaagctgccgtgtggtggtgcacggcgttcaggcctgcaggatggagggagtgagcagggcctggaggaggcctcaggactgggcatctggggtggaacatccacagcgagggtgggtgtagggaaggcgctggcaccgtgggatgaggtcgtgcattttactcataaccgagggctggctgcacacagcaggggctcgaggcttactgatgggcccacgaatgtgtctcgcgagcctgtgaagaagcagcaggcaggtctggccagcgcgggagggctggcgcccatcggggctgctccctttcaggtctgcctgaagtgccgcggggtgaaggagaccagcatgcctgtgtactgcagctgcgcgggagacttcgccctcaccatccacacccaggtgggctctccctcatctgcctcggctcagcctggcctccttggcctcctctctgagtggactggggtctcactgtgcctgtttattcctgcaggtcttcatggaacagatcggaatattccggaacattgcccagcactacggcatgtcgtacctcctggagaccctggagtggctgctgcagaagaacccacagctgggccattagccagccccgggccccgggtgcctctgcgtccgtgccaggcctcctgatgccaaggccacatccccgtgcttccagtgaccagaccactgaccaccctgactgtccaaacctgtgaccccaggccagggaacggggaggaaaccaaagaaaaccattttcagggagctcagacgtcacaggagggagcgggagcaggatgtggccctggcctcgccagagcacctgaagaagcaggccgtgagcgaggctgcgagtgccctgggcgccgtttctcacgcagtgaatgcttttccaggcctctgttgcttcctgcaccacacctggtggggtgggagcgtcctctaggtgcccctagttctttgtcctgcctcccagagggaggaaaagcccctgggggcttctggctccctgagattgggctctgagacgagacg

SEQ ID NO: 15741 - DNA, 41615 bp, Homo sapiens
tgcaagaacatggaggtgctgtatgactcgctgcagctggcccacaagtgcatcctgaactccttctatggctatgtcatgcgcaaggggtaggtgggcccgggcccgggagaggcttatgggaggaatggatgagtccacgtttagggcagcttcaggtgtaggctgctgtgcatggagggccgttcatctgattcaaggaatgttggagggagaaggctttgggctggggtggggctgggaggttgaagagagtgggggccacgctgactttgagggtctgggtgtccatgagtgatgcgtgctgtggggtgtatgtgtctctgcatcatgggctggagacacgacttgccattttccagcgcgttcatgtctcccagcgtggatcctcactcagggacttgcagagtgtcgggcagttgcttcacagcatgtctgcgtgtccgggaggggcagagaagcaactgacaaggggcatggggctggtgccgggaggggagggtgggacagctgacagcagggctgggacccaggctggaggagggttgggcctggcagctaggcctgggctttctctgagaagctggaggtgagaatggggcttgggaggaggtgtgaagagagtagagaaggcgtgaatgggtctgggtggtattaagagtcctgctgaggctggagtcctgaacggctggacgcagtggcacatactgcacccttccagatccttcctgggcaccaaggtggggacagagaggtgtcctcgggcagagccagattccaccttagttctgtcctggtgcacgcacatttggctgcttcccttgtccctgtcgcatctctcctttcctcctccctactcctcactgcctctgataccccctggaggagccatgccagccccacccaccagtttgtggtgtcctctcagggctcgctggtactccatggagatggctggcatcgtctgcttcacaggggccaacatcatcacccaggcacgggagctgatcgagcagattgggtgagtgcagaaggggagccgtggggctgggagcaggtcctgggggcaagcatgggcaggaaggaaggagggaaggctggaggccacacactgggcaggaaggaaggagggaaggctggaggccacacactgggcaggaaggaaggagggaaggctggaggccacacactgggtgaaaaggaaaggggaactcacgaccttgctcctctctttctctgaaggaggcccttagagctggacacagatggtatatggtgcgtcctgcccaacagcttcccagaaaattttgtcttcaagacgaccaatgtgaagaagcccaaagtgaccatctcctacccaggcgccatgttgaacatcatggtcaaggtgagtctggggcctctggtcctgaagctctggctggcctggcgtcagtgccctgatgtcactggctctgcagcacctcacagtgtgcatgccttcctggcacccagcactgctcacattgcttttctatagcctgaagaccatggtcagaggtatcaagtgattccactcctttctctttcagcatagctcccagaattttttgcttttaactttttattttgaaataattttaaacttacaggaaattacaaaaatagtacagagaatttctgtatccccttcaacctgccttcccctaatgctgacctcgcataaaccatggtgcgcttgtcaaaactaagaaacctatgtctgtgccccagtaactgcactgcaggcctcacctggatttcccatttcccaccatagcccctcttctctcccaggatcccagcaaggacccacgtggcgccgagttgtcctgtcccggtctgtcctcgtgtcacgacctccccctctggtggtgccggccaggcgatggttggctgtcccttgatcaggggttgtctgttgtttctcgtgactagactgaggtgatttgggtttttggaggagctccacaggtgcgacaccctccccacgttctcacacgcatcgtgttggtttgtggtggtgtgggagtgtgggtgtgttgtggggacggcttagtctcctgcctgaggggcttctgcaggccttactgtggcgctcctgtgccccctcccatacggctcttcagtcgtaaatacacacccagtggggaggatataagcgtccctggaggagggctgtcagagtttctggacctgtattagagccatcacagcagcaaatagatatcgtggagcaggtgcttcgagacagtgtatccacagctgctccataagcttctgcccactgtgttagcgttgctgatgggctgtgtttgctggtgggccgcacctgcagcagttacgcctgaggtttcctgtcgtggtttttctctggcgattgtctgtttccttcattccttctactgtatcaattgggatcctgtagggaagcgttgctatccttctcttccatttgttctcgtttatttgtctgcttattgacatcagtgtggatttgcggatcagagtggacatcccagggttattgttcataggaccggagtggcttcctgctccacgtgttccccttgggccactggggcctcctagtttgtggcgtgttcttgggacacgccctcttctggtctttgtttctggagcactttcctacttcttggtactgtaaggtccaccagcctcatcttgtattttccctgctccaacctggagtcagccagttctccgagaagaatgatgtaaaaacccgagatggggtgcttgctgtgctcactgttcctgggagtgtcatagcttccagtctctcatagtggaggcagccaggaagtatgtctctagtaacgcacgcacacagaactgtttatttctgtgtctgtctgtctgcatggatgcatttaaacacatgagtctgcccctttcttattagtgacttctttctccttcagtgataaacctgtttcgaatttctcaatatatgtgtttgttcaatcctagagtccatgtaaagtagttttagaattgctaacagacttgtgtcccatgagaaataatttcaccagccactgtacagcatttgtagatagttacttttgttttcagccttaccctgtccagtcagcagagttcacgggcagctccttcctccccaccctgttggcatgttctgctgtatgtccacagtgctgttgggctcatttggcccagtctgcacccctcttgggatcccagcaccatggctggatggcttgtaatttgcacacagtgacgttcactctgtagcgtacagccctgtgggtttggacaagtgcatagtgtgtgtgtccagcaccacgaagcaacacaaaacagctgcaacccctttgtcagcaaatcctctccctaccccgaaaccctggcaacccacaatgtgttttttgtactataattttgctttgtcgaaaatgtcatgtaaagggaagcatacggcctgtagcattttgggtctggcttcttggacctaacagatacacctgagtttcaccacttggttgcatgcatcagaacttccttccttcctgctgccaagtcgtgttagttatgtggaaaagcctcggtttgtcaatccatccactcctggagggacaccaggtggtttccaggtttgggccatcatgagtgaagctgccccctcttcactcttgtttctcaggaaggcttcaccaatgaccagtaccaggagctggctgagccgtcctcactcacctacgtcacccgctcagagaacagcatcttttttgaggttgatgggccctaccttgccatgattcttccagcctccaaggaagaaggcaagaaattgaagaagaggtgggactctcatagcttttgtgctttagaaaggacatggattgagatagattaaatttagcccagaaaggaggttggatcaggagccaggatagaaacagacctgggttcttgtgatcttactgattccgtttgcaccagctctgtctgcccgcctgctgtattctggctctgtggctgcaggcccttcagccattttccttttagagaagcagtggcctaagggagagagacgtttgctgcctcgtggatgacaggtggagggttggaaagggaagaggcgggcagagaggatgaggcacagctggtggctccccagcgctccttgccactgctgtgcttgccttttttttttttttcaggtatgctgtgttcaatgaagacggttctctggctgagctcaagggctttgaggtcaaacgccgcggggaactgcagctgattaagatcttccaatcctcggtgtttgaggccttcctcaagggcagcacgctggaagaggtgtatggctctgtagccaaggtggctgactactggctggacgtgctgtacagcaaggtaaaggcctaccctccaccctcacctgctctgagggatgaaggatgaagcaagaaggggaccccgtgcttcctgggctcctggagaccaaggtgaccgaagaacacagggccagtcctaatgaaatcccaagacctcctgagcacaattacccccttggagttcccctcaacttctgcatccagggacacaactctgagggaaacgtttttctaaatagcgtgataagcctggcatggtgatgcgtgcctgtggtcccagctacttgggaggatcacttgagaccaggaagtagaggccacagtgagccgtgactgcaccactgcactccagcctgggatatttgtttatttctatgttactttgtattttttatatttttcaggctacataacattttgacagtttacataccttaatttacgtaactagcccacgattatttactaccagataggtttcacatttccattgttatcaatggtgttgcattgaacgagatatctcggtgcatatgtttcccaggcacaggcgtcttgggtagaaggaatactggaacactctgcagtgctttcctggcttgctttgctgtgtgggcttctgtttcttggcatattgtcttgtatagagtgaaacacacgagcaagggagcaccagggtatcacacagaatattcatgagcccagcactccttacaggatgtggggggcctgtggtcaggaacatgtgtgcaaagcacagctccagctggatgtgggtgccacactggaactgctcaggcctccactgctcaggccactctccagccggccggagtttctctttcctctcttctggctcttcctgccccttctttctcttcctttcaaggagaaaaacttcctgtcttaggccgagcaacatccttttctgcagccttggtgctcttcagtaaattcttcttgatattttgtgcacagtttaataaaataaaagccaagccaggcgtggtggctcacgcctgtaatcccagcacttgggaggcctcggcgggcagaccacttgaggtcaggagttggaaaccagcctggccaacatggcaaaaccctttctctactaaaaatacaaaaattagctggatgtgatggcatgtgcctgtaatctcagctacttgggaggctgaggcacgagaatctcttgaacccaggaggggaggttttagtgagttgagattgcaccactgcactccagcctgggtgacagaatgagactctgtctcaaaaaaaatataaaagctaaagttttgtgtgtgtgtgtatgttttaaagtattgccacacaggcatattagagagctcttgaaattgcagccttctgcgtctcaggctagagaagggcatggcctagaggagcacagtccagggtgagctcagactctgccccttgatttctgcagtgttttacccattgtctttctctaggcagccaacatgcctgactctgagctattcgagctcatctctgagaaccgttccatgtctcggaagctggaagattacggggagcagaagtctacgtccatcagcacagcaaagcgcctggccgagttcctgggagaccagatggtcaaggatgcagggctgagttgccgctacatcatctcccgcaagcccgagggctcccctgtcacggagaggtgagggctccccccatcacggagaggtgagggctcctcccatcacggacaggtgagggctccctccgtcacggagaggtgagggctcccctcatcacagagaggtgagggctgccctgtcacggagaggtaaggggttccttacagatttgggctgtgtttaacaccaagtttggggatggcataagtgtccatcaaccagaaatggataattgccattttgtagggaatgagatacactataccagagttcaaagggttgaattgcagctacaggttacaacactgacagtttgaaaccactttggagaaaaaagcaaaaatcaggttgaaggaagacccttatgcctccgtgtatgtaaaacttaaaaacatggaaactgctctttttttttttttttttttttttttttggtggttatatacaaataggaccagtacaaatgcctgcatggggttgatgaacaccagaataagggttgtctttacttctgtgtgaggagggaataggttggggtcacacagggcttcactctaatcgtctcacaaaggaagtcagagtggccaagtgttgaagcttgatggagccgagtggatcatagtgtgcgtgtcttctttaggtctccttatgtttgcagtattcaccacagatgtttcctccagtgaaagggaagcactgacggttgccagttgctttgctagtgacatgaaaacaggctcgttttttctagaaagcagcctgagtcttctgtgtgttactcagcaaggaacatgtagacatggttatgaacgtgcacgtttgcctgtatgcatgcacgtggttactcagaaacgcagacatgtttacgcacacacgcatgtctttgcctatacgcatgcgcgtggttactcagaaacgtagacatgtttacgcacgcatgcgtttatgtatgtgcatgcacatggttatgccgtgagaaacatgtagacatagttacgaacatgcacgtgtttgcctgtacgcatgcacgtggttactcaatgagaaacgcagacatgtctacgcacacgcatgtgtttatgtatatgcatgcccatggttacgctgtgaggaacatgtagacatgtttacgtgcacacacgcacgtgtttacacatacgcacgtgttactccccgaggaacctgtaggcatgtttgtgcatacatatgcacgcagatgtatacattgatgtttgtgaacagctgttacacgtccttatttccatgttcatttgataagagttaggatcagattttgggtgattttcactgttactgagctgtgtgcctgtcttccttacccagggccatcccacttgccattttccaagcagagcccacggtgaggaagcactttctccggaaatggctcaagagctcttcccttcaagactttgatattcgagcagtgagtgccagttgcgttctctactcttaaaagtttacaaggaaagctagacagagcagaatatgtctgagttggattatgttttttgtctggcgtcttcactcttgacttcctcctttctgataagtaataggtgagcacctaataaccttttagggcaaaactgaaaacatgaagtgcctggggccctttagctgttctattggatggactaaggccaggggtgttggctcagccacctactagctctgtgatctagaggagtcagtgaagctccctgccttggtgtcctctgttgtgcaatgggcacctttcatcatagagtttctgagaggattaaataagacacagtggttagccctgtgctcagcatgaagtgagccccactcttggctgctgccacctgctgttctctgtgcccgtttcctgcacatgcagattctggattgggactactacattgagcggctgggaagcgccatccagaagatcatcaccatccctgcggccctgcagcaggtaagggcggggtcagtggcacgggctgtggggctaaaaactgtgcagttagacaagggtctctctctgatgggtgttggcctcacacaggtaaagaacccagtgccacgtgtcaaacaccccgactggctgcacaaaaaactgctggagaagaatgatgtctacaagcagaagaagatcagtgagctcttcaccctggagggcaggagacaggtgacggtggggccccaaggctgggctgggcgggatccttgtgacacacaggactccaggcttcttgcgctgctgtgtgtgctgtagtgaagcttctgttcaagcatcgaaaatggactttttctgaaaatgtgcccattggcactttactctctaactctgagtgtcactcttttgttaataggacaccattgtgaggctgaggtgagggcaaggaactgtctccttatgtgaaaatattagggtgcactacttagactcagtgccttgggcaaatcactgtctcttgaagccccagttttctgaatgtgaaatgaatatcttccctatggaaacacttagaaacacaggacacagtgtaataaaaggtacagtgaaagtcagaagagcaaaaggaaaattcttaaatgctgaaaattaaaagtaagctataaatcagagcagtatacaaactcacatgacaagaacaaggttctttgaccaggtgcggtggctcacacctgtaatcccagcactttgggaggcctaggtgggcagaccacaaggtcaggagatggagacaatcctggctaacacagtgaaaccccatctctactaaaaatacaaaaaattagccaggcgtagtggtgggcgcctgtagtcctagctactcgggaggctgaggcaggagaacagcgtgaacccgggaggcggagcttgcagtgagccgagatcacgccactgcactcccctgggcgacagagcgagactccgtctcaaaaaaaaaaaaagaaaaaggttctgagatggattggattttaaaatttaactgtcttatttgtaagagttatatatgtattctttcccctgccccccaagacggagtcttgctctattgcccaggcaggagtgcagtggcacaatgcagcttctgcctcctgggtttggctcactgcagcttctgcctcctgggtttaagcagttctcctgcctcagcctctagtgtagctgggattataggcacacaccaccatgcctagctaatttttatttttttaatttttttctgcctcagcctctagtgtagctgggattataggcacgcaccaccatgcctagctaatttttatttttttaattttttttttaaatttttagtagagacggggtttcaccatgttggccaggctggtctcaaactcctgacctcaggtgaatgcacccgccttggcctcgcaaagtgctggaaatacagcactgcgcccagtggcttatgggccagtataacaatttcaagagttatattgaaaagataggacgcaggaaaagcaaaaggagtaaaaaatacgtataccaggtaaatgttaaccaaaagaaagctgatgtggctgtattaataccagacaaaatactctttaggccaaaagtattaggaaacataaggactattgttacataatactgaaagtcacaattctctggaaatatatactaattgtaacaatgtagcctcacattaaataatgtaaacatttacctaattataagaagaatttacctccaatcagtttgggagatgttaacatccctccctcaattgatagttggagcagaccaaaaatcagcaaaaatatgtttggaatgacacaatcaactaactagatttagtcactagctataatacatttagtgaacaaatgtagtcttgcactaaaattagagaatacctatccttttcaagaatacataaaataatgaccatatatataccacagagtaagctgcaaccaattctagataacttaaatacagaccatgtttggaaatttaagaaaaaaaaaacacatttataacttgtggatcaaaaaagtcatagaacttagacaatacttggaactgaatgtaaatacaaatgctattaaaatttgtagtatgcagttaaacaggacttgtatacgcatttatatatctaaatgcatgtattagtaaagaaaaacaaatagaaaattaagtttccaactgaaaaagttagagaacaacagatccatcagaggaagtagacagaagttataaagagttataaaggtaaccaggcatggtggtgcacacctatagtcctagctactcggaaggctgagaggcaggaggattgcttgagcccaggaatttgaggttgtagtgggctatgatggcacctgtgaataggcacttcaccccagcctgggcaacacagggagaacccaactcaagaaagaaaagaaagaggttacaaaattgagccagaatgagtgaaacaaacaatacaaccaaaatgttgttctttgaaaagacttaggaaaatagtcacatctttttcttttcttttgagacagggtctcattgtgtcacccaggctggagtacagtggcgcagtcatggctcactgcagccttgacctcccaggctcaattgatccacctgcctcagcctcctgcatagctgggactataggcgcacaccaccacatccagctaatttttgtaattttttgtagagacaaggttttgtcatgttgtcctggctggtcacatctttttcaggacagagttttttattttaatgaaaacagacatcattatagatatagtaaagcctaaaaaaatggaaggattcccattttctgctaaacagttggaaaacatagatggaacggacagtatcctcaagttatgcactgacctaagaagtaataaaaacctgaatagaactttaaccattacagaaattgacacttaaaaagaaacaggccaggcgcagtggctcacacctgtaatcccagctctcagggaggcagaggcgggaggatagcttgagcccaggagttcgagacctgcctgggcaatatagcgagaccccgttctccacaaaaagaaaaaaaaaagagacgaaaaaaaataagtgtaaaagaaacatcaaacccaaatgatttttaagagaaaaaggaaaaaaaaaacccttagctcatttggtaaccttggcaatccttgttactttggtaacataattgaaaacaggaaaggaaagttacgggccatgaacaatagatgaaaaaatatcaacatacatgaacaataacaatatgaccaactaggacttatgctgggaatagcaagcactgtttaattttagaatttgccaggttagtttttcttgggagaaatccactaattcatcattaaaggagaaggctcgtaagatcatctccaatagatgcagaaacaacatgcggtaaaactttaacatctgctcatgttaaagtttgaacaatcaaaatcagaatagatgagatgtttcttaacctgataaagtgttcttgaaacctaacagcagacctcatacttaaccacaaaacactggaagcattgaagtaaggagtaagaaatggatgcctgttaaccactgcttctgttcaaaacagtttggagatcctagccagcataattaaaccagaaaaagaattaaggattgaaaagggagacatcaacttattatttacaggcgatgtaatttgttaacagaaaatgtaaggaaacctagattttgtgttaacttatatgtatttcagcaacaattagataccaaggtaagatataaaagtctattgctttcatttatactagaaacaaaatattttttgaaagataccatttacaatagcaataaataatgtactaaggaataaattcatggtaacaatgtgtgtaagacttttacagaaaaaattacacaacttttttctttttgagacatggtcttcctttgtcacccaggctagagtgcggtggcaagatcatggctccctacagcctagaactcttaatctcacgttatcctcccacctcagcctcctgagtagctgagactgcaagtgtgcaccaccacacctggctatgtattttttgtagaggctgggtctcactgttgcccaggctgatcttaaactcttgggctcaagtgatcctcctgcctgggccccccccaaagcactgggattacaggtgtgagccaccatgcctggcctatacacaactttattgaacatataaaaatttacctaagtaacaaaaagaggtaccatctttacagatgaaaggactcagtattaaaatatggcagtttgccccatattaattcataaaattcagtgtaattccaataaaaaagaatctgccaaaagctttttggatagaacttgacagacgaatcctaaaattcatataaagggtaaggataagaataaccaaagaattttgaagaataaggagggcacgttgatcttactatgtaacgagacacactatcatggcatcttgacaagatgagaggagagcagtagagccgattgggagcctagaaacagactcccctgttagtcggaagttggtaggtcacagatcgttaaggagagagtggactgcagtgagtgatgctggtgaaaatggtttttcatatttggagaagtaagttgttgtatcacactgagtgtgaaactaaggctgagtgtgatggctcatgcctgtaattgcagtgctttgggagtccaaggaaggaggatcagttgagcccagaagttccagacgagcctgggcaacatagggaggtctcgtctctacaaaaaaaatccggcacaacattaggcatggttgtgcatgcctgtagtcccagctacttgggaggctgaggtgggaggatcacttgagcctgggaggttgaggctgcggtgagccaagatgaccactgcactccagcctaggtgacagagcgagacccctgtgtctttaaaaaaaaaaaaaaaaaaaaaaaggaaactacaatctttggtaaacaactcaggagactatgatgctggggtgggaagggcttttttaaggcacatgtgaaaaacatcacaaagggaaagaatgatcaattaattaaaagttaaatcttgtgtagtctgtgacaagaaaggcagaatgttgataattgttgacactggtgataagaacatgggagctcattactgtgctttcgtgtatgtttgaaaactttcctgataggaagtcaacacacacaaacttacatgtagcacagaagtcaccatgaaacaaaggcctgagtcacattttgaagatgtttagaatgtataaaagttagaaatggctcataaacgtgttagctatctattgctgcatagcaagtaaccccaaaacttagcaacttaaatgcactcgtgtatccgagggctccactggagaaggagccacttccgagctccctcccatggggatggcaggactcggttcctccttggcctttgtctggacgttatccttagtcccctgctccatggggctcttcacaggacagctcacagcatggcactggacttttgagagagtgccagccaggcagaagccacagtgttttatagctgctctcaggagtggcattccatgacttttgctggaatctgttcattacgggcaagtcaccgggtcccacccccactcagggaaggagtcacacagggtgtgaacaccaggaagtgggggtcgttgggccattttgggagctgcctgcacagggccaagatgttcagccttactgttgatgaggtaaatgcagcatgatgtatttagatagcaggtcacactgaaggcaagtaagtgtggtggcatcaagtagcaagattgtgggaagtaggaaatccctggtgctagaggtggaggtggttgttctccgggaccaggcaacacatacagagatggtcattgagtcacagtttgtagttttgaaaaagtaggcgcttgtcattcttcatttgcaaagtcatgggtaggtaggctgatgtgtttatatgataaatcatttcacatcagttacaatgaacgaaccatatgtgcatgtttcacccggtgtcagtctcaaaaatacatggctgaataaagaaacaagttgcagggacaggcatgtggctcacgcctgtaatctcaacactttggaaggctgaggtgggtggatcacttgaggtcaggagttcgagaccagcctggccaacatggtgaaaccccatctttactaaaaatacaacaaaaaattagccgggcttggtggcaggtgcctgtaatcctagcttcttgggaggctgaggcagaattgcttgaacccaggaggcgaggttgcagtgagatgagatcgtgccattgcgctccagcctggacaacagagtgagattctgtctcaaaaaaaaaaaaaaaaaaaaaggaaacaagttgcagtcagatgtgtcccacatgttactatttaggttaaaacttacagctgtggcatgtgtctgtggacatgtggtaaaaatttaaaggtgtgtgggggcagacagaagagggctgtacccattatttgcaatattttctttcttacaaaaagcattctggagcaaacatggcaaaatgcaaagatttacttattggtggtattgagtgacgttttatttttcggtttgatcttttcactttttttttgaaagagggtctcaccctctcgcccaggctggaatgcagtggcgcaaccttggctcactgcaacccctacctcctaggctcaagtgatccttccacctcagcctcccaagtagctgggaccacaggcccacacaaccacacccagctaatttttctattttttgtagagacggagtttcaccatgttggccaggctagtctcaaactcctgggctcaagtgatccgcccacctcagcctctcaaagtgctgggatgacaggcgtgagccaccacacccggccttcactattaaaggttcaataaacttgtgtaaacgaacatcccatttcaggtgatatacttatactagatttcgagaagtagaatttgtggggatgagatcctgagatttttgtttgcttgtttttatgaggcaaggtctcacttgcccaggctggagttcagtggtgtgatcatagttcgccgcagcctccaactcctgggttcaagtgatcctcctgcctcagcctaccaagtagcttgggactacaggcgcactaccacgcctggctaatttgtaatatattttgtagagacagggtcttgctgttacccaggctggtctcaaactcctggccccaagcaattctcctgtcttggcctcccaaagtgctggcattccaggcatgagccaccctgcgcagcccgagatcctgagatttaaggcttcactgggtctttccaggtcacgatggccgaggcctcagaagacagtccgaggccaagtgctcctgacatggaggacttcggcctcgtaaagctgcctcacccagcagcccctgtcactgtgaagaggaagcgagttctttgggagagccaggaggagtcccaggacctcacgccgactgtgccctggcaggaaatcttggggcagcctcccgccctgggaaccagccaggtaaggcacacagctgtgatactgtctgtctctgaggggtctgcacagcccagggagcccgagatgcgtcctgacccctagggaggctgcttgtgagaaagtcatggcgggcattcccatctcaccacttgcacactggctgtgctcaccatccatcccaggaggaatggcttgtctggctccggttccacaagaagaagtggcagctgcaggcccggcagcgcctcgcccgcaggaagaggcagcgtctggagtcggcagagggtgtgctcaggcccggggccatccgggatggtcctgccacggggctggggagcttcttgcgaagaactgcccgcagcatcctggaccttccgtggcagattgtgcaggtatagaccttgatccaaggggagggcagtggctctgctgatggcccagggagggggtgtccagctgggccctgaggtctgggatgggagggttagagtgggcctggagtttcctgcccatcgtagggaggcctaaggccctgtgctgggagctgcaagctacctggaaggtggccccgtctgtgggttccagtgtgtcctgtgatgtgctgtatgtccgtgtggcctttcagatcagcgagaccagccaggccggcctgttcaggctgtgggcgctcgttggcagtgacttgcactgcatcaggctgagcatcccccgtgtgttctacgtgaaccagcgagtcgctaaagcggaggagggtgcttcgtatcgcaaggtagggaggagctggtgctgcctctgcagtcatctgggcagcctgaggtggctttcccatgatctagcctggcctccagcctccatctcctcagtaccttatggggatgttctaggaattcctcaaaacaacgtgtgtgagcgctgagcaccgagcctggggcagagcgagtgccgggaatggagctgctggtgtccttgtcacgatgagcttgtctgcccgcgaggtccatgttgcggggacaaaccaagtggcattggttagagattgtgaactctgtctccgtaggctctttggttgttaacagctttattgggatgtaaagttacgccatccaactcacccatttaaagtgcagaattcaatgacttttagtggcatgactattgccagtcaatagtgacattttctttttttttcttttttttaattttactttgatttctgggatccatgtgcagaaagtgcaggtttgttacataagtaagcacatgccatggtggtttgctgcacccatcaccccgtcacctgggcattaggccccacatgcattagctgtttatcctgatattccccctcccctcacccccccattcggatattttcatcactccaaaaagaaacctggcatcccttacctgtcaccatcctcccccagccctcagtagccactgatccacttcctgtctctgggtttgcctgtttgggcatttgatgtaaatggaaccctacagtaggtgggtctttgtgctgggcttcttccacctgcagaaactgcgagggttttcatgtggccatgagtgcgctgaggctcttagatggcatctccacccgaactccccgttgttaatgtgtcggctcagcacatttcttgactggatgctgtgaatcacgtaagaagtgacacgtagttggggagatgaggtgtgcatatttgtacctacacaaggaggttttctggagaaggtgaaactcgattccagccaggtgattcagtagaatgtgcatatagaaagtagacgcagagccaggtgtggtggttcacacctgtaatccccgcactttgggagaccgaggtgggcggataacaagaggaaagcggacgcagaggcatcgagaccacagagaacaggtgggactgtggggtttctacaccttcctttcgatgcgtggtgctgtggtgctgtggccgtgtggaagtgccctaacttttgggatgtttccctttatgactatcagctcatctcgagggaggttctggcgctgtgtgaatattctgtcctcaacgtttgactggatggtgtcagcatccatgtctcgtggggtccatggggctccaggatgatatcttcagattctgttcctctgtgtgtattagctgtttcctttataacgaagagctttgtgcagatcaggtagaaatgaactctattccttaaaaagcaagatacgagagggataatacgctttttttttttttaagcaagataaatgctttttccctttaaattatttttaattttcaaggtagggcatggcaaaatgggtttattcctttcatttttcctctctttttaaagtattactatggattagaggatttttgtttaacttttttgtttctgtttttgagaaggtctctcactccatcacccaggctggagtgcagtggcatgatcttgcctcactgcagccttgtactcttgggctcaagcaatcctcctgcctcagtgtttaatgttttaacatcaaccgtagccaaatcccgcccaacacacacacgttaggtatgttaaggtacacggtaggccctcactttatgttgttgataggtccttagaaactgcaattttaagtgaaatgactaagtaagatgatgtataatgaaacagattttttttcttctcagaaactataatgaaactgtgttggccaggcgcagtgctgcatatctgtaatcccagcaatttgggaggctgaggctggtggattgcttgagctcaggcattcgagaccagcctgggcaacgtggcaaaaccccttctctacagagtattttttaaatttatttatttttatttgtttgtttgtttgttttgagatggagtttctctcctgttgcccggctggagtccagtggcgcatctcggctcaccgcaacctccgcctcccgggttcaagaaattctcctgcctcagcctcccaagtagctgggattacaggcacgcaccaccacgcccggctaattttgtattttttagtagagatggggtttctctgtgttggttaggctggtctcgaactcctgacctcaggtaatccatccacctcggcctcccaaagtgctgggattacaggttgaaccatggcgcccggccccagaatttttttttttttttttttaaaggaagaaagaatgttgaacaaaatgatgttatttgaggacctgctatacattacttcacttaaccatcacagtttccaggaatccattgatgttaagtgaggacttactgtaatttacatatagttaagtgcagatttttaaatgtgcagttgattgggtttttggacacatgactatgcctgtgtcacccacacccccacccaggtgcagaacgtttccatcacccgggagggtgctcttgtccccctgtgcaaccttctgctggcctgatttctgtatttctgtaactgtgtgcatgtgactttctagaacttcatattaatggaaccagacagtagactctttggtggtcaatatcttcttgagactcaaattatcccaaattgggctggccagatcccttcaagctggcacctgagtccttttgacatgccctgttggtctttgaaaacttccttgctttttggccactaagagaggccaggctcaccttgaacttccagacgtggaattagctgttcctctaaagagcctgagcctcgttgagaggttatgttgagaaaccaagcttagagctcaaggggtatcatttcatctagattccttcagtgaacagccaggaaatatatacattttaaaaagtgcaattacactaattgttccagttcatatttaccagaacataatttttcatttctttgattttgtgtgtgtgtgtgtgggtgtgtgtgtgtgtcggtctaatttcatgttactggaaaaatctaaccctactggttctcttctcgcttgagaattattcagattttcctggttgttgttacgccaaataacgctttattgcaacctggacattttacatatttgagactttgggtatttttaaaaatcctttagcgtgtcaggtttttttgtttgtttgttttagcaacaaccaacacggttaattccagtgcccaagctcttccttgcctctttgtgcaaagcttccaatgtcagctcagcctccagagcctctgctgcgttgttttgggtcacctgtgcaagtgcagctcgtagtgagcctgggacttgtgctgctggttcatgcatgaagctagggtgctcctctccaggattcccccagccccccacacacgaagctagggtgccccctctccagctctcctctccaggattcccccagccctccacacagggagctagggtacccctctccagctcgcctctccagaattcccccagccctccacacagggagctagggtgccccctcttcagctctcccagaccccccaggaccccacacaggaagctagggtgcaccctctccagctctcccagaccccccaggaccccacacaggaagctagggtgccccctctccagctctcccagacccccccaggaccccacacagggagctagggtgcccctctccagctctcccagacccccccaggaccccacacaggaagctagggtgccccctctccagctttcccaggcccccccaggaccccattcacgaagctagggtgcccctctccagctctcccagacccccccaggaccccacacaggaagctagggtgcccctctccagctctcccagacccccccaggaccccacacagggagctagggtgccccctctccagctctcccagacccccccaggaccccacacagggagctagggtgcccctctccagctctcccagacccccccaggaccccacacagggagctagggtgccccctctccagctctcccagacccctccaggaccccattcacgaagctagggtgcccctctccagctctcccagagccccccaggaccccacacacacactctggctcccccaggggctctctttccgtttctctgactaggaaaatgtgatttctctcagtttttgccatctacaccctcaggttaaacccatgagagaatggaggaagatgaactgggaacctccccagatcagtgttgactgctgtattctgacagctcttgtctattctcagaggctgcaggttgcttttcaaaattgcgtccagaggccaggcatagtggctcacacctgcagttccagcgatttgggaggatcacttgagtccaggagtttgagaccagcctgggcctcatagtgagacctcctttctacaaaaaaaaaaaaaaaaaaaaaaagccatccgtggtggtgtgttccttgtcccagctactcaggaggctgaggctggaggaccacttgagcccaggagttggaggctgcagtgagctgtgatcacactgctgcactccagcctgggcaacagactaagaccctgtctgtaaaaaataaataaataacataaaaattacatccagagtttttagttgtaatcattgagagaggtggactgtggcgtggtgggtgtaccccgtcgctaggggcaccagaagtctaggactccgaatagcgtgtgctttgtgtgtgtaccacagacattaccacttacgcccagtgacgagatcatcgtcgtattctcgccaggtaaatcgggtccttcctcgctccaacatggtctacaatctctatgagtattcagtgccagaggacatgtaccaggaacacatcaacgagatcaacgctgagctgtcagcgccagacatcgagggcgtatatgagactcaggtgactccccagccaccctcgactgaactgggggaggctccagcagggtggtatggaggaaagaaacccgcccagggtgtgggctggggaacagcagcgacagtggactcgttcccacaggtgaggtgaatgtcagcagtgtgtctgccaaaagtggcctttgggcagtgggccgggcagctgcaggggcacagccacatcccgggcagaagtcacgtgggcagccagagcccccaccatccagcccttgccggcctgtctgcccgattcttccaggttccgttactgttccgggccctggtgcacctgggctgtgtgtgtgtggtcaataaacagctggtgaggcacctttcaggctgggaagcagagacctttgctcttgagcacctggagatgcgctctctggcccagttcagctacctggaaccaggtatggcctgcaccagccgcccatcatgtgcctgcctcccacacatctggggtgacggtcttgtttccttctccagggagtatccgccatatctacctgtaccaccacgcacaggcccacaaagcgctcttcgggatcttcatcccctcacagcgcagggcatccgtctttgtgctggacactgtgagtcctgggccctccatggcagcacattggctggggcagggtttggggaaggaggacatctcccagggtgcccaggccctccaggtcttgtcctcaagggcctttgcccatgagtgcttgtcgtgattgaattggcagtgccgtggcagtggtggagtctgccccagggctgcccccacttcctcctgcgcagggggaggctgacgtggcctgcgttggtctaggtgcgcagcaaccagatgcccagccttggcgccctgtactcagcagagcacggcctcctcctggagaaggtgggccctgagctcctgccaccccccaaacacaccttcgaagttcgggcagaaactgacctgaagaccatctgcagagccatccagcgattcctgctcgcctacaaggtgagagtggttggggtcttgctgtgtgagccccatcttctttgaggctgggtccacccaggtcttttcttccattttgccttgacccaggaggagcgccgggggcccacactcatcgctgttcagtccagctgggagctgaagaggctggccagtgaaattcctgtcttggaggaattcccactggtgcctatctgtgtggctgacaagatcaactatggggtcctggactggcagcgccatggagcccggcgcatgatccgtcactacctcaacctggacacctgcctgtcgcaggccttcgagatgagcaggtgagcacagtactgtcgttgtgggccagtggtccccaggcagagccggcctcggtggtctctgtgacccggcgatgtgccccggtgctgacctgtgccctggtgcaggtactttcacattcccattgggaacctaccagaggacatctccacattcggctccgacctcttctttgcccgccacctccagcgccacaaccacctgctctggctgtcccctacagcccgccctgacctgggtggaaaggaggctgatgacaactgtcttgtcatggagttcgatgaccaagccactgttgagatcaacagttcaggctgttactccacaggtaagtgggcgggaggacgaggcccatgagacctggctggtgtttctgccattctgtgacatcttctcaaggcaatagtgccgaggatgggctcagagttcgaccgcgcaggtcagagctgaggctgcaggagacggtcctggggtcaaggtccaggtggggcctcctgtgccctcgggaatctgaatagcctggcaggtgtgaggatgggtgtgggcaggtctgttgctggttctggaggtggtggtggctggagtcaggcccagggggctggtggtgctggagctggcaggatgctggctgagcatggcgtcttcctgtgcagtgtgtgtggagctggaccttcagaacctggccgtcaacaccattctccagtctcaccatgtcaacgacatggagggggccgacagcatggggatcagcttcgacgtgatccagcaggcctccctggaggacatgatcacgggtggtcaggctgccagtgccccggccagctacgatgagacagccctgtgctctaacaccttcaggtgccaccctctctgggaaggagtgttactaatagaagggtcttatcctttgcccttaatttggaaagctaaggtctaagacagggtccattgggcttcccttagtcttaatggcagagccagagaccactgtgtggcgagttttccatagtctattgtctttaccactgtgggggtccggcctggtccctggcgactgttcagtgtgctgcctctgacctccctgtggccagaggtacttcacacagagtctttctaaccagggccacttttcgatgtgaccaaaggtacatcacagggatctccagccagctctactgagtatgatgtgtgaggcatcagcacttaggtgtcaggagccgtcggtctgctgcagagggcgtggttgagggtcaggagccatcagtctgcggagagcatggttgagggcagctactcgcattacccaccagcggtggttcatgctgggcaatgcttgctgtgtaccaggaggtgggccgagcacttcgcattctgcctctgtccccacatcagcccagggacggggagcggttattgtctgtttttcagataaggaaactgaggtcagaggggctgcctttgtggtcataccacaaatgaatggaagggtaggtgctcaaaaacaagtctttgtaattccagagcctgtactcagctgtagttttaatgactccatacaaaaggggagagggagcatgccagagctgggaaatgaggcagggagaggactggtggaaagaggcagggaggcagttgggagccgggagcagggtcttggcagagagacagtagcccaggcctgaaaggtagaaggagtccaacagcagatacccaaactgccgctctggagaatgtggggtttgccaaattattgaagagtttgtgatgaaagggagttttaggaatgggacttggacctctgtaggttctcttgtaacattctgttcttgaccccattgaagttcccgcttcttcagtagggtgatgtgcagttttggaatcctttagctgaattggggttccagtaccagagcagctggcatctctgccccatgggaagtgaagggggccagacagggcgtgtacagtgcactggccaatgcctagctgtctggcctgtgaccagggccccccggaacgggaaacttgtttacactggcacacgcccttgtggcttttgtgtgacctgtgtctaggtaccacctgcctgaccattgcttcggtgtaggggcccagccttgtgttccccctagtgtcgtagggaagacccagcccagggcagcccctgcctcttcagagggaaggcacaaaatcagtcaccaccacaatagggaacaagtgcaaagatgtgttccttacagctcctgggcagggagggtgccgtgagtagggaggccatcctccatccctgggtcctgcaaggcaggactgaagagtcagacagggagggtgcccagggcagctaggcgtgtgagggaatggggtgtaggcatgtgttagttcacgggcgagcgcctgaatggtccatttaaaggaagtggcgggaaggcagggcccagcctgctaggcgggagagaggcctctaagttcttgtttctgaccagctggggccatgtgggtatggtgatgttttgttttgttttgttttgttttgttttgttttgttttgtttttgttttttgagacagtctcactctgtcacccaggctggaatgcagtggcaccatcttgggtcactgcaacctccacctcccgggttcaagcgattctcctgccttagcctcccgagtagcaggattacaggcatgcactagcccagctaatttttgtatttttaatagagacggggtttcaccatgttggccaggttggtctcaaactcttgacctcaggtgatccacctgcctcggcctcccaaagtggtgggattacaggcgtgagcctctgcatccggcctagtgtggtgttctgatgtctaggcagtggctttgctgtgtccttcctgtcagggtccccggcccgtcacacacttgctgctttgtactgtgctgccctcccgtcctgctttagaacacacagagtttgggatgcggtgaagcctgaacaagtttaaggaatgaaatgggaagaaacagatgaggcatgagggtgaagggatgaaatttggaccgtgacttaaggtggggacagtgagaaggggaggcgacagtgacggatttggacccagccgtgtagggaaaacctgtgcccatttcagttggagcgtcccgcgtggcagcagcgtgggaggctgagggtacgagggtgtcgtgcaccttctctttcaggatcctgaagagcatggtcgtgggctgggtgaaggagatcacccagtaccacaacatctatgcagacaaccaggtgatgcacttctaccgctggcttcggtcgccatcctctctgcttcatgaccctgccctgcaccgcacactccacaacatgatgaagaagctcttcctgcagtgagtgctcctcctccctgggctgtccaccgcgtcctcagctgggctggtcccttactccccagaaccagagacatggccagccagtgcctctgggataagtagtgtatttctgagtttgtggagcataacaatccaaaggatcccagagaaacacgcagctgctgctgcagcgtcgcctgcacatcctgcagagaacactaggtggcacctcctctcctgcccctttcctgcacaaagtcatgctacacattgtattgctgtgtgccttgttgttttagtgaaaatatgcctgtgtcaggagatctgtgtgaggacatgccatatgaaagaacatttagcctctctccagccttgtgccgttgttacaaatagcaaatcagtgagaggcttcatgcatgagctcatgcagatagatccgtggggtaattgctggggcgtagccctcttgcaggcctcagaggtgttgtaactcgggatgaatcctgatttgatggacttcaccagagcggccccacagaggccccttgtggacacttcttccctggccgcgcctcaccaacatggccggggattattacccaactgctgggataaaagtgcttcttggtgcagtcttaacttaggattcttacaatgaatgaagtcgaattttctcttctagtcctttgtctatttttctgtagttttggtggttcttctcttattaaatatcgaatgagttgtctccatacaaaaagttgccatttttctgtgataagaatttgctaattttttcctgtttttggttatcttttgcctttgtttgtggtggatttttgccatgcagaaatctttgctcttcattagcttctgggttctagtgtatctcggaggcttttctgcttcaggaccctcagctcttttccctcttggattttctgggtgccctctggctctccatgactgtggcgtctccaccacggactctcaacttgctccacaggctcatcgctgagttcaagcgcctggggtcatcagtcatctacgccaacttcaaccgcatcatcctctgtacaaagaagcgccgtgtggaagatgccatcgcttacgtggagtacatcaccagcaggtgcggctggctggtcctggtgacgcagcactgtggctttgagagggatgctaaaatgaccccctgaggtgccagctctcctcctgggtgggctgggaggtcgttagaagtgcaggactcaccatggtgaatctgagcagcgtgaaaagggggttaccgccacctgtgcgcggtagcagatcggaggccactcagctgtgcagcttgagttgggcaagttcaggaagtggcctgcctttgctaagaaggttccacagtgatttttgtttgtttgctttttttccccatggatattcagggcacagattcaaggtgccctgaatatatgcaccccgtaagtgttgacgttgtaagccttttcatagacgtcagtgttggcgagtggagtggtgtggttcccgggtgctcaggtgtgcacagctctcagctgtcagagcctggtgtggttttgacttcctgccttccaggccatgttcctgaggttccctcctaggccttgctgtgcttctcacacactcagcactatttaaatctaaatagaagacaaagcaacagaaaaatctccaccagcaacttttgttcaactgatagtaggaagctccctcctaggtgcgctcaccctggggatgaatgcagccctttctgagcacagaggggagttgcttgtggaggcacagagagtctgcatgggtctgatctttgcatggttacaggggtagcatctgggggcgctgcagaaaaggctgacactaaattgataataggccttatcactgagaagtaggaaggtagagcttataagactttcattcctaatcaaaccatatgcactggattaatttgaaacacaaaagcactgttgtcctcctgcagacccactgtggccccttatgtctatccaagatgagccttgatggtcagtggtcacgctgtgtgcctgggaaagctggcttgggctagaattgtatttcggagcatggctgagataatgggaaggatgtgcctctccccacgttggccatgggcagctccaggggtgccctgtacctgaggaggccggggttgctcatgtcgagaaacaggctgctattcttccttagcgcgaagagcagagttagggagaacataaagttctcctgcaggagctgcgatgtgggctactcagctgcattttgaaactgtgatttaggatgttcctccttccttcctctctttctttgtttattcttccattttttggggttttgtttgttttttaggagatggggtcttgctctgtcacccaggctggagtgcagtggtgcagtcatggctcactgcggcctcaaactctgggctcaagctatctgcccacctcagcccactgagtagatgggactagaggtgcatgccagcatgcccagccaatttttgtattttttgtagagacagggttttgccacgttgcctggggtggtcttgaactcctgaactcaggcgatcctcctgcctcagcctcccaaagtgctaggattacaggcgtgagccaccgtgcctggcctgttctttttttttttttttttttttttttttccttaaatggatctaatgtgcagaggattgggtcagcgctagggaggcttaaccgaggagtgacaaggatgacgatagcttaaaagagcttggcagtgggaagcactgtggttggttaccagcaggtgcaggtcacctaaggccgcagagcagaggcagaacaccctgtgggccatccccagcacgaggaggcacccagctctctttgtggcgccagctcccaggggcctggtgggcctccttagttttacgtttaccacatttccccaggaagcctgagggatgatgtggtctgaatgaactttcaaattcagtgttaagtaagtggagggtacagatagatacaaggggaaataaaggaaagttgagaacaaggtcgatttcactgaagcagcgtcttcaatgcttcctctgcagcatccattcaaaggagaccttccattctctgacaatttctttctctcgatgctgggaatttcttctctggatggatccatctaactatggcggaatcaaaggaaaagtttcatctcgtattcactgtggactggtaagcgagctgcagtgtggcacccgagccagctttgggggtcgcgttcattcctgcagcaagtgctgagtgctcagggccccggcgggcctggccgtgagcagcagacactgcacccgcatcctgccctcatgaacacggggagggaccatgcgcagacaagcacgtcagtgtggagtgtggcgtcagccctggtgatggcaaggcttgccgtgggcaacagggaggtggaggcccatgaggtggtgacagggaatccgagagctgatgaagtgcaccatagttgtgcgagcataaggcgcctccagcggatggacaccagggaggcaaagcacaagtcagtggagcagtggttgcagatgcaggcagagagctgacagagccaggcaacttgggcatggcagggcagggcctcggctttcgtggggatgggagcttctgtgtgggtgatgttggagctttcttggccccatgtggataacccaccattggagggcacaggcaggtaaagccggttagtgcctgtgtcagggagatgctgggcagcgaggttggtgagaagggcctgggtgggctttgaagtggagccaaggggccagcggatcggatgtgtgtaaatgcccaggtgcgggccaggctgtgggtgagtggaggtggctgtcgggagcagtctggggaaggggtcacgtctggctggggctcatggtgtttgcaaggttgagacgtgggtggtcagctggtgcaggagtggccagagagtggctgggtgggttgagaggaggcctgtgtcctccacaggggccctcatagtggactgagaggaagctgtgggtaccagagccaggggctcagatgtcagagggaaagccctttgtaaggacgcagacgcttctgggagctggcaggatgaagccaagactgcccaggacacctggatgggagcgattctggttggagttgggggataaaccctgattgaagggattcagaacaaagtgggagggtagaaactcaggcagtgtagaccgctctgaggaggggatcagcgtgtggtcagggcaggtggcagtgggtgtcggtgtctacacagacgtggatggtgccgtggcacgaacacaggctgcgcgggaggctgggtctgtgatggggtcgtgccgtcccaggagattcatggactcagaggagagaacagtcaccgggaagctctggctggttctttcgtccttggggggtgggagttcaacaattaaagtgaactctggaagagcagagtgaagctcacagtcccaggtcacgagcacttctgtgtgccaggcgcttcccacaaagcactttgtactgggagccaccctgggggattcacgcaggctccaggggatgccttgactgcgaggaaggcctctggtcaaacggggcagatggacccaggttggaggagccttcgctgtggcatcctacccctctaccaggccgcgatggtgcaaacacagccgcgttgtctcatgtgttacagcaagactcccagaaagcagggggagcagaggatgagcaggaaaatgaggacgatgaggaggaaagagatggggaggaggaggaagaggcggaggaatccaacgtggaggatttactggaaaacaactggaacattttgcagtttttgccacaggcagcctcctgccagaactacttcctcatgattgtttcaggtaagcccagagcccagggctgcgcagcccccactgaagggactcatggttagtagatgtggctcctgtgccatggtatcgcaagaagggagacagggaaaatcagatcgggcggagcctgcccagcagttgggactttgtgagccgaggggcctcctctccaggctccaggcatgttccactggagggcccggagaggggtgactgtcttccctccagcctttgctctcaggaaactccatggggagcggctgcccctggccgtgtcattgaggagtttcctagctctgctcccgccatctgattcggtaactcagtcacatacattcccagggaacatttgtgtgtgtgcacgttcagtagctgaagataaagccctgggtcaggtcagctgccccctggctggtctgtgaggcctaactttctggtgggggagttcctatgccttggtttgggtctgcaggcttagagtttgcaaatcaagctatgcaggttagtgtgcagatgaagtgtatcgaggaagcactgtttgtagttgacagccctaagttaaagaatgccctaagtaaaaacagcaggttgtgatgtgcacacacaggtggatgcggtcacagaggccttcgttgatgatcattttatatttttgtctacttgtccttgagtctttaactttctcagttctctcttgcaactttctatgtctcttttgaaaagttccgggttggccgggcgcagtggctcatgcctgtaatcccagcactttagggggctgaggcgggtggatcacgtgaggtcaagagtttgagaccagcctggccaacatggtgaaaccccatctctactaaaaatacaaaaagtagccaggtgtggtgcgcacacctttaataccagctactcaggaagctgaggcaggagaatcacttgaacccaggaggcggaggttgcagtgagctgagattgcgccattgcactacagtctgggcaacaagaatgaaactgtgtctcaaaaaaaaaaaaaaaaaagggtaagtgccaggtgacaggcccggagtagtttttggagaagcttgctgatgccaggggccctgcctttgcttgtgttgggagctgtctttcacgcgctacccagtgagaggcttagtgtacatggccccatttatacagttttctctctgacaatgaactcaggtgtcagcgagtgttccttctcatttccacttctcacttctctaatttacttttagctcatctaaaggctgcagataaaattattaacaatgacattttagcctcatctgtgaggcaatctgaccagccatgggtcccctcagattctagggtgtttgcagcagcccgactcagggcctgtggtgtgtgtgcctctccacagcgtacatcgtggccgtgtaccactgcatgaaggacgggctgaggcgcagtgctccagggagcacccccgtgaggaggaggggggccagccagctctcccaggaggccgagggggcggtcggagcccttcccggtgagcagtcttttgtcttttgaggccactgccatgtgccagtgacctaactcctctgtgtgccatgggtggtccccggtgccagtcccccaggtgggaggtccccagtgccagacaggtcccagacccctccctcagcatccttatacttccaggaatgatcaccttctctcaggattatgtcgcaaatgagctcactcagagcttcttcaccatcactcagaagattcagaagaaagtcacaggctctcggaactccactgagctctcagagatgtttcctgtcctccccggttcccacttgctgctcaataaccctgccctggagttcatcaaatacgtgtgcaaggtgagagtgccagcgtgcgtgtgaggagaggacactaacgtacatgtgtaaggcgagaatgttactgtgtgcaaggtgaggctgtaatgcgtgcaccatgaacgtgctagcgtatgtgtgcaagataaggacaccgacatacctgtgcatggtaaggatgttaatgaatgcaggatgaggctttcagctgtgcaagggggaggtacctacatgtgtagggtcagggtgccagcgtgtgcaaggtgaggagcaggtgtaagttacttgttcattccaccaacatttatcatgtccctgtcacatgcagccacagttgcggcatctgtgctcaggtgtgagcaagacaggaaaggtcctgccttgtggggcctgtctgctgccagccgacccgagaagggagagggccgttcagaggcgcaggtgctgtggggatggagcctgtgaggggcgctgggaccaggtgcaggaggagggaagacgcaaaggccctggggggtgagcttggtgtgttggtgaaggcacagccgaacacccagtgccaccggctgggaggatgggtcaccggagaccagtaggctggaccaggacccagagctgatgagatgagagcttgctcggatgctgaggcctttctgggaaaggcaggctgagtccaaggagggataatattaccagataacgaccgcgggtgtcagcccttacagagcagagtgcttcactgtccatttcctcactcagccttcccagcaaactgcatctcacacacggctaaggttacgctggagatcaggtgacagcctcaaggtctggttgtggtgaagaagtgtttttagctcaccattttaattcctttattgacttttacatattttaaattcatttttattaaggtgtaatttatatacagtaaaatgtactctgtggcgtgcagttctgtgatttttcctaggtgaatggaattgcatcatcatcagcaggatacaggatagtcaccgcccgaaaacattccccgcactgccctcctcacctgacaccctttagccactggtgtgtcttccgtccctgcattttttttctcttctagagcgtcacataagtagagacattgtgcagccttttggatgtggcttcttagcaaaacacacctggaattggttcatccacgcgctcgtgtgtatcagaactccctttctgttgcgagcagtgtccattgtgtgggcaaaccacagcttgcttttcattcactggtggaaggacatttgcgttgctttcactttggggtgattaataacaaagctgctgtaaacattctgtaggtgtaggtttttgtgtgaacataaatttcaattctctgaggtcattttttaagtgtttgtttaacttgataagaaactgccaaactcttttctgaagtggctgcaccgtgtcagggtctcctcagcagtgtgtggcaagagttgctgttccacatcctcaccaggacttggtatcattgggtttttaaattgcagctattccagtaggtgtgtagtggtatcgcattgtgtttctgatttgcatttccctggcgactaatgatgtggagcttttttttggagatggagattcactctcattgcccaggctggggtgcagtggcgcgatctcagctcactgcaacctctgcctcctggttagctgggattacaggtgcctgccaccacgcccccccaattttttgtatttttagtggagacggagtttcaccatgttggccaggctggtctcgaactcctgacctcaagtgatccacctgcttcggcctcccaaagtgctgggattacaggcgtgagccaccacgcctggctgtggggcattttttaatgggcttctttgctgtcctggtgtctgtcctctttggtgaagttttaggttttatccatttgagttaatttttatacaatgtgcatgctgtagatccaagtccatatttctgcatgggatatctgattgcaggcatatcctgtcttattgtgcttcgaagcggttacctgtatttttataaatggaaggtttgtgggaatcttgtcttgagcaagtctcatctttccaacagcatgtgctcactgtgtctgtgtcacatgttggtaactctcaggatatttcagacttttccactattattatatcagccgtgataacctttgatgcttctatggcaattgttttggggcgccatgaaccgtgcgcatagaagacaatgagcttcatcaatgttgtgtgtgtcctgattgctccactcacgggccattctgccatctcgccctttctccttgggcctccccagtcccggtgacacaacactatagaaattaggtaagttaatagccctgcaatggcctctacgtgttcaagtgaaaggaagagtcacacgtctctcactttacataaagagctagaaatggctaaacttaggaaggcatgttgaaagtcgagacaggctgaaagctaggcctctcacaccagttagccaagtcaactgcaaaggaaaggttcttgaaggaaattacaagtgctcctccagtgaacacatgaaagataaagaagtgaagcatcctgttgctgatatggagaaagttgagtctggatagatcaaaccagatataacatcccctcaagccagagcctaatccagagcaaggctctcactctgttcagttccatgaaggctgagagctgaggaggctgtagaaggaaagcttgaagctggcggaggttggttcatggggtttagggagagaagccgtcccagtaacataaaagggcaaatgaggcaacaggtgcgggtggagaggctgcagcgagttctccagaagatctgtctgggatcattggcgaaggtggctacactgacaacatattttccgtgtagacaaaacagccttcttttggaagaagatgccatctaggactttcatagctagagaggaggcctcagagcctggcttcagaggaaaggctgactcttgttagcggcagatgcagctggtgactttaagtcgaagccactgctcattcagtcttttaaggccactacctgcagctcagaaaaagattccttccaaaatagtactgctcattgacagtggacctggtcacccaagagctctgatggagacgtacaaggagatgaatgttgctttcatgcctgcggacacagcatcccttctgcagcccatggatcaaggagcaatttcgactttcaacgtttattatttaaaaatatatttcatgaggctatagctgccatagatagtgattcccctgatggaactgggcacagtaaattgaaaaccttctagaaaggattcaccattctggatgccattaagaacatttgtgactcatgggagaaggggtcaaaatatcaacattaacaggagtgtggaagaagttgattctgaccctcatggatgactttgagggattcaagactattgtgggaggcgtgactgcagatgtggtggaaacagcaagggaactagaattagaagtggagcctgaagatgtgaccaagttgctgcaatctcaggacaaaatttaacagataaagagtggcttttcatggatgagcagtaaagtagttttttgttttgttttgttttgttttgttttgttttgttttgttttgagatggagcctccttgctctgtcgcccaggctggaatacagtggtgcggtcttggctcgctgcaacctccgcctcctgggttcaagtgattttcctacatcagcctcccaagtagctgggattacaggtgcccgccacaatgctcagctaatttttgtatttttaatagagacagagtttcaccatattggtcaggctggtctcaaactcctgacctcaggtgatccacccgccttggcctcccaaagtgctgggattacaggcacaagccaccacgcccagcccaaaaaagtagttttttttttaagatggagtctcgcactctcgcccaggctggagtgcagtggcgcgatcttggctcactgcaagctccctcccaggttcacgccattctcctgcctcagcctcccgagtagctgggactacaggcaagcgccaccacacctggctaattttcgtatttttagtagagacagggtttcaccatgttagccaggatggtctcgatctcctgaccttgtgatctgcccacctcggcctcccaaagtgctgggattacaggcgtgagccaccgcacctggccaaaaagtagtttcttgagatgaaagtgaacattgtggaaatgacaaaggattgagaatattccataaacttagttgccaaagcagcagcagaatttgagaggaccgactccaattttgaaagaagttctactgtgggtgaaatgttatcaaacagcatcacatgctacagagtctttcatggaaggaagagtcagttgatgcagcaaacttcattgttgtcttgttttaagaaattgccacagccaccccaactctcagcaataccaccctgatcagtcagcagccgtttacattgaggcaagaccctccaccagcaaaacgattgcgactcactgaaggctcagatgatcgttaatatttctgagcaataaaacattttaaaattaaggtacatacattgttttttagacataatgctgttatgcacttaatagactacagtatagggtaaacctaagttttgtctgggtagagtgactcacacctgtaatcccagcactttgggaggtcagggtgggttgactgtttgagcccagcagttcaagaccagcctgggcaacatggcaaaacccatctttacaacgattacaaacattacctgggcatggtggcgcatgcctgtcgtcccagctactgggaaggctgaggtagaaggatcaattgagccccaagaggtcaatgctgcagtgagccatgattgtgccactgcagtccattctgggtgacagagtgaaatcctgtcccaaaataaaaaaaatcacatagctttttttttttttgagatggagtctcactctgtcactcaggctggagtgcagtggtgcaatcttggctaactgcaacctccacctcctgggttcaagcgattccctgcttcagcctcccaggtagctgggatcacaggtgcacccgccaccatgcccagccaatttttgtatttttaatagaaatggggtttcactgtgttggccaggatggtcttgaactcctgacctcaggccatccacctgccttggcctaccaaagtgctgggattacaggcgtgagccaccacaaatcacgtaacttttatatgtactgagaaaacaagcgtgagccaaaaatcatgtaacttttatatgcactgagaaaccaaataatttgtgtgatttgctttattgtgatgttagtccattgaggtggtttgaaaccgaacttgccatatctccaagatacgcttgtattcaagaaccatttgttgaaaagactattctttttctatcgaatcatctttgtacctttttccataacttagtaaccttatctatgtgagtctctttctggattatgtattctttttttcgatcttgcattcaatttgctaatatctcgttgcgcatttttgtgtctgtgctcaggctgttattggtctgtagtttcttagtacggtctttggttctagtatcaggggatgctggcctcatagaatgggttgagtgctctctctcttcagtgttttgaaagatactgtgtagaatcagcagcatttcttccttaaatgtttagtaaattccccagggaagcctgtcctcaccgatggaaaactgctaatgtagagaagtcagctgaggcgtctaaagggactaaggaagggaggaaaggacaccaggaaactgtagcctaaggtccagagggttctggtccagacagagcagcagggaggccccgggagctccttcccgatgtgggctgtggtctctgcaggtgctgtccctggacaccaacatcacaaaccaggtgaataagctgaaccgagacctgcttcgcctggtggatgtcggcgagttctccgaggaggcccagttccgagacccctgccgctcctacgtgcttcctgaggtcatctgccgcagctgtaacttctgccgcgacctggacctgtgtaaagactcttccttctcagaggtgcggctgagctccagcgggcccttcactgtggagcagaacatccgagggcactgcggtgtcttgagggcttctgcagctccagctctgtgggtcacacctgctgcccctctgactcacatggattggcaacaggccccttcccaggcctccccacaccatgttcggaatgttgtcctaggaagggctcaagtgcaggtgggaggccagagtgcgtgcagctgcactcaggagactcgcccgtcaccaggcgcttctcacagccccttcctctcctgagatcctgcccatggcactgtggtctggaggctgggctggtgacctctcgcactcttgctctgcctaggatggggcggtcctgcctcagtggctctgctccaactgtcaggcgccctacgactcctctgccatcgagatgacgctggtggaagttctacagaagaagctgatggccttcaccctgcaggacctggtgagtcgtgcatgccgcctgcccgtgtgccctggagtccacaggggggtttctgtgcactcccgggagccggggtgtgtgcaggtcctgaggcacgccctggtgtcttccaaggggcctgccctgcagaccagtccatgccctgagcctgatggactgttctgtccacactggttgagcacctgccttgggtcaagagctggccttgtgggtgcttcgttctagcggaaggaggcagacactcccaagtgtgaagagaaggaaaggaggaagagggagttgcacagctcggccacaggaaggtcttgccgaggggcatctgagcagaggctgggggacgcgccaagctgccgtgtggtggtgcacggcgttcaggcctgcaggatggagggagtgagcagggcctggaggaggcctcaggactgggcatctggggtggaacatccacagcgagggtgggtgtagggaaggcgctggcaccgtgggatgaggtcgtgcattttactcataaccgagggctggctgcacacagcaggggctcgaggcttactgatgggcccacgaatgtgtctcgcgagcctgtgaagaagcagcaggcaggtctggccagcgcgggagggctggcgcccatcggggctgctccctttcaggtctgcctgaagtgccgcggggtgaaggagaccagcatgcctgtgtactgcagctgcgcgggagacttcgccctcaccatccacacccaggtgggctctccctcatctgcctcggctcagcctggcctccttggcctcctctctgagtggactggggtctcactgtgcctgtttattcctgcaggtcttcatggaacagatcggaatattccggaacattgcccagcactacggcatgtcgtacctcctggagaccctggagtggctgctgcagaagaacccacagctgggccattagccagccccgggccccgggtgcctctgcgtccgtgccaggcctcctgatgccaaggccacatccccgtgcttccagtgaccagaccactgaccaccctgactgtccaaacctgtgaccccaggccagggaacggggaggaaaccaaagaaaaccattttcagggagctcagacgtcacaggagggagcgggagcaggatgtggccctggcctcgccagagcacctgaagaagcaggccgtgagcgaggctgcgagtgccctgggcgccgtttctcacgcagtgaatgcttttccaggcctctgttgcttcctgcaccacacctggtggggtgggagcgtcctctaggtgcccctagttctttgtcctgcctcccagagggaggaaaagcccctgggggcttctggctccctgagattgggctctgagacgagacgggttcccaaggccctggtggggctggagtctcacctgtttgcatggagaaatgggctggccccacagcctcacaggagcagtttgtgggctggtttccccaggaatccagaccctaacccgtgagaatctggattttggcttgtgagccctgcttatttggagccgggtctagagggaaccctctatcagcctcaggaaaacaagacctctgtgcacctcacttttggctcactgcagcccttgtccttcacctccacacaggaccagctggaagcagaaagaagaaaggccaatttcacagggcaccaaacaagtatgaaatgtaaatcagaaatgcagacaccccagacgagagcctcacaggagggagggggccccacaggctccccaggaggctcgtgtctttggcccagagccagccttagtttgtccctgccatctactgtctgaggccatcgctgctacactttgtttttatttgtattt

SEQ ID NO: 15742 - DNA, 63601 bp, Homo sapiens
gagtctgggtgggagcgcgccaaatttctcccctgaagcagaggtggtagccaacggctccatgtctctgaggagcggcgggcggcggcgcgcggacccaggcgcggatggcgaggccagcaggtgaggggcgccctcctgaggctctcgggccggccctccggagggtgccatggggccgtcctcggctggcgccgccgaggcgggagggaggcccggttcccgcagccgcccgcactcgccgcgcctgactggggtagggcggcgcgccccgaccgccgacggaggggctcggggcgggcggaggcgctacgggcgcggcttctttgcggggaaacgaggcgggccgcgcggcctttccctgctcggctctttctgaggtttttcgggcctcgccttccgcgcagctgcgtttgggacctgccgcgcggcgggggcgatgagagcggcgggacccgggccaggccctgcggggtggacgcgcggctggggagggtgcggggaggggcggggccggggaccctgcctgggggcctagcgctgggggaggccgaggcgggcggatcgctggagcccaggatcctgttctagatcagcctgggctacagagagagacctcgtctcctctgttttatttttttgggcagggagtcccgctctgtcgcccaggctggagtgcagtggcgcgatctcggctcactgcaacctctgcttcccgggttcaagcgatcccgctgcctcagcctcccgagtagctggaattacaggcgcccgccaccaggcccggctagtttttgtatttttagtagagaccgggtttcaccatgttggccaggctggtctcgaactcctgacctcaggtgatccgcccgcctcggccttccaaagtgctgggattacagacgtgagactccgcgcccggcccttctcttgtaaaaacaagaaaaattagacaggctggtggtgcgcgcccgaggtcccagctattaatactcccgaatccgagccggaggttcacctgagcccggcaggtcaaggctgctgtgagccgggatcgcgccaccgcactccagcctgggcgacggagccagacccagtctcaaaaaaaatagagcaaggataagacgcggctgcttggtggccagagcaaacggtaaacatgaccggaggactggcctgccataagcagaaaacggatgaggcccggcgcggtggctcacacctgtaatcccagcactttgggaggccgaggcaggaggatcacctgaggtcaggagttcgagaccagcctgaccaacatggagaaatcccgtctccactaaaaaaatacaaaattagcggggcgtggtggcgcatgcctgtaatcccagctacgcaggaggctgaggcaggagaatcacttgaacgcggcaggcggaggttgcggtgaaccgagatcgcgccattgcactccaggctgggcaacaaagaatgaaactctgtctcaaaaaaaaaaaaatagaaaaaacgtgtgagaacgtgaagctttttacagacacttagctgaacaaaattcttcccagaggagaaaccaagtggtaaggatccctaactgctgttgtgctcatcgctgtctgtccatatcaggcaagccctagagaggcaggtacccttagggtctacatggtgtgttggaacttggagcttagagacggttactgactgccctgcttcaggacacaggactgcactcacgtgctccactccactgccctgccccaagctcagtgatggcctccaggcagggggaaggctgctgctgggataagtacaagtgatggcttttaccttacatgctttatgtgggttacctcatctcatccttaaaacagtcctgggaggtgagtgtgccccaggaggcagtgggtgctgtttgcctgcgtttcttcttgtgtgaaatggggacaccagtggcctccctcgtaggggttgtcatgaaaactgaatgagagcatatgtggagtactgggacggtgtgatacagtaaccagtcaatggtagctctctgtgaatgagagcctgtgtggagtactgggacagtgtgatacagtaaccagtcaatggtagctctctgtgaatgagagcctgtgtgtagtactgggacggtgtgatacagtaaccagtcaatggtagctctgtgaatgaaagcctgtgtggagtactgggacggtgtgatatagtaaccagtcaatggtagctctctgtgaatgagagcctgtgtggagtactgggacggtgtgatatagtaaccagtcaatggtagctctgtgaatgagagcctgtggagtactgggattgtgtgatacagtaaccagtcaatggtagctctctgtgaatgagagcctgtgtggagtactgggacggtgtgatacagtaaccagtcaatggtagctctctgtgaatgagagcctgtgtggagtactgggacggtgtgatatagtaaccagtcaatggtagctctctgtgaatgagagcctgtgtggagtactgggacggtgtgatatagtaaccagtcaatggtagctctgtgaatgagagcctgtgtggagtactgggacggtgtgatacagtaaccagtcaatggtagctctctgtgaatgagagcctgtgtggagtactgggacggtgtgatacagtaaccagtcaatggtagctctctgtgaatgagagcctgtgtggagtactgggacggtgtgatacagtaaccagtcaatggtagctctctgtgaatgagagcctgtgtggagtactgggacggtgtgatacagtaaccagtcaatggtagctctctgtgaatgagagcctgtgtggagtactgggacggtgtgatatagtaaccagtcaatggtagctctgtgaatgagagcctgtgtggagtactgggacggtgtgatatagtaaccagtcaatggtagctctgtgaatgagagcctgtgtggagtactgggacggtgtgatacagtaaccagtcaatggtagctctctgtgaatgagagcctgtgtggagtactgggacggtgtgatatagtaaccagtcaatggtagctctgtgaatgagagcctgtgtggagtactgggacggtgtgatacagtaaccagtcaatggtagctctctgtgaatgagagcctgtgtggagtactgggacggtgtgatacagtaaccagtcaatggtagctctctgtgaatgagagcctgtgtggagtactgggacggtgtgatacagtaaccagtcagtggtagctctctgtgaatgagagcctgtgtggagtactgggacggtgtgatacagtaaccagtcaatggtagctctctgtgaatgagagcctgtgtggagtactgggacggtgtgatatagtaaccagtcaatggtagctctctgtgaatgagagcctgtgtggagtactgggacggtgtgatatagtaaccagtcgatggtagctccctgtgtgacacttatccccatttttcagatttcttactgtccctggattaaaagtgagatacacagctcagagaaagcagttttgggaggaaatatggtcccagtgagcagttttctagtctacttaatccaacttacttgaggcaaggatatttggaggactggcatagagggccgtgcgcccctgttaagaggtgatgcctcgtaaatagcacttcattcactcttgattttgataaagatctgggactcagaactgaggctgttctctagcaagatttggaatatagtttttctgtgtttttgattacgggtgcattcaactatttaaaagattaaacctttattatacagtatggtggtgtatcagtttcctattgctgcagtaacacatgatcacttagtgactatataaatttattctcttacggttttagaagtcagaagtcgtaatatgaaagtgtctggttggttatatttattgtgatggttcccgggggagaatctgtttccttgctgcttcttcatcttcagaaccaagggttgcatctcctctcccccctaccctctctctcccatccctttctccttcctgactctagctctcctgcctcactctacaaggattcttgtgattacactgcgcccacccagctaagcagaatctcaaggcccttaatttagtcagatctgcaaagacccttttgtcttgtaagataacattcacaggtttgggggattaggatgtgggtctttcatggggggtgtcatcctgcctgcctaccacaagtggttataatctttcatgagaagtaaggatcctagtcttggaatatggtcattctgctcttgagttgaaggtgatccaaggaataccttcagacaaaggaagggtcttcctttctttttttatcttgttctttttttattttattttttttttagacggagtctcgctctgtcgcccaggctggagtgcagtggcatgatcccagctcactgcaagctctgcctcctggattcacgccattctcctgcctcagcctcccgagtagctgggactacaggcgcccgccaccacgcccggctaatttttcgtatttttagtagagacggggtttcaccatgttagccaggatggtctcaaactcctggcctcaagtcatccaccctccttggcctcccaaagtgctgggattacagttgtgagccactgcgcctggccctcaacctttttttgaggtaattgtagattgattctcatgcatttgtcagaaatgatacagagattcccgtatcacttcaccataacatcttgtgtaagtagagtacaattgtcacaactaagaaattgacattgagacgacccatctaatttattttatcttattttattttatttatttttttgagacgaagtttcactcttgtcacccaggctggagtgcagtggcgcaatcttggctcactgcaacctccacctctagggttcaagtgattctcctgcctcagcctcctgagtagctgggattataggcccaccccaccacacccagctaatttatttatttatttatttatttttatttatttttttttttttgccggagtctcgctctgctgcccaggctggagtgtggtggcgcgttctcggctcactgcaagctccacctcctgggttcacgccattctcctgcctcagcctcctgagtagctgggactataggcacccaccaccacgcctggctaagtttttgtatttttagtaaagacggggtttcactgtattagcaggatggtctagatctcctcacctcgtgatccgcccgcctcggcctcccacggtgctgggatttaattttttgtatttttagtagagacagggtttcaccatgctggccaggctggtctcaaactcctgacctcaggtgatccacccgccttggcctcccaaagttttgggattacaggcgtgagccactgtgcctggcctgacaatccgtctgttttattcaaatcatgtcagtgttacatgcactctcatgagccaccgcgtctggctagttttatgcatttttagtgtcccaagaggcaacagtgtctagccatcatgactctttttgttagtattctggttataaagttgaacaggttttgaagggcctgccctaattgtgtttttccaatgagtccttttatcttaatgagcctttttccaagctcggggtttttcaggaatatatataccctgtcatatccgaaacacttaacactaggtgggatgagggttgcagaagtaggtggcagtcggatcacaaggtcaggagatcgagaccatcctggctaacacggtgaaaccccgtctctactaaaaatacaaaaaattagccaggcgtggtggctgtcgcctgtggtcccagctactcgggaggctgaggcaggagaatggcgtgaacccgggaggcggagcttgcagtgagccgagatcacaccactgcactccagcctaggcgacagagcaagactccgtctcaaaaaaaaagaaaaaaaagaaaaaaagaagcagcagcaggtggcattacaaattaagcacggggttcccttctttcactcagggatgatggcgccacttcctcagtttcggcactcaagcgcctggaacggagtcagtggacggataagatggatttgcggtttggttttgagcggctgaaggagcctggtgagaagacaggctggctcattaacatgcatcctgtaagcactaggtccttctcccacccaggaatatggctgcaacccttctggtcatagcgtggtccttatctaaagagtgggggacacatgagggaactttgagtgaatcaggtgggagatgtgaaggttcccagctctcctttcctctttaacgtcattgagggccacagagaggccactgtgagaagccggaggtgatgggcatctcttttagccatcagaataaagctttcaaggattatgagggagaaattgagagagatccccatttggaggccgttacagtgtggttcttgtgaataaggctggtagtgttaatgtaggggtggagtaaagacctagatgagagggtttgtttctaaagtgctgagtttcccgaaaggtaggaggaaagtttctctaactgtgtagaggatggtcttgtgtctgtgttgactgattctcttgtagaccgagattttagatgaagataagcgcttaggcagtgcagtggattactactttattcaagatgacggaagcagatttaaggtaagcccctgactgcgacaagctaaaacccacttttatgggtgttcatgtagctctgtgactgtcagggagggcatgggaggcttccagtgcacagcagcccatagcccagcagaactcgggcccctggaggccccatcagtcatcacgtaagatgtcctgagagaggtcagttcaggaagactctgaatggtgagaagtagcgtgtctttcagattcttgcccctgtgaaaagtgcgcattctgacttcctgtatgctaccaaggtcaaggctaccctggccctaggctgttcatgggatataggagcaagcaatgtgttttcacttttctctcgctttcttctttctcatcacccctggatgggttggtgactcttaacaggtggctttgccctataaaccgtatttctacattgcgaccagaaaggtgagtgtgtttcatagactcaggtcagacgacctgtgtgtcattctgtggtgggctttgcaactgggaaataggcaaggaaggaaatgtattttaccaatggaaagccttttcattctgatcctgattagggttgtgagcgagaagtttcatcttttctctccaagaagtttcagggcaaaattgcaaaagtggagactgtccccaaagaggatctggacttggtgagtatcacccagactttccaggggtaaatgaggccagagtctacattgttcctggcaggtgggatcggaagaggtagaaattcaggtcatctgttgggtgatggggcggtgtggtgaccgtctataaaattccttccaaagagctctagtggtgttagttggtgccacgtgcagagttggacaaggtgccttgaagtcgccaactctttgacttgtgtgtttacctttgagtgtttaccctctcacccataaagtcctatttctcttgaaccaatgagcgtgatctcttcgcattatagccaaatcacttggtgggtttgaagcgaaattacatcaggctgtccttccacactgtggaggatcttgtcaaagtgaggaaggagatctcccctgccgtgaagaagaacagggagcaggatcacgccagcgacgcgtacacagctctgctttccaggtaaactttggtcttgtgagcaaagcatcagcggttcagaacgacaagatggataggagacaggaacacgtagcaacaaagttaccttaatggctggctctgtttgatacggaaaacttgagcaattaggtagagatttctgtatgttctgtgttaaataaacagtggcttcccaggttatattttatgtgttagctctcttttccaatggaggggtgggtttatggctctaaaattgagtggttgtaatagtaaagtcaccttagaggggaaaagatccctcatcctactgccctaacacaatccatctatgaatttcattaagtgctgagatttacacagcacatctccagagaaccttgggtatcgtccacagaaatttaagcctagaacactaaacactgttcttcaagtatttgagcatcaacaataataggatgcaaagtaaccagttaggaagagaaaatcttgagtaatgaagtttagatgacttcggaagaacctaccttaccctctgacaaaagaggatcagtttgggatgctgaacatttctacagtccctacccggagtccgccttccctggcaatgccacaagttgctttttgaaatattggaaggtgtgatcagagactgagtcctcagagacttgagccatatctgagactcgtctgtctttttccccctgaatagcccgttcagtatttgagcttataggccaatagtggccgcaatggtgggccacttctttagacatggcagagacccatgcacaggctgtgtgaagcccaggcctgctcttcagcctgcatgaggcagcctcctgagtatcaggaccatggtgggatggtcatgcctggctctcctgactggcagcacttaatgttttctttcttttttcttctatttacttatttgttttgagacagggtcttgctctgttgcccaggctggagtgcagtggtgcaatcatagctcactgtggcctcgaactcctgggctcaagcgatcctttcacctcagcctcctgagtaactgggatcacaggtgtgtaccccatgcctggctaattattattattattattattacttttgtagagatgagtctccctatgttgcccaggcctgtcttgaactcctgggccgaagcgatcctcctgcctcccagagtgctgggattagaggcataagccaccatgcttggccctctttttttttttctagttggggtgtaactcacatcatataaaatgaatacatcttacactgaattttctcctgtctgtagagttatcatccaagctattctttatttttttgagatggagtctcgctctgttgcccaggctggagtgcagtggcgcaatctgggttcactgcaacctccgcctcctgggttcaagtgattctcctgcctcagcctcccaggtatctggggttacagacatgcgccaccacgcctggctaatttttgtatttttagtagagatgaggtttcgtcgtgttggccaggctcgtctcgaactcctgacctcgggtgatccgccttccttggcctcccaaagtgctgggattacaggcgtgagctgccacgcctggcccagtccaagccattcttaaaggaaggactgccttggtcgttgaaaccacatcaatttaccttttgtgtttcctcggtttgaactctggtctcacctcttcctactgagttggaactctggtctcacctcctccagaccctggcagctgagttagttgctctcttgttaattcctagtgttctgcagaggggcggtgtcattactgatgaagaggaaacctctaagaagatagctgaccagttggacaacattgtggacatgcgcgagtacgatgttccctaccacatccgcctctccattgacctgaagatccacgtggtgagtggggcagggttgggtcgctgctcacatgaatttcctaacagccaggagatgatcattatgggtgaatccacagaagaatagactttcctggatgtagaactctagttagcacactgtgtgttttgcaggctcattggtacaatgtcagataccgaggaaatgcttttccggtagaaatcacccgccgagatgaccttgttgaacgacctgtaagttttgcttgtgttaccttcatcctaaaatttccagttttctggagagaatattcttcagtgctggagagtgaatctgactcaaagatatgtttgctgcttttcccccaaatactttattaaaggaaatatggagttagaatttttcatcagtttctgacagtatcatttccttttttgttgtatatcactgtatgacatcagtgtttgagctaggcaggatttggacactcgagggaaagctgggacttccgtttgggtagttgatagtgaagggacatggtgaaaaatggatttgtaactagaaggccttggttcaaacatgactttgtggtgttgggaaagtctttgtattcagttttctcttttccgaaatgaagatatcatctctgtgccacagttacctttcagagttgtcataaccaccagaatgaggtgatgtcttttgaagagtttttctcctaaagttctgtgattttaggcttgtcctgtgatcagctgctctcttaggtatgtcagttttcataccatagggagtcgtgatactcttgatgtaggttggttagtcttagggtccttctcccagctctagagccttttgactcttttaacaaccagagggaggtagagcaggctgggggtgggtgttcagggaggcctaatggggagtttagagcttggctttatgcttattttgtccccacaggaccctgtggttttggcatttgacattgagacgaccaaactgcccctcaagtttcctgatgctgagacagaccagattatgatgatttcctacatgatcgatggccaggtgagcaggtggcttctgggaagtaagctcctgggatggggaccttgtctggtccccatactacagcagcatctgccccactgttagtatttgttgagtgaataatgagttagtccaggaatgggagcaaccaagccgttccgacctccagctgtaccctcccctttcgagtgggaatccacacacagagcgtctcttctcaggaagcttaaagcactttcacattgctgtggacttctttgtagtgagaatctctaggcagagtgtgtgggcagggtgggaacgccatttcttggctttgcagcctctgacttgtgctgattgctaatgaacttggctagggctacctcatcaccaacagggagattgtttcagaagatattgaagattttgagttcacccccaagccagaatatgaaggccccttttgtgtcttcaatgaacccgatgaggtaaggaggtatcacttgggaaactacccggtattgtgggaagaacggacatgtggatctttccaaggcctcaggcattccgtcagatcagaattgcagctccatgagctttgttctcagggtatgaccgtcttttctgccagagacgggcggaggggcggggcaggaataagggccaacatgaggctgctgcttctgaactttgggagaggaatttggaatagcttgaagaagagaaagagcagacctctgactgctgtgacttgggttcaggctcatctgatccaaaggtggtttgaacacgtccaggagaccaaacccaccatcatggtcacctacaacggggacttttttgactggtgagtctgtgtcttctctatgagtaactgggcagcatttgagagggagggcgttgcgtggtgcaggggcgcttcccatgtcgacttaggaggtggctcctgggttcactctgcacctcccgtgtctgggttcctccctgggtctgagggaggaatggagaaaggggcattagagcctgacctgcccacttgcttgtctgtcctctttccaacccaggccatttgtggaggcccgggcagcagtccacggtctgagcatgcagcaggagataggcttccagaaggacagccagggggagtacaaggcgccccagtgcatccacatggactgcctcaggtaggggccacagagcagcatggctcctcactgctgtccgtgagcgagatctgaaggcctcttgcagactgtgctgtcaccacatctcatgggaggagggtggcctccgagaggccgtttcaggtcacccaagagtatggcagctgcaaccctgccagggcccgggatgtgctgtctttgactgttgactgacaattcatcagtgaccaggcacattgagcatcagcctctggggtggggaagccgctggaaagacgcactcagctgacaggtcccagacctaggacctcatggagctgctctgcccaggcaaggttgggatgtggcagcccggctgcctcacaggacaagcctcacgggacaaccacagattccatatgagctagggtgggaggcagctcagagcttcggagagtcacggcgttcgggggctctgacatgactggttgggaagacaggtggatgtggaaatgccaacagaaggaggctggaagggaaggaagggaagggagggaggaaaggagggaagggaaggaagggaagggagggagggaaggaagggaagggagggagggaaggaagggaatggaggggcctccacggcctctgtattctgcacagtgccactggggtgcttgcagcctgaatgcgtttctgtttagctctgatgctcagcacttggcttggagagggaggccaggaggctggggccggtttagcgtgtgacggtgtgacagtcctgatccaaggcagggagtgagggttgtgaggattcaggatctgtcatgtggggcagggggaggcccagggatgctggttcttagggaggggttggcacctggggtttttgtgccatccgtggagacagggaatgggtagagaaggggcttgaggcaggaggtgaccctgctaccgatatgctagcctggaagccccacccatatgggggccctgaagaccaccatgaggcttggtttgggctcgcactgtagattgggactcactgggttgcgggtgggtcttggtgaaagctggggtagtggatgaactgaaggcaagaggtaaagtgagagaagaaggccacagggtggaggctgcggggggtggagaccggacatgacccctggacagctgctccagggaatgcgtctgtagggaggaggtagagacaggttccgggtagagtgtggggggccttcttttcttaatttttattttttatttattttttaaatttttattcttcttggcatctgatcacatcttgccttctattaaaggagggtgggcttgagtgtttccgtgctgaagggacagtgtgaggagagaagatcagtgtggttgatagaactaggccccaggggtgcagacctgaggtctggggagaggcccaaggaggtggggcgcccgtcggagaggccacaaactctgctgaggatgggaggaaggcgagggccggaaggaccagtcctggtgcttccttgtgttgtggataggtctgtgagattaactagatcctgatgaagggttttcacaaggtgtctacaccatgtggggccttggtgtgaggctcctgggtgcctgttaggaacttgcatctgtctgtgtggtgcccagttttgccagttctcaggggttcccgggctgcatgttagaatcatcctggcttctgttctcattctccttccaggtgggtgaagagggacagttaccttcctgtgggcagtcataatctcaaggcggccgccaaggccaagctaggctatgatcccgtggagctagacccggaggacatgtgccggatggccacggagcagccccaggcacgtaagccacatcccggctgcccctgctgccgtgtgcacgcatccagatggccacggagcagccccaggcatgtgagccacatcccggctccccctgctgccgtgtgcacgcatgtatgccagcccgctccacccagcaggctgtgtctccgggacacacgtgttttgtcctgtgccggtctccttactgtgtgtgcggcaggctggtcaggccaggctttgctttctgtgcttcacacttgaccctgggctcttgatttttgatggccctgctctctggcgttctctcctcagactctggccacgtattctgtgtcagatgctgtcgccacttactacctgtacatgaagtacgtccacccattcatctttgctctgtgcaccattattcccatggagcccgacgaggtgagcattatctgtcctgtcggcaccctggcctcctcagcccttgccccattccaaatgcactggagctgaatggaggtggatgtcccaggagtgctggcaccagaggcggcagtagaattctggtgtgtgacgtcagggatgtcctttgggaattctctggccctggtgtgaggaagaaaccacaggaggcagaatttgcagccatttaccacgaggttttctctcctttcacactgaagttcagcttaggttcctggactttgcctgcaagtcagggcctttggtgttgcttttggctggaagccttggtttctcttgcaggtgctgcggaagggctctggcactctgtgtgaggccttgctgatggtgcaggccttccacgccaacatcatcttccccaacaagcaagagcaggagttcaataagctgacggacgacggacacgtgctggactctgagacctacgtcgggggccacgtggaggccctcgagtctggggttttccgcagcgatatcccttgccggtttaggatggtgtgcttcttccctgggattcagattcttcccactcttgtgctgtggtaggacccagaagctgcaggggctgaaataaagccccttctccccatcctgtcccacggcccctcaccgggtgtggcttctctggcccagcaccccccgggggcttctttagggcagtgcactgcagattgtgcacatgagtccttccggagctttctcgggcacaacctgccacgtgcagccacagcgtcaaacctgaggcaggctagtgtgggtgtgtttcccctctgaccccgtcgtctcactgttgtgctagaatcctgccgcctttgacttcctgctgcagcgggttgagaagaccttgcgccacgcccttgaggaagaggagaaagtgcctgtggagcaagtcaccaactttgaagaggtaaccatcagggaggcaggaagagccagtctgtgtttggcgccttcttcacagaccacgtctttcagcagcacgtttattgtgcacctgctgcgtgtggtgctgtggacggatgacacagggtctctggtgggacagggcagtcatggttgtgacgtgtgatgctgtcacaaggtcggagggcttcatgagaggtggggtgtgagctgctcctgaaatgcagtaacatggaaggtgggtcctggtgggatgtatcccgtgtcctgttttaaagcattaggactttattttataggcactggggagccattggaggttttaaattttatttactttttgttgttgagacttaaaaatgacagtaaattcctacaaatgacaggattagtgactgtaaaatctgtttacataatggttagaaagcacacttacaaagtgtgttatgtgactggagagggagacaccagttcttctctgatccctgttcctcaggacatggcacatctcaggtcttttttttttttttttttttttttccctttttgagatggagtctcgctgttgttggcctgggctggagtgcaatggcatgagtttggctcactgcaacctctgcctcccgggttcaagcaattctcctgcctcaggctccccagtagctgggattacaggcatccgccaccacacctggctagtttttgtatttttagtagagacagggtttcaccatgttgtccagtctgatcttgaactcctgaccttgtgatccgcctgccttggcctcccaaagtgctgggattacaggtgtgaggcaccgcgcctggcctatctcaggtctttatgtcaggcactgtgcagcactacatcatgttcagtgaggttgctggtttagagtttttaacagttttcacattgatgccaagaaactttttttttttttttttttttttttgagacggagtcttgctctgtcacccacactggagtgcaatggcatgatctcggcttactgcaacctttgcctcctgggttcaagcgattctcctgtctcagcctcctgagtagctgggattacaggtgcccaccaccatgcctggccaatttttgtatttttagtagagatgaggtttcaccacgttggccaggctgctttcgaactcctgactgtaagtgatctgcccacctcagcctcccaaagtgctgggattacaggtgtgagccactgtgcctgccctcaagaaacatcttgtaatagattcactagtcaaaatttaaacaagaatatgtgtacactcttggcaagctgtgaagcactgtttggctattgtcagccacatccattattatacttcagggaactcttatgaaccgatcaggaagagagccttgtctgaataacaaataggagttaaagaatgtcggccatggccgggcacggtggctcacgcctgtaattccagcactttgggaggccgaggtggatcacgaggtcaggagattgagaccatcctggctaacacggtgaaaccccgtctctactaaaaaaatataaaaaaattagccgggcgtggtggcgggcacctgtagtcccagctactcgggaggctgaggcaggagaatagcaagaacccgggaggcggagcttgcagtgagccgagatcgctccactacactccagcctgggcagcctggaatcccagcattttgggaggctgaggcgggtggatcacctgaggtcaggagtttgagaccagcctggccaacatggagaaaccccgtctctactaaaaatacaaaaaaaaattacccaggcgtggtggcgagacgtctcagaatctgagacagagtttcactcttgttgcccaggctggagtgcaatggcatgatctcggctcaccacaacctctgcctcctgggttcaagagattctcctgcctcagcctcctgagtagctgggataacaggcgcttgccaccacgcctgggtaattttttttttgtatttttagtagagacagggtttctccatgttggccaggctggtctcgaactcccgacctcagctgatctgcccgcttggcctcccaaagtgctgggattacaggcgtgagccaccgcgcccgacctagaagcagatatttaaagtctttaagaaacagtgagatgggcaggtagagtgaggctggaggtgtggtagatgtgaggatgccaggctccctggtgagtgaggaagagagctctgtagatgtgaggacgccaggctccctggtgagtgaggaagggagctctgtagatgacattgtcctgttagcgattcctaagtcctcgcaagtgcccttgaaagggaagcccaggatcgcctttgtgtccctgaagggtcacctgttgggcggagggtggctggggggatgtcagcaggggctcacagccacgtggggcatgtccaggtggtgtccccaccatggaaacttggccattcacttgtcccagcccatcctccccttcttgactggacagcctttcagaacacgccgttactgggcagagaagggtgcagtggaggctcttccccggctgattcgtttatctgtaattcaagtagaaacaataggtgttactgttgtggtatttcctgttctatggaatagatgttattccttgtaatcacttttttcttaaaattttaggtgtgttttctatttttactactttggagggttttaaggatttttctttttctttttttttttctgaaacaggatctggctctgttgcccaggctggagtgcagtggtgcaatctgggctcactacagccttgacctcacgggctcaagcgattcttccaccccagcgttccgagtagctgggactacaggtgccaccgccacacacggctaattttttattttttatagagacgggggtcccactgtgttgctcaggctggtctcgaactcctgggctcaagtgatcctctggcctcggtctccgaaagtgctaggattacaagcatgaaccactgcacctggcctaaggattttttttaatactaaggagagtttagtgttcaagtaattttctaatgactccaccaaatttaatgtatttcatagaaatgatggcaacccttcttaacttttttcttctggctagtttttgctctatttatatatttttcagctttttcctctcctgaatgtctaaaaggggttggtgaactgcacacgaggcaagcttggtcaccagcctctactgagtttcgctttctctgcaggtgtgtgatgagattaagagcaagcttgcctccctgaaggacgttcccagccgcatcgagtgtccactcatctaccacctggacgtgggggccatgtaccccaacatcatcctgaccaaccgcctgcaggtgagactttacttcccgtgtcagagtcggagctctctctgcccagccctaagtgctttctcacccctcccagccctctgccatggtggacgaagccacctgtgctgcctgtgacttcaataagcctggagcaaactgccagcggaagatggcctggcagtggaggggcgagttcagtgagtgtcggccgcctgggtgggcactcggtgggaaacgggtgggtgagtgtcggccgcctttctccacttggtgggaagccggtgtgtctgtgcctccttttgaacttgcccccattgcctccttcccagtgccagccagtcgcagcgaataccatcggatccagcaccagctggagtcagagaagttcccccccttgttcccagaggggccagctcgggcctttcatgaactgtcccgcgaggaacaggcgaaatacgagaagagaaggctggcgggtgagtgcctgggcatggtcacggctgtaaagatgtggctcctgctcccactttctgttcttactgggctgcgttggtccatcccagctggggccccagaggtgttgtcacagcagaccagaagctgctctaggtcactgtaagctgtgctctcactgcagggtcctttatttgcttccccatctgcaagtgttagacactgctgctctgtggtcttggggtatttggcctgttcctacccctgggctgtcctatttctttctttttttttttgaaatgaggtctcactctgtcacccaggctggaatgcagtggtgtgatcttggctcactgcagcctcaacctcccaggcaccggcaatcctcccatctcagcctcctaagtagctgggactacaggtgtgcgccaccatgcctagctaattttttgtattttttgtagagatggggtcttgccatgttgcctaggctggtctcaaactcctgggctcaagtgatccgcctgcctcggcctcccaaagtgctgggattacaggtgtgagccaccgtgcccgcccacctttttcggtatgagaaactagcagtgtatctgagctgttgctcctttgtggtgacgtagaagccatgttcttcagcacccctgtgccctggctccctctgctctgggagatctcacccacctgctctgcccatctccgtcgtgcttagattactgccggaaagcctacaagaagatccacatcaccaaggtggaagagcgtctcaccaccatctgccagcgggaaaactccttctacgtggacaccgtgcgtgccttccgggacaggcgttacgagttcaaagggctccacaaggtgagctctgaggggctgcaagctttggcctctgtgagggcagtttcagtcggctcatgaagtgggcactcttggctccttgcctgggatcctctgagcaggcacttgcactcggatggtaacgtgcaattgtttttgacttggaagagttgatggccacgaaggatgcagaccatcatccaccctggtctgaggcctcagaaggaccctaaaggatgatttctaaagtgattatttagagcaggggtcagcaagctacagctggctggccgtttgagtacatcaagttttacgaacccaactgccttcgcctattgtttatctctttcccgctgtcatgggaggtgaggagttcctagaaactctaaggccttctcatctatggtattcaccatccggcccctcgtgtttaactgacgtatttcatccggtaggaacatggaaaatgcatagcaacacctctgttttgataccaacgggtcattattttatatctgatcagattgagccattttttttctgagagaccttcactgtagactcagcacggcccctgctgtgcggccccctggcatcctgcactgccctgctgaactcatcgtcacatgttcttttttataatggtaaggcggacataatatgacatttagtgtttttaagtgctcagttcaggggcatgaagcatattcgcactgttgtgcaactatcaccaccatctacctccagaattcttcgccttctgaaacggaaactcttatctccatcaaacagtagctccccacctcctccctggcccctagtgaccccattccactttctctctctgaattccacgactctagggatgtcatgtaagtgaaccgtgcagtatttgtatctttgtgaccggctttttcacttagcatgatgctttcttttttggagacggggtctcactctgtcaccaaggttggagcacagtggtgtgaccttggctcactgcagcctccacctcccaggctcaagtgatcctcccgcctcagcctccccagttcctgggaccacaggcgtaccatcacgcctgatcgttgtatgtttggtagagacggggtttcaccatgttgcccaggctggtctcaaagtcctgaactcaggtcatctatccaccccagcctcccacagggctgggattacaggcgtgagccaccgcgcccagtcttagtatgatgttttcaaggtttatcaacatacagcgtgtatctgtactgtatttttgtaaatggctgaataatatttcattgtgtggatttgtcacattttgtctatccttcatacaccgacgtgcacttgggttgcttccaccttttggctgtcgcgagcaatcctggtttcaacatgggctgcaagtgcgtcttcaggtctctgcttttggtgattttggatatgtacccagcagtagagttgttgggtcatatgctaattctacatttaccttttaaggagctgccttactatctcactttattttaattaagcaactgctaaattacttgttcatctgtctccctcatcaaataagcaccaaaagtgtagtgactgtctcgtgcttcagagtacaatggagttcctggcacatactaggcactcagtaattatcttaaggaatttgcttttgttccttaaatacccagcctttaaaaaccttttctcatgttgggtggggaatttgatgagacatctgtggtcttagctgcatttcttgattgattttaccaggcacccccgagtagctcttgttccctagaaactgtgctgaagcgtttaggatgtcagaccgtgaaatctacaatgttcaaatgattctgtcaacacagagagacagaataaaggaagtgtgacaaaatattgacagttggccagtctaggagaagaatgtacactcttcattgtactggttttttaggttttctatagatttgaaaattttcaaaatactaaaaacctgggctattgactttgtagaatgtgaaatggaagaatctgtgaggtgctccatgttcatgtgcttctcaggtgtggaaaaagaagctctcggcggccgtggaggtgggcgacgcggctgaggtgaagcgctgcaagaacatggaggtgctgtatgactcgctgcagctggcccacaagtgcatcctgaactccttctatggctatgtcatgcgcaaggggtaggtgggcccgggcccgggagaggcttatgggaggaatggatgagtccacgtttagggcagcttcaggtgtaggctgctgtgcatggagggccgttcatctgattcaaggaatgttggagggagaaggctttgggctggggtggggctgggaggttgaagagagtgggggccacgctgactttgagggtctgggtgtccatgagtgatgcgtgctgtggggtgtatgtgtctctgcatcatgggctggagacacgacttgccattttccagcgcgttcatgtctcccagcgtggatcctcactcagggacttgcagagtgtcgggcagttgcttcacagcatgtctgcgtgtccgggaggggcagagaagcaactgacaaggggcatggggctggtgccgggaggggagggtgggacagctgacagcagggctgggacccaggctggaggagggttgggcctggcagctaggcctgggctttctctgagaagctggaggtgagaatggggcttgggaggaggtgtgaagagagtagagaaggcgtgaatgggtctgggtggtattaagagtcctgctgaggctggagtcctgaacggctggacgcagtggcacatactgcacccttccagatccttcctgggcaccaaggtggggacagagaggtgtcctcgggcagagccagattccaccttagttctgtcctggtgcacgcacatttggctgcttcccttgtccctgtcgcatctctcctttcctcctccctactcctcactgcctctgataccccctggaggagccatgccagccccacccaccagtttgtggtgtcctctcagggctcgctggtactccatggagatggctggcatcgtctgcttcacaggggccaacatcatcacccaggcacgggagctgatcgagcagattgggtgagtgcagaaggggagccgtggggctgggagcaggtcctgggggcaagcatgggcaggaaggaaggagggaaggctggaggccacacactgggcaggaaggaaggagggaaggctggaggccacacactgggcaggaaggaaggagggaaggctggaggccacacactgggtgaaaaggaaaggggaactcacgaccttgctcctctctttctctgaaggaggcccttagagctggacacagatggtatatggtgcgtcctgcccaacagcttcccagaaaattttgtcttcaagacgaccaatgtgaagaagcccaaagtgaccatctcctacccaggcgccatgttgaacatcatggtcaaggtgagtctggggcctctggtcctgaagctctggctggcctggcgtcagtgccctgatgtcactggctctgcagcacctcacagtgtgcatgccttcctggcacccagcactgctcacattgcttttctatagcctgaagaccatggtcagaggtatcaagtgattccactcctttctctttcagcatagctcccagaattttttgcttttaactttttattttgaaataattttaaacttacaggaaattacaaaaatagtacagagaatttctgtatccccttcaacctgccttcccctaatgctgacctcgcataaaccatggtgcgcttgtcaaaactaagaaacctatgtctgtgccccagtaactgcactgcaggcctcacctggatttcccatttcccaccatagcccctcttctctcccaggatcccagcaaggacccacgtggcgccgagttgtcctgtcccggtctgtcctcgtgtcacgacctccccctctggtggtgccggccaggcgatggttggctgtcccttgatcaggggttgtctgttgtttctcgtgactagactgaggtgatttgggtttttggaggagctccacaggtgcgacaccctccccacgttctcacacgcatcgtgttggtttgtggtggtgtgggagtgtgggtgtgttgtggggacggcttagtctcctgcctgaggggcttctgcaggccttactgtggcgctcctgtgccccctcccatacggctcttcagtcgtaaatacacacccagtggggaggatataagcgtccctggaggagggctgtcagagtttctggacctgtattagagccatcacagcagcaaatagatatcgtggagcaggtgcttcgagacagtgtatccacagctgctccataagcttctgcccactgtgttagcgttgctgatgggctgtgtttgctggtgggccgcacctgcagcagttacgcctgaggtttcctgtcgtggtttttctctggcgattgtctgtttccttcattccttctactgtatcaattgggatcctgtagggaagcgttgctatccttctcttccatttgttctcgtttatttgtctgcttattgacatcagtgtggatttgcggatcagagtggacatcccagggttattgttcataggaccggagtggcttcctgctccacgtgttccccttgggccactggggcctcctagtttgtggcgtgttcttgggacacgccctcttctggtctttgtttctggagcactttcctacttcttggtactgtaaggtccaccagcctcatcttgtattttccctgctccaacctggagtcagccagttctccgagaagaatgatgtaaaaacccgagatggggtgcttgctgtgctcactgttcctgggagtgtcatagcttccagtctctcatagtggaggcagccaggaagtatgtctctagtaacgcacgcacacagaactgtttatttctgtgtctgtctgtctgcatggatgcatttaaacacatgagtctgcccctttcttattagtgacttctttctccttcagtgataaacctgtttcgaatttctcaatatatgtgtttgttcaatcctagagtccatgtaaagtagttttagaattgctaacagacttgtgtcccatgagaaataatttcaccagccactgtacagcatttgtagatagttacttttgttttcagccttaccctgtccagtcagcagagttcacgggcagctccttcctccccaccctgttggcatgttctgctgtatgtccacagtgctgttgggctcatttggcccagtctgcacccctcttgggatcccagcaccatggctggatggcttgtaatttgcacacagtgacgttcactctgtagcgtacagccctgtgggtttggacaagtgcatagtgtgtgtgtccagcaccacgaagcaacacaaaacagctgcaacccctttgtcagcaaatcctctccctaccccgaaaccctggcaacccacaatgtgttttttgtactataattttgctttgtcgaaaatgtcatgtaaagggaagcatacggcctgtagcattttgggtctggcttcttggacctaacagatacacctgagtttcaccacttggttgcatgcatcagaacttccttccttcctgctgccaagtcgtgttagttatgtggaaaagcctcggtttgtcaatccatccactcctggagggacaccaggtggtttccaggtttgggccatcatgagtgaagctgccccctcttcactcttgtttctcaggaaggcttcaccaatgaccagtaccaggagctggctgagccgtcctcactcacctacgtcacccgctcagagaacagcatcttttttgaggttgatgggccctaccttgccatgattcttccagcctccaaggaagaaggcaagaaattgaagaagaggtgggactctcatagcttttgtgctttagaaaggacatggattgagatagattaaatttagcccagaaaggaggttggatcaggagccaggatagaaacagacctgggttcttgtgatcttactgattccgtttgcaccagctctgtctgcccgcctgctgtattctggctctgtggctgcaggcccttcagccattttccttttagagaagcagtggcctaagggagagagacgtttgctgcctcgtggatgacaggtggagggttggaaagggaagaggcgggcagagaggatgaggcacagctggtggctccccagcgctccttgccactgctgtgcttgccttttttttttttttcaggtatgctgtgttcaatgaagacggttctctggctgagctcaagggctttgaggtcaaacgccgcggggaactgcagctgattaagatcttccaatcctcggtgtttgaggccttcctcaagggcagcacgctggaagaggtgtatggctctgtagccaaggtggctgactactggctggacgtgctgtacagcaaggtaaaggcctaccctccaccctcacctgctctgagggatgaaggatgaagcaagaaggggaccccgtgcttcctgggctcctggagaccaaggtgaccgaagaacacagggccagtcctaatgaaatcccaagacctcctgagcacaattacccccttggagttcccctcaacttctgcatccagggacacaactctgagggaaacgtttttctaaatagcgtgataagcctggcatggtgatgcgtgcctgtggtcccagctacttgggaggatcacttgagaccaggaagtagaggccacagtgagccgtgactgcaccactgcactccagcctgggatatttgtttatttctatgttactttgtattttttatatttttcaggctacataacattttgacagtttacataccttaatttacgtaactagcccacgattatttactaccagataggtttcacatttccattgttatcaatggtgttgcattgaacgagatatctcggtgcatatgtttcccaggcacaggcgtcttgggtagaaggaatactggaacactctgcagtgctttcctggcttgctttgctgtgtgggcttctgtttcttggcatattgtcttgtatagagtgaaacacacgagcaagggagcaccagggtatcacacagaatattcatgagcccagcactccttacaggatgtggggggcctgtggtcaggaacatgtgtgcaaagcacagctccagctggatgtgggtgccacactggaactgctcaggcctccactgctcaggccactctccagccggccggagtttctctttcctctcttctggctcttcctgccccttctttctcttcctttcaaggagaaaaacttcctgtcttaggccgagcaacatccttttctgcagccttggtgctcttcagtaaattcttcttgatattttgtgcacagtttaataaaataaaagccaagccaggcgtggtggctcacgcctgtaatcccagcacttgggaggcctcggcgggcagaccacttgaggtcaggagttggaaaccagcctggccaacatggcaaaaccctttctctactaaaaatacaaaaattagctggatgtgatggcatgtgcctgtaatctcagctacttgggaggctgaggcacgagaatctcttgaacccaggaggggaggttttagtgagttgagattgcaccactgcactccagcctgggtgacagaatgagactctgtctcaaaaaaaatataaaagctaaagttttgtgtgtgtgtgtatgttttaaagtattgccacacaggcatattagagagctcttgaaattgcagccttctgcgtctcaggctagagaagggcatggcctagaggagcacagtccagggtgagctcagactctgccccttgatttctgcagtgttttacccattgtctttctctaggcagccaacatgcctgactctgagctattcgagctcatctctgagaaccgttccatgtctcggaagctggaagattacggggagcagaagtctacgtccatcagcacagcaaagcgcctggccgagttcctgggagaccagatggtcaaggatgcagggctgagttgccgctacatcatctcccgcaagcccgagggctcccctgtcacggagaggtgagggctccccccatcacggagaggtgagggctcctcccatcacggacaggtgagggctccctccgtcacggagaggtgagggctcccctcatcacagagaggtgagggctgccctgtcacggagaggtaaggggttccttacagatttgggctgtgtttaacaccaagtttggggatggcataagtgtccatcaaccagaaatggataattgccattttgtagggaatgagatacactataccagagttcaaagggttgaattgcagctacaggttacaacactgacagtttgaaaccactttggagaaaaaagcaaaaatcaggttgaaggaagacccttatgcctccgtgtatgtaaaacttaaaaacatggaaactgctctttttttttttttttttttttttttttggtggttatatacaaataggaccagtacaaatgcctgcatggggttgatgaacaccagaataagggttgtctttacttctgtgtgaggagggaataggttggggtcacacagggcttcactctaatcgtctcacaaaggaagtcagagtggccaagtgttgaagcttgatggagccgagtggatcatagtgtgcgtgtcttctttaggtctccttatgtttgcagtattcaccacagatgtttcctccagtgaaagggaagcactgacggttgccagttgctttgctagtgacatgaaaacaggctcgttttttctagaaagcagcctgagtcttctgtgtgttactcagcaaggaacatgtagacatggttatgaacgtgcacgtttgcctgtatgcatgcacgtggttactcagaaacgcagacatgtttacgcacacacgcatgtctttgcctatacgcatgcgcgtggttactcagaaacgtagacatgtttacgcacgcatgcgtttatgtatgtgcatgcacatggttatgccgtgagaaacatgtagacatagttacgaacatgcacgtgtttgcctgtacgcatgcacgtggttactcaatgagaaacgcagacatgtctacgcacacgcatgtgtttatgtatatgcatgcccatggttacgctgtgaggaacatgtagacatgtttacgtgcacacacgcacgtgtttacacatacgcacgtgttactccccgaggaacctgtaggcatgtttgtgcatacatatgcacgcagatgtatacattgatgtttgtgaacagctgttacacgtccttatttccatgttcatttgataagagttaggatcagattttgggtgattttcactgttactgagctgtgtgcctgtcttccttacccagggccatcccacttgccattttccaagcagagcccacggtgaggaagcactttctccggaaatggctcaagagctcttcccttcaagactttgatattcgagcagtgagtgccagttgcgttctctactcttaaaagtttacaaggaaagctagacagagcagaatatgtctgagttggattatgttttttgtctggcgtcttcactcttgacttcctcctttctgataagtaataggtgagcacctaataaccttttagggcaaaactgaaaacatgaagtgcctggggccctttagctgttctattggatggactaaggccaggggtgttggctcagccacctactagctctgtgatctagaggagtcagtgaagctccctgccttggtgtcctctgttgtgcaatgggcacctttcatcatagagtttctgagaggattaaataagacacagtggttagccctgtgctcagcatgaagtgagccccactcttggctgctgccacctgctgttctctgtgcccgtttcctgcacatgcagattctggattgggactactacattgagcggctgggaagcgccatccagaagatcatcaccatccctgcggccctgcagcaggtaagggcggggtcagtggcacgggctgtggggctaaaaactgtgcagttagacaagggtctctctctgatgggtgttggcctcacacaggtaaagaacccagtgccacgtgtcaaacaccccgactggctgcacaaaaaactgctggagaagaatgatgtctacaagcagaagaagatcagtgagctcttcaccctggagggcaggagacaggtgacggtggggccccaaggctgggctgggcgggatccttgtgacacacaggactccaggcttcttgcgctgctgtgtgtgctgtagtgaagcttctgttcaagcatcgaaaatggactttttctgaaaatgtgcccattggcactttactctctaactctgagtgtcactcttttgttaataggacaccattgtgaggctgaggtgagggcaaggaactgtctccttatgtgaaaatattagggtgcactacttagactcagtgccttgggcaaatcactgtctcttgaagccccagttttctgaatgtgaaatgaatatcttccctatggaaacacttagaaacacaggacacagtgtaataaaaggtacagtgaaagtcagaagagcaaaaggaaaattcttaaatgctgaaaattaaaagtaagctataaatcagagcagtatacaaactcacatgacaagaacaaggttctttgaccaggtgcggtggctcacacctgtaatcccagcactttgggaggcctaggtgggcagaccacaaggtcaggagatggagacaatcctggctaacacagtgaaaccccatctctactaaaaatacaaaaaattagccaggcgtagtggtgggcgcctgtagtcctagctactcgggaggctgaggcaggagaacagcgtgaacccgggaggcggagcttgcagtgagccgagatcacgccactgcactcccctgggcgacagagcgagactccgtctcaaaaaaaaaaaaagaaaaaggttctgagatggattggattttaaaatttaactgtcttatttgtaagagttatatatgtattctttcccctgccccccaagacggagtcttgctctattgcccaggcaggagtgcagtggcacaatgcagcttctgcctcctgggtttggctcactgcagcttctgcctcctgggtttaagcagttctcctgcctcagcctctagtgtagctgggattataggcacacaccaccatgcctagctaatttttatttttttaatttttttctgcctcagcctctagtgtagctgggattataggcacgcaccaccatgcctagctaatttttatttttttaattttttttttaaatttttagtagagacggggtttcaccatgttggccaggctggtctcaaactcctgacctcaggtgaatgcacccgccttggcctcgcaaagtgctggaaatacagcactgcgcccagtggcttatgggccagtataacaatttcaagagttatattgaaaagataggacgcaggaaaagcaaaaggagtaaaaaatacgtataccaggtaaatgttaaccaaaagaaagctgatgtggctgtattaataccagacaaaatactctttaggccaaaagtattaggaaacataaggactattgttacataatactgaaagtcacaattctctggaaatatatactaattgtaacaatgtagcctcacattaaataatgtaaacatttacctaattataagaagaatttacctccaatcagtttgggagatgttaacatccctccctcaattgatagttggagcagaccaaaaatcagcaaaaatatgtttggaatgacacaatcaactaactagatttagtcactagctataatacatttagtgaacaaatgtagtcttgcactaaaattagagaatacctatccttttcaagaatacataaaataatgaccatatatataccacagagtaagctgcaaccaattctagataacttaaatacagaccatgtttggaaatttaagaaaaaaaaaacacatttataacttgtggatcaaaaaagtcatagaacttagacaatacttggaactgaatgtaaatacaaatgctattaaaatttgtagtatgcagttaaacaggacttgtatacgcatttatatatctaaatgcatgtattagtaaagaaaaacaaatagaaaattaagtttccaactgaaaaagttagagaacaacagatccatcagaggaagtagacagaagttataaagagttataaaggtaaccaggcatggtggtgcacacctatagtcctagctactcggaaggctgagaggcaggaggattgcttgagcccaggaatttgaggttgtagtgggctatgatggcacctgtgaataggcacttcaccccagcctgggcaacacagggagaacccaactcaagaaagaaaagaaagaggttacaaaattgagccagaatgagtgaaacaaacaatacaaccaaaatgttgttctttgaaaagacttaggaaaatagtcacatctttttcttttcttttgagacagggtctcattgtgtcacccaggctggagtacagtggcgcagtcatggctcactgcagccttgacctcccaggctcaattgatccacctgcctcagcctcctgcatagctgggactataggcgcacaccaccacatccagctaatttttgtaattttttgtagagacaaggttttgtcatgttgtcctggctggtcacatctttttcaggacagagttttttattttaatgaaaacagacatcattatagatatagtaaagcctaaaaaaatggaaggattcccattttctgctaaacagttggaaaacatagatggaacggacagtatcctcaagttatgcactgacctaagaagtaataaaaacctgaatagaactttaaccattacagaaattgacacttaaaaagaaacaggccaggcgcagtggctcacacctgtaatcccagctctcagggaggcagaggcgggaggatagcttgagcccaggagttcgagacctgcctgggcaatatagcgagaccccgttctccacaaaaagaaaaaaaaaagagacgaaaaaaaataagtgtaaaagaaacatcaaacccaaatgatttttaagagaaaaaggaaaaaaaaaacccttagctcatttggtaaccttggcaatccttgttactttggtaacataattgaaaacaggaaaggaaagttacgggccatgaacaatagatgaaaaaatatcaacatacatgaacaataacaatatgaccaactaggacttatgctgggaatagcaagcactgtttaattttagaatttgccaggttagtttttcttgggagaaatccactaattcatcattaaaggagaaggctcgtaagatcatctccaatagatgcagaaacaacatgcggtaaaactttaacatctgctcatgttaaagtttgaacaatcaaaatcagaatagatgagatgtttcttaacctgataaagtgttcttgaaacctaacagcagacctcatacttaaccacaaaacactggaagcattgaagtaaggagtaagaaatggatgcctgttaaccactgcttctgttcaaaacagtttggagatcctagccagcataattaaaccagaaaaagaattaaggattgaaaagggagacatcaacttattatttacaggcgatgtaatttgttaacagaaaatgtaaggaaacctagattttgtgttaacttatatgtatttcagcaacaattagataccaaggtaagatataaaagtctattgctttcatttatactagaaacaaaatattttttgaaagataccatttacaatagcaataaataatgtactaaggaataaattcatggtaacaatgtgtgtaagacttttacagaaaaaattacacaacttttttctttttgagacatggtcttcctttgtcacccaggctagagtgcggtggcaagatcatggctccctacagcctagaactcttaatctcacgttatcctcccacctcagcctcctgagtagctgagactgcaagtgtgcaccaccacacctggctatgtattttttgtagaggctgggtctcactgttgcccaggctgatcttaaactcttgggctcaagtgatcctcctgcctgggccccccccaaagcactgggattacaggtgtgagccaccatgcctggcctatacacaactttattgaacatataaaaatttacctaagtaacaaaaagaggtaccatctttacagatgaaaggactcagtattaaaatatggcagtttgccccatattaattcataaaattcagtgtaattccaataaaaaagaatctgccaaaagctttttggatagaacttgacagacgaatcctaaaattcatataaagggtaaggataagaataaccaaagaattttgaagaataaggagggcacgttgatcttactatgtaacgagacacactatcatggcatcttgacaagatgagaggagagcagtagagccgattgggagcctagaaacagactcccctgttagtcggaagttggtaggtcacagatcgttaaggagagagtggactgcagtgagtgatgctggtgaaaatggtttttcatatttggagaagtaagttgttgtatcacactgagtgtgaaactaaggctgagtgtgatggctcatgcctgtaattgcagtgctttgggagtccaaggaaggaggatcagttgagcccagaagttccagacgagcctgggcaacatagggaggtctcgtctctacaaaaaaaatccggcacaacattaggcatggttgtgcatgcctgtagtcccagctacttgggaggctgaggtgggaggatcacttgagcctgggaggttgaggctgcggtgagccaagatgaccactgcactccagcctaggtgacagagcgagacccctgtgtctttaaaaaaaaaaaaaaaaaaaaaaaggaaactacaatctttggtaaacaactcaggagactatgatgctggggtgggaagggcttttttaaggcacatgtgaaaaacatcacaaagggaaagaatgatcaattaattaaaagttaaatcttgtgtagtctgtgacaagaaaggcagaatgttgataattgttgacactggtgataagaacatgggagctcattactgtgctttcgtgtatgtttgaaaactttcctgataggaagtcaacacacacaaacttacatgtagcacagaagtcaccatgaaacaaaggcctgagtcacattttgaagatgtttagaatgtataaaagttagaaatggctcataaacgtgttagctatctattgctgcatagcaagtaaccccaaaacttagcaacttaaatgcactcgtgtatccgagggctccactggagaaggagccacttccgagctccctcccatggggatggcaggactcggttcctccttggcctttgtctggacgttatccttagtcccctgctccatggggctcttcacaggacagctcacagcatggcactggacttttgagagagtgccagccaggcagaagccacagtgttttatagctgctctcaggagtggcattccatgacttttgctggaatctgttcattacgggcaagtcaccgggtcccacccccactcagggaaggagtcacacagggtgtgaacaccaggaagtgggggtcgttgggccattttgggagctgcctgcacagggccaagatgttcagccttactgttgatgaggtaaatgcagcatgatgtatttagatagcaggtcacactgaaggcaagtaagtgtggtggcatcaagtagcaagattgtgggaagtaggaaatccctggtgctagaggtggaggtggttgttctccgggaccaggcaacacatacagagatggtcattgagtcacagtttgtagttttgaaaaagtaggcgcttgtcattcttcatttgcaaagtcatgggtaggtaggctgatgtgtttatatgataaatcatttcacatcagttacaatgaacgaaccatatgtgcatgtttcacccggtgtcagtctcaaaaatacatggctgaataaagaaacaagttgcagggacaggcatgtggctcacgcctgtaatctcaacactttggaaggctgaggtgggtggatcacttgaggtcaggagttcgagaccagcctggccaacatggtgaaaccccatctttactaaaaatacaacaaaaaattagccgggcttggtggcaggtgcctgtaatcctagcttcttgggaggctgaggcagaattgcttgaacccaggaggcgaggttgcagtgagatgagatcgtgccattgcgctccagcctggacaacagagtgagattctgtctcaaaaaaaaaaaaaaaaaaaaaggaaacaagttgcagtcagatgtgtcccacatgttactatttaggttaaaacttacagctgtggcatgtgtctgtggacatgtggtaaaaatttaaaggtgtgtgggggcagacagaagagggctgtacccattatttgcaatattttctttcttacaaaaagcattctggagcaaacatggcaaaatgcaaagatttacttattggtggtattgagtgacgttttatttttcggtttgatcttttcactttttttttgaaagagggtctcaccctctcgcccaggctggaatgcagtggcgcaaccttggctcactgcaacccctacctcctaggctcaagtgatccttccacctcagcctcccaagtagctgggaccacaggcccacacaaccacacccagctaatttttctattttttgtagagacggagtttcaccatgttggccaggctagtctcaaactcctgggctcaagtgatccgcccacctcagcctctcaaagtgctgggatgacaggcgtgagccaccacacccggccttcactattaaaggttcaataaacttgtgtaaacgaacatcccatttcaggtgatatacttatactagatttcgagaagtagaatttgtggggatgagatcctgagatttttgtttgcttgtttttatgaggcaaggtctcacttgcccaggctggagttcagtggtgtgatcatagttcgccgcagcctccaactcctgggttcaagtgatcctcctgcctcagcctaccaagtagcttgggactacaggcgcactaccacgcctggctaatttgtaatatattttgtagagacagggtcttgctgttacccaggctggtctcaaactcctggccccaagcaattctcctgtcttggcctcccaaagtgctggcattccaggcatgagccaccctgcgcagcccgagatcctgagatttaaggcttcactgggtctttccaggtcacgatggccgaggcctcagaagacagtccgaggccaagtgctcctgacatggaggacttcggcctcgtaaagctgcctcacccagcagcccctgtcactgtgaagaggaagcgagttctttgggagagccaggaggagtcccaggacctcacgccgactgtgccctggcaggaaatcttggggcagcctcccgccctgggaaccagccaggtaaggcacacagctgtgatactgtctgtctctgaggggtctgcacagcccagggagcccgagatgcgtcctgacccctagggaggctgcttgtgagaaagtcatggcgggcattcccatctcaccacttgcacactggctgtgctcaccatccatcccaggaggaatggcttgtctggctccggttccacaagaagaagtggcagctgcaggcccggcagcgcctcgcccgcaggaagaggcagcgtctggagtcggcagagggtgtgctcaggcccggggccatccgggatggtcctgccacggggctggggagcttcttgcgaagaactgcccgcagcatcctggaccttccgtggcagattgtgcaggtatagaccttgatccaaggggagggcagtggctctgctgatggcccagggagggggtgtccagctgggccctgaggtctgggatgggagggttagagtgggcctggagtttcctgcccatcgtagggaggcctaaggccctgtgctgggagctgcaagctacctggaaggtggccccgtctgtgggttccagtgtgtcctgtgatgtgctgtatgtccgtgtggcctttcagatcagcgagaccagccaggccggcctgttcaggctgtgggcgctcgttggcagtgacttgcactgcatcaggctgagcatcccccgtgtgttctacgtgaaccagcgagtcgctaaagcggaggagggtgcttcgtatcgcaaggtagggaggagctggtgctgcctctgcagtcatctgggcagcctgaggtggctttcccatgatctagcctggcctccagcctccatctcctcagtaccttatggggatgttctaggaattcctcaaaacaacgtgtgtgagcgctgagcaccgagcctggggcagagcgagtgccgggaatggagctgctggtgtccttgtcacgatgagcttgtctgcccgcgaggtccatgttgcggggacaaaccaagtggcattggttagagattgtgaactctgtctccgtaggctctttggttgttaacagctttattgggatgtaaagttacgccatccaactcacccatttaaagtgcagaattcaatgacttttagtggcatgactattgccagtcaatagtgacattttctttttttttcttttttttaattttactttgatttctgggatccatgtgcagaaagtgcaggtttgttacataagtaagcacatgccatggtggtttgctgcacccatcaccccgtcacctgggcattaggccccacatgcattagctgtttatcctgatattccccctcccctcacccccccattcggatattttcatcactccaaaaagaaacctggcatcccttacctgtcaccatcctcccccagccctcagtagccactgatccacttcctgtctctgggtttgcctgtttgggcatttgatgtaaatggaaccctacagtaggtgggtctttgtgctgggcttcttccacctgcagaaactgcgagggttttcatgtggccatgagtgcgctgaggctcttagatggcatctccacccgaactccccgttgttaatgtgtcggctcagcacatttcttgactggatgctgtgaatcacgtaagaagtgacacgtagttggggagatgaggtgtgcatatttgtacctacacaaggaggttttctggagaaggtgaaactcgattccagccaggtgattcagtagaatgtgcatatagaaagtagacgcagagccaggtgtggtggttcacacctgtaatccccgcactttgggagaccgaggtgggcggataacaagaggaaagcggacgcagaggcatcgagaccacagagaacaggtgggactgtggggtttctacaccttcctttcgatgcgtggtgctgtggtgctgtggccgtgtggaagtgccctaacttttgggatgtttccctttatgactatcagctcatctcgagggaggttctggcgctgtgtgaatattctgtcctcaacgtttgactggatggtgtcagcatccatgtctcgtggggtccatggggctccaggatgatatcttcagattctgttcctctgtgtgtattagctgtttcctttataacgaagagctttgtgcagatcaggtagaaatgaactctattccttaaaaagcaagatacgagagggataatacgctttttttttttttaagcaagataaatgctttttccctttaaattatttttaattttcaaggtagggcatggcaaaatgggtttattcctttcatttttcctctctttttaaagtattactatggattagaggatttttgtttaacttttttgtttctgtttttgagaaggtctctcactccatcacccaggctggagtgcagtggcatgatcttgcctcactgcagccttgtactcttgggctcaagcaatcctcctgcctcagtgtttaatgttttaacatcaaccgtagccaaatcccgcccaacacacacacgttaggtatgttaaggtacacggtaggccctcactttatgttgttgataggtccttagaaactgcaattttaagtgaaatgactaagtaagatgatgtataatgaaacagattttttttcttctcagaaactataatgaaactgtgttggccaggcgcagtgctgcatatctgtaatcccagcaatttgggaggctgaggctggtggattgcttgagctcaggcattcgagaccagcctgggcaacgtggcaaaaccccttctctacagagtattttttaaatttatttatttttatttgtttgtttgtttgttttgagatggagtttctctcctgttgcccggctggagtccagtggcgcatctcggctcaccgcaacctccgcctcccgggttcaagaaattctcctgcctcagcctcccaagtagctgggattacaggcacgcaccaccacgcccggctaattttgtattttttagtagagatggggtttctctgtgttggttaggctggtctcgaactcctgacctcaggtaatccatccacctcggcctcccaaagtgctgggattacaggttgaaccatggcgcccggccccagaatttttttttttttttttttaaaggaagaaagaatgttgaacaaaatgatgttatttgaggacctgctatacattacttcacttaaccatcacagtttccaggaatccattgatgttaagtgaggacttactgtaatttacatatagttaagtgcagatttttaaatgtgcagttgattgggtttttggacacatgactatgcctgtgtcacccacacccccacccaggtgcagaacgtttccatcacccgggagggtgctcttgtccccctgtgcaaccttctgctggcctgatttctgtatttctgtaactgtgtgcatgtgactttctagaacttcatattaatggaaccagacagtagactctttggtggtcaatatcttcttgagactcaaattatcccaaattgggctggccagatcccttcaagctggcacctgagtccttttgacatgccctgttggtctttgaaaacttccttgctttttggccactaagagaggccaggctcaccttgaacttccagacgtggaattagctgttcctctaaagagcctgagcctcgttgagaggttatgttgagaaaccaagcttagagctcaaggggtatcatttcatctagattccttcagtgaacagccaggaaatatatacattttaaaaagtgcaattacactaattgttccagttcatatttaccagaacataatttttcatttctttgattttgtgtgtgtgtgtgtgggtgtgtgtgtgtgtcggtctaatttcatgttactggaaaaatctaaccctactggttctcttctcgcttgagaattattcagattttcctggttgttgttacgccaaataacgctttattgcaacctggacattttacatatttgagactttgggtatttttaaaaatcctttagcgtgtcaggtttttttgtttgtttgttttagcaacaaccaacacggttaattccagtgcccaagctcttccttgcctctttgtgcaaagcttccaatgtcagctcagcctccagagcctctgctgcgttgttttgggtcacctgtgcaagtgcagctcgtagtgagcctgggacttgtgctgctggttcatgcatgaagctagggtgctcctctccaggattcccccagccccccacacacgaagctagggtgccccctctccagctctcctctccaggattcccccagccctccacacagggagctagggtacccctctccagctcgcctctccagaattcccccagccctccacacagggagctagggtgccccctcttcagctctcccagaccccccaggaccccacacaggaagctagggtgcaccctctccagctctcccagaccccccaggaccccacacaggaagctagggtgccccctctccagctctcccagacccccccaggaccccacacagggagctagggtgcccctctccagctctcccagacccccccaggaccccacacaggaagctagggtgccccctctccagctttcccaggcccccccaggaccccattcacgaagctagggtgcccctctccagctctcccagacccccccaggaccccacacaggaagctagggtgcccctctccagctctcccagacccccccaggaccccacacagggagctagggtgccccctctccagctctcccagacccccccaggaccccacacagggagctagggtgcccctctccagctctcccagacccccccaggaccccacacagggagctagggtgccccctctccagctctcccagacccctccaggaccccattcacgaagctagggtgcccctctccagctctcccagagccccccaggaccccacacacacactctggctcccccaggggctctctttccgtttctctgactaggaaaatgtgatttctctcagtttttgccatctacaccctcaggttaaacccatgagagaatggaggaagatgaactgggaacctccccagatcagtgttgactgctgtattctgacagctcttgtctattctcagaggctgcaggttgcttttcaaaattgcgtccagaggccaggcatagtggctcacacctgcagttccagcgatttgggaggatcacttgagtccaggagtttgagaccagcctgggcctcatagtgagacctcctttctacaaaaaaaaaaaaaaaaaaaaaaagccatccgtggtggtgtgttccttgtcccagctactcaggaggctgaggctggaggaccacttgagcccaggagttggaggctgcagtgagctgtgatcacactgctgcactccagcctgggcaacagactaagaccctgtctgtaaaaaataaataaataacataaaaattacatccagagtttttagttgtaatcattgagagaggtggactgtggcgtggtgggtgtaccccgtcgctaggggcaccagaagtctaggactccgaatagcgtgtgctttgtgtgtgtaccacagacattaccacttacgcccagtgacgagatcatcgtcgtattctcgccaggtaaatcgggtccttcctcgctccaacatggtctacaatctctatgagtattcagtgccagaggacatgtaccaggaacacatcaacgagatcaacgctgagctgtcagcgccagacatcgagggcgtatatgagactcaggtgactccccagccaccctcgactgaactgggggaggctccagcagggtggtatggaggaaagaaacccgcccagggtgtgggctggggaacagcagcgacagtggactcgttcccacaggtgaggtgaatgtcagcagtgtgtctgccaaaagtggcctttgggcagtgggccgggcagctgcaggggcacagccacatcccgggcagaagtcacgtgggcagccagagcccccaccatccagcccttgccggcctgtctgcccgattcttccaggttccgttactgttccgggccctggtgcacctgggctgtgtgtgtgtggtcaataaacagctggtgaggcacctttcaggctgggaagcagagacctttgctcttgagcacctggagatgcgctctctggcccagttcagctacctggaaccaggtatggcctgcaccagccgcccatcatgtgcctgcctcccacacatctggggtgacggtcttgtttccttctccagggagtatccgccatatctacctgtaccaccacgcacaggcccacaaagcgctcttcgggatcttcatcccctcacagcgcagggcatccgtctttgtgctggacactgtgagtcctgggccctccatggcagcacattggctggggcagggtttggggaaggaggacatctcccagggtgcccaggccctccaggtcttgtcctcaagggcctttgcccatgagtgcttgtcgtgattgaattggcagtgccgtggcagtggtggagtctgccccagggctgcccccacttcctcctgcgcagggggaggctgacgtggcctgcgttggtctaggtgcgcagcaaccagatgcccagccttggcgccctgtactcagcagagcacggcctcctcctggagaaggtgggccctgagctcctgccaccccccaaacacaccttcgaagttcgggcagaaactgacctgaagaccatctgcagagccatccagcgattcctgctcgcctacaaggtgagagtggttggggtcttgctgtgtgagccccatcttctttgaggctgggtccacccaggtcttttcttccattttgccttgacccaggaggagcgccgggggcccacactcatcgctgttcagtccagctgggagctgaagaggctggccagtgaaattcctgtcttggaggaattcccactggtgcctatctgtgtggctgacaagatcaactatggggtcctggactggcagcgccatggagcccggcgcatgatccgtcactacctcaacctggacacctgcctgtcgcaggccttcgagatgagcaggtgagcacagtactgtcgttgtgggccagtggtccccaggcagagccggcctcggtggtctctgtgacccggcgatgtgccccggtgctgacctgtgccctggtgcaggtactttcacattcccattgggaacctaccagaggacatctccacattcggctccgacctcttctttgcccgccacctccagcgccacaaccacctgctctggctgtcccctacagcccgccctgacctgggtggaaaggaggctgatgacaactgtcttgtcatggagttcgatgaccaagccactgttgagatcaacagttcaggctgttactccacaggtaagtgggcgggaggacgaggcccatgagacctggctggtgtttctgccattctgtgacatcttctcaaggcaatagtgccgaggatgggctcagagttcgaccgcgcaggtcagagctgaggctgcaggagacggtcctggggtcaaggtccaggtggggcctcctgtgccctcgggaatctgaatagcctggcaggtgtgaggatgggtgtgggcaggtctgttgctggttctggaggtggtggtggctggagtcaggcccagggggctggtggtgctggagctggcaggatgctggctgagcatggcgtcttcctgtgcagtgtgtgtggagctggaccttcagaacctggccgtcaacaccattctccagtctcaccatgtcaacgacatggagggggccgacagcatggggatcagcttcgacgtgatccagcaggcctccctggaggacatgatcacgggtggtcaggctgccagtgccccggccagctacgatgagacagccctgtgctctaacaccttcaggtgccaccctctctgggaaggagtgttactaatagaagggtcttatcctttgcccttaatttggaaagctaaggtctaagacagggtccattgggcttcccttagtcttaatggcagagccagagaccactgtgtggcgagttttccatagtctattgtctttaccactgtgggggtccggcctggtccctggcgactgttcagtgtgctgcctctgacctccctgtggccagaggtacttcacacagagtctttctaaccagggccacttttcgatgtgaccaaaggtacatcacagggatctccagccagctctactgagtatgatgtgtgaggcatcagcacttaggtgtcaggagccgtcggtctgctgcagagggcgtggttgagggtcaggagccatcagtctgcggagagcatggttgagggcagctactcgcattacccaccagcggtggttcatgctgggcaatgcttgctgtgtaccaggaggtgggccgagcacttcgcattctgcctctgtccccacatcagcccagggacggggagcggttattgtctgtttttcagataaggaaactgaggtcagaggggctgcctttgtggtcataccacaaatgaatggaagggtaggtgctcaaaaacaagtctttgtaattccagagcctgtactcagctgtagttttaatgactccatacaaaaggggagagggagcatgccagagctgggaaatgaggcagggagaggactggtggaaagaggcagggaggcagttgggagccgggagcagggtcttggcagagagacagtagcccaggcctgaaaggtagaaggagtccaacagcagatacccaaactgccgctctggagaatgtggggtttgccaaattattgaagagtttgtgatgaaagggagttttaggaatgggacttggacctctgtaggttctcttgtaacattctgttcttgaccccattgaagttcccgcttcttcagtagggtgatgtgcagttttggaatcctttagctgaattggggttccagtaccagagcagctggcatctctgccccatgggaagtgaagggggccagacagggcgtgtacagtgcactggccaatgcctagctgtctggcctgtgaccagggccccccggaacgggaaacttgtttacactggcacacgcccttgtggcttttgtgtgacctgtgtctaggtaccacctgcctgaccattgcttcggtgtaggggcccagccttgtgttccccctagtgtcgtagggaagacccagcccagggcagcccctgcctcttcagagggaaggcacaaaatcagtcaccaccacaatagggaacaagtgcaaagatgtgttccttacagctcctgggcagggagggtgccgtgagtagggaggccatcctccatccctgggtcctgcaaggcaggactgaagagtcagacagggagggtgcccagggcagctaggcgtgtgagggaatggggtgtaggcatgtgttagttcacgggcgagcgcctgaatggtccatttaaaggaagtggcgggaaggcagggcccagcctgctaggcgggagagaggcctctaagttcttgtttctgaccagctggggccatgtgggtatggtgatgttttgttttgttttgttttgttttgttttgttttgttttgtttttgttttttgagacagtctcactctgtcacccaggctggaatgcagtggcaccatcttgggtcactgcaacctccacctcccgggttcaagcgattctcctgccttagcctcccgagtagcaggattacaggcatgcactagcccagctaatttttgtatttttaatagagacggggtttcaccatgttggccaggttggtctcaaactcttgacctcaggtgatccacctgcctcggcctcccaaagtggtgggattacaggcgtgagcctctgcatccggcctagtgtggtgttctgatgtctaggcagtggctttgctgtgtccttcctgtcagggtccccggcccgtcacacacttgctgctttgtactgtgctgccctcccgtcctgctttagaacacacagagtttgggatgcggtgaagcctgaacaagtttaaggaatgaaatgggaagaaacagatgaggcatgagggtgaagggatgaaatttggaccgtgacttaaggtggggacagtgagaaggggaggcgacagtgacggatttggacccagccgtgtagggaaaacctgtgcccatttcagttggagcgtcccgcgtggcagcagcgtgggaggctgagggtacgagggtgtcgtgcaccttctctttcaggatcctgaagagcatggtcgtgggctgggtgaaggagatcacccagtaccacaacatctatgcagacaaccaggtgatgcacttctaccgctggcttcggtcgccatcctctctgcttcatgaccctgccctgcaccgcacactccacaacatgatgaagaagctcttcctgcagtgagtgctcctcctccctgggctgtccaccgcgtcctcagctgggctggtcccttactccccagaaccagagacatggccagccagtgcctctgggataagtagtgtatttctgagtttgtggagcataacaatccaaaggatcccagagaaacacgcagctgctgctgcagcgtcgcctgcacatcctgcagagaacactaggtggcacctcctctcctgcccctttcctgcacaaagtcatgctacacattgtattgctgtgtgccttgttgttttagtgaaaatatgcctgtgtcaggagatctgtgtgaggacatgccatatgaaagaacatttagcctctctccagccttgtgccgttgttacaaatagcaaatcagtgagaggcttcatgcatgagctcatgcagatagatccgtggggtaattgctggggcgtagccctcttgcaggcctcagaggtgttgtaactcgggatgaatcctgatttgatggacttcaccagagcggccccacagaggccccttgtggacacttcttccctggccgcgcctcaccaacatggccggggattattacccaactgctgggataaaagtgcttcttggtgcagtcttaacttaggattcttacaatgaatgaagtcgaattttctcttctagtcctttgtctatttttctgtagttttggtggttcttctcttattaaatatcgaatgagttgtctccatacaaaaagttgccatttttctgtgataagaatttgctaattttttcctgtttttggttatcttttgcctttgtttgtggtggatttttgccatgcagaaatctttgctcttcattagcttctgggttctagtgtatctcggaggcttttctgcttcaggaccctcagctcttttccctcttggattttctgggtgccctctggctctccatgactgtggcgtctccaccacggactctcaacttgctccacaggctcatcgctgagttcaagcgcctggggtcatcagtcatctacgccaacttcaaccgcatcatcctctgtacaaagaagcgccgtgtggaagatgccatcgcttacgtggagtacatcaccagcaggtgcggctggctggtcctggtgacgcagcactgtggctttgagagggatgctaaaatgaccccctgaggtgccagctctcctcctgggtgggctgggaggtcgttagaagtgcaggactcaccatggtgaatctgagcagcgtgaaaagggggttaccgccacctgtgcgcggtagcagatcggaggccactcagctgtgcagcttgagttgggcaagttcaggaagtggcctgcctttgctaagaaggttccacagtgatttttgtttgtttgctttttttccccatggatattcagggcacagattcaaggtgccctgaatatatgcaccccgtaagtgttgacgttgtaagccttttcatagacgtcagtgttggcgagtggagtggtgtggttcccgggtgctcaggtgtgcacagctctcagctgtcagagcctggtgtggttttgacttcctgccttccaggccatgttcctgaggttccctcctaggccttgctgtgcttctcacacactcagcactatttaaatctaaatagaagacaaagcaacagaaaaatctccaccagcaacttttgttcaactgatagtaggaagctccctcctaggtgcgctcaccctggggatgaatgcagccctttctgagcacagaggggagttgcttgtggaggcacagagagtctgcatgggtctgatctttgcatggttacaggggtagcatctgggggcgctgcagaaaaggctgacactaaattgataataggccttatcactgagaagtaggaaggtagagcttataagactttcattcctaatcaaaccatatgcactggattaatttgaaacacaaaagcactgttgtcctcctgcagacccactgtggccccttatgtctatccaagatgagccttgatggtcagtggtcacgctgtgtgcctgggaaagctggcttgggctagaattgtatttcggagcatggctgagataatgggaaggatgtgcctctccccacgttggccatgggcagctccaggggtgccctgtacctgaggaggccggggttgctcatgtcgagaaacaggctgctattcttccttagcgcgaagagcagagttagggagaacataaagttctcctgcaggagctgcgatgtgggctactcagctgcattttgaaactgtgatttaggatgttcctccttccttcctctctttctttgtttattcttccattttttggggttttgtttgttttttaggagatggggtcttgctctgtcacccaggctggagtgcagtggtgcagtcatggctcactgcggcctcaaactctgggctcaagctatctgcccacctcagcccactgagtagatgggactagaggtgcatgccagcatgcccagccaatttttgtattttttgtagagacagggttttgccacgttgcctggggtggtcttgaactcctgaactcaggcgatcctcctgcctcagcctcccaaagtgctaggattacaggcgtgagccaccgtgcctggcctgttctttttttttttttttttttttttttttccttaaatggatctaatgtgcagaggattgggtcagcgctagggaggcttaaccgaggagtgacaaggatgacgatagcttaaaagagcttggcagtgggaagcactgtggttggttaccagcaggtgcaggtcacctaaggccgcagagcagaggcagaacaccctgtgggccatccccagcacgaggaggcacccagctctctttgtggcgccagctcccaggggcctggtgggcctccttagttttacgtttaccacatttccccaggaagcctgagggatgatgtggtctgaatgaactttcaaattcagtgttaagtaagtggagggtacagatagatacaaggggaaataaaggaaagttgagaacaaggtcgatttcactgaagcagcgtcttcaatgcttcctctgcagcatccattcaaaggagaccttccattctctgacaatttctttctctcgatgctgggaatttcttctctggatggatccatctaactatggcggaatcaaaggaaaagtttcatctcgtattcactgtggactggtaagcgagctgcagtgtggcacccgagccagctttgggggtcgcgttcattcctgcagcaagtgctgagtgctcagggccccggcgggcctggccgtgagcagcagacactgcacccgcatcctgccctcatgaacacggggagggaccatgcgcagacaagcacgtcagtgtggagtgtggcgtcagccctggtgatggcaaggcttgccgtgggcaacagggaggtggaggcccatgaggtggtgacagggaatccgagagctgatgaagtgcaccatagttgtgcgagcataaggcgcctccagcggatggacaccagggaggcaaagcacaagtcagtggagcagtggttgcagatgcaggcagagagctgacagagccaggcaacttgggcatggcagggcagggcctcggctttcgtggggatgggagcttctgtgtgggtgatgttggagctttcttggccccatgtggataacccaccattggagggcacaggcaggtaaagccggttagtgcctgtgtcagggagatgctgggcagcgaggttggtgagaagggcctgggtgggctttgaagtggagccaaggggccagcggatcggatgtgtgtaaatgcccaggtgcgggccaggctgtgggtgagtggaggtggctgtcgggagcagtctggggaaggggtcacgtctggctggggctcatggtgtttgcaaggttgagacgtgggtggtcagctggtgcaggagtggccagagagtggctgggtgggttgagaggaggcctgtgtcctccacaggggccctcatagtggactgagaggaagctgtgggtaccagagccaggggctcagatgtcagagggaaagccctttgtaaggacgcagacgcttctgggagctggcaggatgaagccaagactgcccaggacacctggatgggagcgattctggttggagttgggggataaaccctgattgaagggattcagaacaaagtgggagggtagaaactcaggcagtgtagaccgctctgaggaggggatcagcgtgtggtcagggcaggtggcagtgggtgtcggtgtctacacagacgtggatggtgccgtggcacgaacacaggctgcgcgggaggctgggtctgtgatggggtcgtgccgtcccaggagattcatggactcagaggagagaacagtcaccgggaagctctggctggttctttcgtccttggggggtgggagttcaacaattaaagtgaactctggaagagcagagtgaagctcacagtcccaggtcacgagcacttctgtgtgccaggcgcttcccacaaagcactttgtactgggagccaccctgggggattcacgcaggctccaggggatgccttgactgcgaggaaggcctctggtcaaacggggcagatggacccaggttggaggagccttcgctgtggcatcctacccctctaccaggccgcgatggtgcaaacacagccgcgttgtctcatgtgttacagcaagactcccagaaagcagggggagcagaggatgagcaggaaaatgaggacgatgaggaggaaagagatggggaggaggaggaagaggcggaggaatccaacgtggaggatttactggaaaacaactggaacattttgcagtttttgccacaggcagcctcctgccagaactacttcctcatgattgtttcaggtaagcccagagcccagggctgcgcagcccccactgaagggactcatggttagtagatgtggctcctgtgccatggtatcgcaagaagggagacagggaaaatcagatcgggcggagcctgcccagcagttgggactttgtgagccgaggggcctcctctccaggctccaggcatgttccactggagggcccggagaggggtgactgtcttccctccagcctttgctctcaggaaactccatggggagcggctgcccctggccgtgtcattgaggagtttcctagctctgctcccgccatctgattcggtaactcagtcacatacattcccagggaacatttgtgtgtgtgcacgttcagtagctgaagataaagccctgggtcaggtcagctgccccctggctggtctgtgaggcctaactttctggtgggggagttcctatgccttggtttgggtctgcaggcttagagtttgcaaatcaagctatgcaggttagtgtgcagatgaagtgtatcgaggaagcactgtttgtagttgacagccctaagttaaagaatgccctaagtaaaaacagcaggttgtgatgtgcacacacaggtggatgcggtcacagaggccttcgttgatgatcattttatatttttgtctacttgtccttgagtctttaactttctcagttctctcttgcaactttctatgtctcttttgaaaagttccgggttggccgggcgcagtggctcatgcctgtaatcccagcactttagggggctgaggcgggtggatcacgtgaggtcaagagtttgagaccagcctggccaacatggtgaaaccccatctctactaaaaatacaaaaagtagccaggtgtggtgcgcacacctttaataccagctactcaggaagctgaggcaggagaatcacttgaacccaggaggcggaggttgcagtgagctgagattgcgccattgcactacagtctgggcaacaagaatgaaactgtgtctcaaaaaaaaaaaaaaaaaagggtaagtgccaggtgacaggcccggagtagtttttggagaagcttgctgatgccaggggccctgcctttgcttgtgttgggagctgtctttcacgcgctacccagtgagaggcttagtgtacatggccccatttatacagttttctctctgacaatgaactcaggtgtcagcgagtgttccttctcatttccacttctcacttctctaatttacttttagctcatctaaaggctgcagataaaattattaacaatgacattttagcctcatctgtgaggcaatctgaccagccatgggtcccctcagattctagggtgtttgcagcagcccgactcagggcctgtggtgtgtgtgcctctccacagcgtacatcgtggccgtgtaccactgcatgaaggacgggctgaggcgcagtgctccagggagcacccccgtgaggaggaggggggccagccagctctcccaggaggccgagggggcggtcggagcccttcccggtgagcagtcttttgtcttttgaggccactgccatgtgccagtgacctaactcctctgtgtgccatgggtggtccccggtgccagtcccccaggtgggaggtccccagtgccagacaggtcccagacccctccctcagcatccttatacttccaggaatgatcaccttctctcaggattatgtcgcaaatgagctcactcagagcttcttcaccatcactcagaagattcagaagaaagtcacaggctctcggaactccactgagctctcagagatgtttcctgtcctccccggttcccacttgctgctcaataaccctgccctggagttcatcaaatacgtgtgcaaggtgagagtgccagcgtgcgtgtgaggagaggacactaacgtacatgtgtaaggcgagaatgttactgtgtgcaaggtgaggctgtaatgcgtgcaccatgaacgtgctagcgtatgtgtgcaagataaggacaccgacatacctgtgcatggtaaggatgttaatgaatgcaggatgaggctttcagctgtgcaagggggaggtacctacatgtgtagggtcagggtgccagcgtgtgcaaggtgaggagcaggtgtaagttacttgttcattccaccaacatttatcatgtccctgtcacatgcagccacagttgcggcatctgtgctcaggtgtgagcaagacaggaaaggtcctgccttgtggggcctgtctgctgccagccgacccgagaagggagagggccgttcagaggcgcaggtgctgtggggatggagcctgtgaggggcgctgggaccaggtgcaggaggagggaagacgcaaaggccctggggggtgagcttggtgtgttggtgaaggcacagccgaacacccagtgccaccggctgggaggatgggtcaccggagaccagtaggctggaccaggacccagagctgatgagatgagagcttgctcggatgctgaggcctttctgggaaaggcaggctgagtccaaggagggataatattaccagataacgaccgcgggtgtcagcccttacagagcagagtgcttcactgtccatttcctcactcagccttcccagcaaactgcatctcacacacggctaaggttacgctggagatcaggtgacagcctcaaggtctggttgtggtgaagaagtgtttttagctcaccattttaattcctttattgacttttacatattttaaattcatttttattaaggtgtaatttatatacagtaaaatgtactctgtggcgtgcagttctgtgatttttcctaggtgaatggaattgcatcatcatcagcaggatacaggatagtcaccgcccgaaaacattccccgcactgccctcctcacctgacaccctttagccactggtgtgtcttccgtccctgcattttttttctcttctagagcgtcacataagtagagacattgtgcagccttttggatgtggcttcttagcaaaacacacctggaattggttcatccacgcgctcgtgtgtatcagaactccctttctgttgcgagcagtgtccattgtgtgggcaaaccacagcttgcttttcattcactggtggaaggacatttgcgttgctttcactttggggtgattaataacaaagctgctgtaaacattctgtaggtgtaggtttttgtgtgaacataaatttcaattctctgaggtcattttttaagtgtttgtttaacttgataagaaactgccaaactcttttctgaagtggctgcaccgtgtcagggtctcctcagcagtgtgtggcaagagttgctgttccacatcctcaccaggacttggtatcattgggtttttaaattgcagctattccagtaggtgtgtagtggtatcgcattgtgtttctgatttgcatttccctggcgactaatgatgtggagcttttttttggagatggagattcactctcattgcccaggctggggtgcagtggcgcgatctcagctcactgcaacctctgcctcctggttagctgggattacaggtgcctgccaccacgcccccccaattttttgtatttttagtggagacggagtttcaccatgttggccaggctggtctcgaactcctgacctcaagtgatccacctgcttcggcctcccaaagtgctgggattacaggcgtgagccaccacgcctggctgtggggcattttttaatgggcttctttgctgtcctggtgtctgtcctctttggtgaagttttaggttttatccatttgagttaatttttatacaatgtgcatgctgtagatccaagtccatatttctgcatgggatatctgattgcaggcatatcctgtcttattgtgcttcgaagcggttacctgtatttttataaatggaaggtttgtgggaatcttgtcttgagcaagtctcatctttccaacagcatgtgctcactgtgtctgtgtcacatgttggtaactctcaggatatttcagacttttccactattattatatcagccgtgataacctttgatgcttctatggcaattgttttggggcgccatgaaccgtgcgcatagaagacaatgagcttcatcaatgttgtgtgtgtcctgattgctccactcacgggccattctgccatctcgccctttctccttgggcctccccagtcccggtgacacaacactatagaaattaggtaagttaatagccctgcaatggcctctacgtgttcaagtgaaaggaagagtcacacgtctctcactttacataaagagctagaaatggctaaacttaggaaggcatgttgaaagtcgagacaggctgaaagctaggcctctcacaccagttagccaagtcaactgcaaaggaaaggttcttgaaggaaattacaagtgctcctccagtgaacacatgaaagataaagaagtgaagcatcctgttgctgatatggagaaagttgagtctggatagatcaaaccagatataacatcccctcaagccagagcctaatccagagcaaggctctcactctgttcagttccatgaaggctgagagctgaggaggctgtagaaggaaagcttgaagctggcggaggttggttcatggggtttagggagagaagccgtcccagtaacataaaagggcaaatgaggcaacaggtgcgggtggagaggctgcagcgagttctccagaagatctgtctgggatcattggcgaaggtggctacactgacaacatattttccgtgtagacaaaacagccttcttttggaagaagatgccatctaggactttcatagctagagaggaggcctcagagcctggcttcagaggaaaggctgactcttgttagcggcagatgcagctggtgactttaagtcgaagccactgctcattcagtcttttaaggccactacctgcagctcagaaaaagattccttccaaaatagtactgctcattgacagtggacctggtcacccaagagctctgatggagacgtacaaggagatgaatgttgctttcatgcctgcggacacagcatcccttctgcagcccatggatcaaggagcaatttcgactttcaacgtttattatttaaaaatatatttcatgaggctatagctgccatagatagtgattcccctgatggaactgggcacagtaaattgaaaaccttctagaaaggattcaccattctggatgccattaagaacatttgtgactcatgggagaaggggtcaaaatatcaacattaacaggagtgtggaagaagttgattctgaccctcatggatgactttgagggattcaagactattgtgggaggcgtgactgcagatgtggtggaaacagcaagggaactagaattagaagtggagcctgaagatgtgaccaagttgctgcaatctcaggacaaaatttaacagataaagagtggcttttcatggatgagcagtaaagtagttttttgttttgttttgttttgttttgttttgttttgttttgttttgagatggagcctccttgctctgtcgcccaggctggaatacagtggtgcggtcttggctcgctgcaacctccgcctcctgggttcaagtgattttcctacatcagcctcccaagtagctgggattacaggtgcccgccacaatgctcagctaatttttgtatttttaatagagacagagtttcaccatattggtcaggctggtctcaaactcctgacctcaggtgatccacccgccttggcctcccaaagtgctgggattacaggcacaagccaccacgcccagcccaaaaaagtagttttttttttaagatggagtctcgcactctcgcccaggctggagtgcagtggcgcgatcttggctcactgcaagctccctcccaggttcacgccattctcctgcctcagcctcccgagtagctgggactacaggcaagcgccaccacacctggctaattttcgtatttttagtagagacagggtttcaccatgttagccaggatggtctcgatctcctgaccttgtgatctgcccacctcggcctcccaaagtgctgggattacaggcgtgagccaccgcacctggccaaaaagtagtttcttgagatgaaagtgaacattgtggaaatgacaaaggattgagaatattccataaacttagttgccaaagcagcagcagaatttgagaggaccgactccaattttgaaagaagttctactgtgggtgaaatgttatcaaacagcatcacatgctacagagtctttcatggaaggaagagtcagttgatgcagcaaacttcattgttgtcttgttttaagaaattgccacagccaccccaactctcagcaataccaccctgatcagtcagcagccgtttacattgaggcaagaccctccaccagcaaaacgattgcgactcactgaaggctcagatgatcgttaatatttctgagcaataaaacattttaaaattaaggtacatacattgttttttagacataatgctgttatgcacttaatagactacagtatagggtaaacctaagttttgtctgggtagagtgactcacacctgtaatcccagcactttgggaggtcagggtgggttgactgtttgagcccagcagttcaagaccagcctgggcaacatggcaaaacccatctttacaacgattacaaacattacctgggcatggtggcgcatgcctgtcgtcccagctactgggaaggctgaggtagaaggatcaattgagccccaagaggtcaatgctgcagtgagccatgattgtgccactgcagtccattctgggtgacagagtgaaatcctgtcccaaaataaaaaaaatcacatagctttttttttttttgagatggagtctcactctgtcactcaggctggagtgcagtggtgcaatcttggctaactgcaacctccacctcctgggttcaagcgattccctgcttcagcctcccaggtagctgggatcacaggtgcacccgccaccatgcccagccaatttttgtatttttaatagaaatggggtttcactgtgttggccaggatggtcttgaactcctgacctcaggccatccacctgccttggcctaccaaagtgctgggattacaggcgtgagccaccacaaatcacgtaacttttatatgtactgagaaaacaagcgtgagccaaaaatcatgtaacttttatatgcactgagaaaccaaataatttgtgtgatttgctttattgtgatgttagtccattgaggtggtttgaaaccgaacttgccatatctccaagatacgcttgtattcaagaaccatttgttgaaaagactattctttttctatcgaatcatctttgtacctttttccataacttagtaaccttatctatgtgagtctctttctggattatgtattctttttttcgatcttgcattcaatttgctaatatctcgttgcgcatttttgtgtctgtgctcaggctgttattggtctgtagtttcttagtacggtctttggttctagtatcaggggatgctggcctcatagaatgggttgagtgctctctctcttcagtgttttgaaagatactgtgtagaatcagcagcatttcttccttaaatgtttagtaaattccccagggaagcctgtcctcaccgatggaaaactgctaatgtagagaagtcagctgaggcgtctaaagggactaaggaagggaggaaaggacaccaggaaactgtagcctaaggtccagagggttctggtccagacagagcagcagggaggccccgggagctccttcccgatgtgggctgtggtctctgcaggtgctgtccctggacaccaacatcacaaaccaggtgaataagctgaaccgagacctgcttcgcctggtggatgtcggcgagttctccgaggaggcccagttccgagacccctgccgctcctacgtgcttcctgaggtcatctgccgcagctgtaacttctgccgcgacctggacctgtgtaaagactcttccttctcagaggtgcggctgagctccagcgggcccttcactgtggagcagaacatccgagggcactgcggtgtcttgagggcttctgcagctccagctctgtgggtcacacctgctgcccctctgactcacatggattggcaacaggccccttcccaggcctccccacaccatgttcggaatgttgtcctaggaagggctcaagtgcaggtgggaggccagagtgcgtgcagctgcactcaggagactcgcccgtcaccaggcgcttctcacagccccttcctctcctgagatcctgcccatggcactgtggtctggaggctgggctggtgacctctcgcactcttgctctgcctaggatggggcggtcctgcctcagtggctctgctccaactgtcaggcgccctacgactcctctgccatcgagatgacgctggtggaagttctacagaagaagctgatggccttcaccctgcaggacctggtgagtcgtgcatgccgcctgcccgtgtgccctggagtccacaggggggtttctgtgcactcccgggagccggggtgtgtgcaggtcctgaggcacgccctggtgtcttccaaggggcctgccctgcagaccagtccatgccctgagcctgatggactgttctgtccacactggttgagcacctgccttgggtcaagagctggccttgtgggtgcttcgttctagcggaaggaggcagacactcccaagtgtgaagagaaggaaaggaggaagagggagttgcacagctcggccacaggaaggtcttgccgaggggcatctgagcagaggctgggggacgcgccaagctgccgtgtggtggtgcacggcgttcaggcctgcaggatggagggagtgagcagggcctggaggaggcctcaggactgggcatctggggtggaacatccacagcgagggtgggtgtagggaaggcgctggcaccgtgggatgaggtcgtgcattttactcataaccgagggctggctgcacacagcaggggctcgaggcttactgatgggcccacgaatgtgtctcgcgagcctgtgaagaagcagcaggcaggtctggccagcgcgggagggctggcgcccatcggggctgctccctttcaggtctgcctgaagtgccgcggggtgaaggagaccagcatgcctgtgtactgcagctgcgcgggagacttcgccctcaccatccacacccaggtgggctctccctcatctgcctcggctcagcctggcctccttggcctcctctctgagtggactggggtctcactgtgcctgtttattcctgcaggtcttcatggaacagatcggaatattccggaacattgcccagcactacggcatgtcgtacctcctggagaccctggagtggctgctgcagaagaacccacagctgggccattagccagccccgggccccgggtgcctctgcgtccgtgccaggcctcctgatgccaaggccacatccccgtgcttccagtgaccagaccactgaccaccctgactgtccaaacctgtgaccccaggccagggaacggggaggaaaccaaagaaaaccattttcagggagctcagacgtcacaggagggagcgggagcaggatgtggccctggcctcgccagagcacctgaagaagcaggccgtgagcgaggctgcgagtgccctgggcgccgtttctcacgcagtgaatgcttttccaggcctctgttgcttcctgcaccacacctggtggggtgggagcgtcctctaggtgcccctagttctttgtcctgcctcccagagggaggaaaagcccctgggggcttctggctccctgagattgggctctgagacgagacgggttcccaaggccctggtggggctggagtctcacctgtttgcatggagaaatgggctggccccacagcctcacaggagcagtttgtgggctggtttccccaggaatccagaccctaacccgtgagaatctggattttggcttgtgagccctgcttatttggagccgggtctagagggaaccctctatcagcctcaggaaaacaagacctctgtgcacctcacttttggctcactgcagcccttgtccttcacctccacacaggaccagctggaagcagaaagaagaaaggccaatttcacagggcaccaaacaagtatgaaatgtaaatcagaaatgcagacaccccagacgagagcctcacaggagggagggggccccacaggctccccaggaggctcgtgtctttggcccagagccagccttagtttgtccctgccatctactgtctgaggccatcgctgctacactttgtttttatttgtattt

SEQ ID NO: 15743 - DNA, 30167 bp, Homo sapiens
atcgagccgggaagatggcaccgcccacggagctgctggccaggccggagcgaggcagcgcgcccggctcccgcgccatggggcggctggtggctgtgggcttgctggggatcgcgctggcgctcctgggcgagaggcttctggcactcaggtaggtgggactcccgcgcgcccctcctcggcggtccccaggctcggggtggccgcgtggtgcggggagggcgcaggctgggggagggattcctgcgggacctggccctgcggccgggggtggagaatttttgaatgctgtccctcccccagctagttgaacccccatcaccccgactctccgcttctagtgaaaaaactagcaaagtttggagtgaatcgcgacactttcttgaaagtttataagcccttgctgctaacaaagttctcttctgcttaggctgacaagagaatgctttgcaattacccaagggccaaactagtggtttaaattgaaaacaaaatgactactcatgcattgaaaccttaactatgaagatttatttcaggtcattggtgctgtttctccttgttgcccaaaccagacccgtctttaataaagttgttctccacccatttctgcatagtttgagaaactcttcagctgtagatcaaagacacttgaaatattcagctactgttcttacttcctatttattcaccagggaagcctgaagccagaatgccagacagcgcagacactattccatctcgcattttagttttaatgaaaatctctggtaggtagacatcatcgtttataaattaccaactcaacgtttgttttttgtttattttattttttgtagagatggggtcttgctgtattgcccaggctgttccctaactcttgcactcaagcaatcctccagcctaggcctccccacagtgctgggattacaggtgtgagctgttctgccctgcctcaaccaaaattttataggcctcatgcaaaagagttccagaaagactgagcacctgctatgtgtaatgttctctcttaggcttctatagtagagtacgacccttatggagtttgatacaggggaagagagaattaaaatacagtaaatgtataaattaggatgttctaaggacagacacaaatgaaccgcataggcttaaagaggaaagattccatcccctgagggtggagttctagagggaggaagagacattcgacctgaccttgaagggtgggtgcaacacatatgagcatgaaggggcccatgccaaatgtatagtgcagcaggagcaaaggggctaaggtgggaagttggaagactagcaaatgggccaatttgaagggagcataaagtcaggagatgagaatagtagggtggtgggaaggataggttttgaggccattaaatataagttgaaaaatggggccccactttcataggcccaatagtgcttcaaaagggaaatattggtgggttttgcttttcaacaagaacttaatataactagttgtgttttatagagataagcctggaaggggggattggaggagagcaatggttctctgtacattagaatctcctggagggctggtgtctgagtggcaccaccaaagattctgattcagctgttctggatcagaatctacagctcacacctgtaatcccagcactgttggaggcctaagccagaagattgcttgagcccaggagttagtgacaggcctgggcaacatagcaagatcccacctctacaaaatgaataaataaataaataaataaataaaaaacaaaatttgagttggtaatttataaactatggtgtctacctaccagagatttttcgttataattaaaatgtgatatggaataatgtattgtttggcaagctggcttcagggttcccaggtaaatagataaataaggaagtgcataatgtaagaacagtggctgacagtagcagtggcattttttatttttaaaaacattcctgataattctaatgagcagtcaaggtcgagaactactagaatagagagcagacatggggtaactggttaaggtattgcagtaggtcagagaggataacagggacccaaactctggaaccccagggatgagggagaagtcaaaggtgctaccagagtttgtgccacagctccactgtcccatggttgtagtttcatctactgataaagcagtgcaaagaggaagcgtgtggtggctgagatgggagtgagatttgaggaaagaacgcttatgggtaggaaatggacatgttgaccttaattttcatgttaggtaatgcccattgtgctctacagaacattcatgagttggatgactttgtatatgatctgtcctgctctccatttcaaaggcaagaccaccaaaattcacaagcttattatgttgtcactaatgtgtaagccaccagtttttctgcaagttggaagttttctcaacagtcaaatattcccccttctcactaatcttaaggttttaaagttatagctgcaaatctaaaaaaaaaagaaaaagtaaataaaacttattgacagaatgcctgatagtttatttacaggtttttgtttgtttgttttttgtttttctttgttttttattttgacacaaggtcttgctctgccgcccaagccagagtacagtggtacatcaaagctcactgcaatctcaaacacctaggcacaagcagtcctccctcctcagcctcctgagtagctgggactacagatgcatgctaccatgcccagctagtatttttatttcttgcagagacagggtctcactttgttgcccaggctaatctcaaactcccagcctcaagtgatgctcctgcctcagcctcccaaagtggtaggattatacacatgagccaccaccctcggcctactttacaatttgatgcaccttttctttacgtgactgtgatgcactttaatgggcagtgactttataaaatggtaactttattggatatgtggagccccaaatgggctgacgtgagaatgttggggtaggtggtgggtggctggatttagcaaagaaaaatgtaggctacccagttaactttgaatttcacatggatttttttttttttttttagtataagcatgaaatacttataccatacttttagcattaagcgtggaatttgggacataattatactaaaatatcattcattgtttatctcaaattaaaatatcactgggtaccctgtattttatcatatgttcgagtgccttctgtcagaatttggtgaccctttgagtctgttttaaaaaggagcatgtttggccggacacagtggctcacgtctgtaatcccagcactttgggaggctgaggcgggcagatcactagaggtcaggggttcaagaccagcctggccaacatggtgaaaccccgtctctaataaaaatacaaaaattagccaggtgtggtggtgcatccctgtaatcccagctacttgggaggctgagtcaggagaattgcttgaaccccagaggtagaggttgcagtgagccaagattgagccactggactccagcctggacaacagagaaagactccctcaaaaaaaaaagaaaaaaagcatgttcccacctccccataaggaaaggctcttcagaggaagttgaaggaacagaggctttatgtttgatttttgctttaatctgatgcctactgtttgattattcaatatttagagatggtactttggcaatcaagttatttctctccccaggttgcccacttcaatttttagtataaggatgtcccagagggataaatgccatcaaagttgtctttcttcttctgaactgtaactgggattccacaccctccttttccacccctccctagttgagcaataaaggggaaaataacagtatacaaatattcccaggccagttcctggtgtcaaggtacacagccatggatgaatcatgaggcttgagtgcatcagagacctaagcgtgggcaggaacccccagagtacccatgtgaatgttctgcttgctgcctcgcaccttttatgacaattcccacaagaagctatgtggtctgtttctacttctgaaagagcagcctttttcccttttttttttttttaaaccaccatcctttaaatcatttattatgtaactcttgtgtgctggtcagtcagtgtgtcaaaagtgtaaaaacttctttatttatttttttaatctatcttttaaaaaatattttctttctttttttcttttttcttcaaggcaggttcttgctctgtcacccaggctggagtgcagcagcacaatcatagctcattgtaacccagaacacctgggctcaagcaatcctcccacctcagcctcctaagcagtgaggactataggcatgcaccactacacctggctaattaaaaaaacatggccgggcacggtggctcattactataatcccagcactttgggaggctgaggcgggtggatacctgaggtcgggagttcaagaccagcctgaccaacatggtgaaaccccatctctactaaaaatacaaaattagccaggcacggtggcacatgcctgtaatcccagctactcaggaggctgaggcaggagaatcacttgaacccgggaggcggaggttgcagtgagccattgcactccagcctggcaacagagcgagactctgtctcaaaaaaaaaaaaacaaaaaaatttttttgtagagatgggggtcttgctgtgttgcccaggctgatctcaaacttctagccataagtgatcctaccgcatcaacttcccaaagcactgggattatgggtatgagctactgagccctgccaaatttctttatattaaaccaaaacgtacatttactgatatttggaaagaaagctcttttacttttatgccttcatccagtcttcatagatatcttcccttttacattataactgtaaatactgaggttagagaggttaactagttagttcaacagaataatataaatattgaataatataattaatgaataattagtgctgaacctgtcgcctcagccaggtctcctgattccaaatacagtttgccccagctccccacagtcttctagcttctctgccagtggagcaaattttccctaggtttacaggcctaagcacagattcttagttacttagtgcaagtattgccagagcccaaggggtgaattccaaagggtttttacaaggctatacataaaagataaagccctggcttgtatatcacttgcacataggagataaagccccagcagttgtatgtaaatttcaaaagcagagaagtatggcacaaagaaactcctgatagtaacactgtgttcccactttgcttaggggcatattggcaccgtagcatggtacacccttactgctacctgccatgaggccagataatagctagcagcccctggtctcattctactctggatgggtactgctgtttcctgaatgaaagacactgagattgatttcatgctaatgactgttggttaagagttcatgctttctattcacaatagcaaagacttggaaccaacccaaatgtccgtcaatgatagactggattaagaaaacgtggcacatatacaccatggaatactatgcagccataaaaaaggatgagttcatgtcctttgtagggacatggatgaagctggaaaccgtcattcttagcaaactattggaaggacagaaaaccaaacaccacatgttctcacttataggtgggaattgaacaatgagaacacttggatacaggaaggggaacatcacacaccggggcctcttgtggggtagggggaggggggagggatagcattaggagatatacctaatgtaaatgacgagttaatgggtgcagcagaccaacatggcacatgtatacatatgtaacaaacctgcacgttgtgcacatgtaccctagaacttaaagtataaaaaaaaaaaaaagttcatgctttgtggacaggtagcctgagttcattcatagctctactatttacctgaaaccttggactaattatttcacttttctgtgccccagtgttgtaatctgtaggatggggtactgcctgctccacagtgggactatgagaatgcttaaaataatgccaagcgcacagtcagctcaataaatgtcatctatgtagacaatgaaattcaagcataattccttaaacctttgtgccatacatccctttggcagtctggtaaagccttcattccttctcagcatcatgtttttaaatgagtaaaataaaatatataggattacacaggaaaccaattaaatactgctaccaagctatttaaaaatctatgatataatatgctttttaaattaaacccttaaatggatctagaggtaggtaaatgtctaacagcagatattttgaagttgcaatgaatgtaaatggcactttgagctatctacaactgaaatgcgatagaaaagtatctataatttctattagtgacagtcacaaatactactaatagtattgtggtttgttgcttatactcatcatcaaaggaaatactcaatttgagttaaaggtttaaataaagatgtatttttcccccatccaagttcatggatccctgaattctacccatggattccttggtcactggactccataggggtcacttggggaatgattgtgacaccaatgaaggaagccagcggatactgtttgctgtattatacctaccataggctcgtgatgaggaaataataaaataaataactgtaatgaaaaagaaaagaaaggaaaacaaaaggaacctaaaacagagaaggcaaatagctttccttttgagtgtcaattttaacagactccctgtggttgcgaaacaatgtgtctgaggctggctctgggttagagggagagtgctgttattgattagcaattcctgcatgacagcagagtggcaacagccatgcatctctgacctggcacagtcataagcatgttatagacataaagtgttagggaacaaataggctctagcaaaagtaaagagtgttcctcctctcatatcatcacttatatgtgtttataccatttatgttgtattttttacatgaatacttttagatttattaatctaatccaaaaaggtttgtatagctttctctatattaagagaaatatatgtatttcttaaatacacaaagttcttaaatctgatgccagcgaggattgcttccagccacaagtaacatatatcagattaatagtagttcattcaaagagggatttattttcctcacatgaaaaacagctctgtgggtgacccaatatagagcttgttcattgagccagtgattatatcaaggaactgggttcttcatatattttcattctttgatctccccctattgactttatagctgtatctttctcaaggatgcagaatggctgccgcagtctcaaacactgcgtgtgtgttcaaatcatgaagaaaggagattgagtgatgccagctagctctcttctcgtgactctcctttgtatctagaacacagtgtctttccccaaaacctgggtcatatgactacacctcaatacagcggagtctgggaaagcaaatatttgctttgcccaccactacaatagaaacgacaagggagaaagaaagggggttgggcatggcgttaattttgtcagccgctagggtctgccacccagaaaacagaagtccactaacaagcagggaactgattgttctgccagggaaaaagtctggcagtttcctactgaagaaatttggaagtcttgatggtccaggaaggataaaggcaaaaccttcattttcttttatcaaaaaggaaagccaagaaaaaaattagttaagtagaagttatgcacaaccctcatgtaactcttccatgttaatagcaggtaggctgcatatgaaaacatgatattatacaagaaaactagttgatgaagattgccctatttagcaccaattacttacgcaaacctaagttgactctgaaacaggaaccccatattaaacttttcaaacacatcagaatatgttactttgaacagattttatttaatccaaagagattatctttgaaaaaggtagatggtaaacatcgttatccctatttttgtatagtcaaataggcatagtagtaagttgtgtaaaattgacatccaaaccaatgcatgatactaaaacttggtgtacaaacagcagttacatcctattgctttgtatctacatctgtttctggagtcatataacatttgtagaatcttggaggtgttttaggctcatccttattttatccataaagaagactgacacctatagagattaactgacctgccaagggtcatggcagtttcactgctgagacaagaacacagatccctttacttctttctgagaaaagtacaaagtagtttaaagcaaaagcttccctgcttccagcacttctggctaagttgcgccgtgggaaaattgttttgtctgattcagttttctcatcttttaaactggaataatgctacctaatttacagggttgtttgaagaattaaatgaatgcatggaggtaaatcacttagaacagcggtaaattatacttttttattatttatttcctttgaccacccacaattatcatcagtgtcatcctcatcatcacaattaagattactaccacattaggctacataaactttttttttctctctctgttttataatttcaattttattttagattcaaggggtacatgtgcaggttttacatgggtatattgtctgatgctgaggtttggggaacaactgatgccatcacccaggtagtgagtatagtaccctatagtttttcagcccttgtctactcccttcccttccccttctagtagtccccagtgtctaccatcgtcatctttatgtccatgtgcaccattgtttagctcccagttaaagtgagaacatgcagtatttggttttctagcttatttttcctctcttaaatcacttctgtgacacgtaggccatgagatttattgtattttttaatgccttatttaaaaatttgtattatttaatacatttaatgcattattttttattatatttaaatattgatttatttgtactttttgccttattgctatattgtttcaaaaaatttaacattatttgagttacatgatttcaaatacatactgattaacattttaattagaaactttatgtctgatatgaattgccaaaatgtgtagttggtacaacctatgagtcattctgggttatctagaagaaactggtagcctgccccatactccagaagccttccccagtgtctagacctcagaagctgtcaggaatatgcacaggagaaggacacatggcaaatagctatttcgtctcttaaatgtatggtatgtgggaaccactgaaaaatgtaaagtttctacaaggtgctatttttattatttatggctctagagaacagagaaggtgaaaaatgtgagagagaagggaaagccaatagtatgtggccttcaaaacaaaagatcccacagatattgtcccaaactgcttcctggccctctagagtggagagggagggggaagacatcctattagagttcaacattctcttattatttccttcttttaattttctgggtatacaacagcaaatagttttgctgaagtagttacagaactagttggtgttctccaaccttcctattccaatacatactgtcatggatgggtacactaaaatctcagaattcactgctatatcactcatccatgtaaccaaaaaccacatgtacccccaaaagctattgaaataagataaatacattcttatttaaaaaaatactgtcatagggatgctaccttcttttcttttttgttagtaactatttgtgggatgtctttggtgtgtcaggctctgagcaatgccattttctcttggcttctttgcagtctctgtgtgaggcttacagtcatttttcacgtttgactcttcagaaggaagacagggctactggttctacatctggaactcttttcccacaacaccaacactgagaaatgtgacatggtgctgtgtttacatttgcataggaacttgcattataagttttatttgttgagttattggctttttttttttaataacccacatcagtatatagaactttgcaataggcatttttgttttaacttcatttctggtgcagttttattttcctacccttgtctttctattttctctttcatctgctttagacttaaactgtgttttatgtattgctgtaagcctctttaaaccctttctaaaacaaagcagggaatacataaacaaatagttttttgttttttgtttttttttctttgtaacagaaatcgacttaaagcctccagagaagtagaatctgtagaccttccacactgccacctgattaaaggaattggtatgtatatgaaaatgcttgttgggcacattgcattttttggccattaacattaaaacactcattaatggcattttagcatgaaattactgcttttcagtggataaatcacattagatcaacaaaaacctctttggtcaacctcttgatctgatgaaccctgtatttattcttctttcctaccctcactgtaaattattcttttttgtgtgtaattctatgtttagcatttgatttcttgcttgttttgtgacttctctgaactatttttgttgcgtctgtattgtttgtcaggtatggccgctgcagtctgtgttctgtgagccttgtggtcagctagtgaaggaagctttatgtaggcagtgacagcatttaccctgctcactactctataactaggatctgatcttatggctaacacgtaactgaccaatatggtttggttgtgtccccacccgaatctcatcttgaattgtagttcccataatccccacgtgttgtgggagggacccagtgagaggtcattgaatcatgaggtggttaccctgtgctgctgttctcgtgatagtgagtgagttctcatgagatctgatggttttataagggcttttcccccttttgctcggcacttctccttgctgccgccatgtgaagaagggtgtgttttcttccccttccaccaagattgtaagtttcctgaagcctccccaaccacacggaacagtgagtcaattaaacctctttcctttataaattacccggtctcaggtatgtctttattagcagcctgagaacggactgatgtaccggcacttcacaatatgtattgtaaaaacttgtttttattttatcttctaagctatgactgcagagggggagtctccctcttcccttgactttatgtaggatgtattgtggagtctgagtctttgagtaggggttcctaagagcaagccccaattttgctatagataaggagggatctgtccagattcttctccagcactgagggtctctctggtgtgtttgcagtttttctccaaggtagagtctgtgtcttgctgtcttttaccctttatcatctactaagtacatgtccctagtacataatagactagtagttagattatcaatgaacaataaatattggctttccttttttttaaattttaattttttttttttttttttttgagaggtggcctcactttgtcacccaggccagaatgcagtagcgcaatcttggctcactgcagccctgatatcctgggctcaagcgatcctcccgcctcgtcctcccaggtagctgagactacaggcacatgcccccactcatggctagttttttatttttgtagagacagggtcttgttatgttgtccaggctggtcttgaactcctggcctcaagcaatcctcccagcttggtctcccaaagtgctgggattgcaggcatgaggcactgagcccagccaatattggctttccttagatatggttcatggtatgattagaaacaaaaagaattagcagtcaaaacacctagtttctagttctattctgccacaatgtaaccttaggcaaagttggtttttgtatttgtcacctataatgatgagtttgtgattagactaatggtttttagactttaaaaagcctgggaccatttatttataatcttactctgagagccacagtgtggaaataactagactgtcattgagtcacttctagtcctttacaacaacatccttctctagaggtaggagagacaatttaatattttgttttactctttagaaattaaaactcgggttacatggaaatgttctcttctctgaataggtaacattgttaaacaagttttgagtgtccttccatctttttctttttatgaatactcctgtacataatttttaaaaacataagtgaggtcaaattatgcataatatttcaaaactagctttttgtacttaatactaggttttggaaacttatgtttgtacataatgttaccttttcttcacaactgcacagtattttttgtgcaaagttcatataaacagtgtatgtgcaaacaatatagaaagatataaaatggaaagtaaataaaaataaaaatctctcatcaaactcttcatcacccccaacagaaataaccccaaagataaagctcccttttttatctttcctgatagtttcagtgcatttgcaaacaaatatattgactctttttttcacaaatagaattttagtgtaaatatttcacaaccttcttcattcctaaaacagtgtgagcagctttccacatcagcatatatagttactttgttctttttaatattttcacattccatgatttatttaaccattccccttttaatgtacatttgggttgttacagttttttgcaactatgaacaaatcagtgaacatcattgctgttgagtttgtgtgtctgtagaatatgtccttaacaatgggattgttgttcccttagaatatgtgtttagagttttgacagtcattgctaagttgctctcaatttggcaacagtaataaactcagtacctcatagttgtaaccacattcactccagacagagttctcagcactcttttagtaaaaataaaccatcagttgacagtgccaccttcagagtttctctacaaataccttgcttgcctccctttctttttttcttcttttaaatcagcttcctcaggttgatctgcctctcattccttaggcatctgtttcctatgtgttctttctcctttttttcattgatacttttgtatttccccagttctacctcccctcccctagactggttggctgtcctggaatttcccttccttctttcaattgcccaaacactaagtgggaggaggcaaactcatatcaaatagcagattgactacatctgtgctggatcatgcagacagttcaagagtcccaagtaacttagcagcttcatcttgccttccagctgcaatcaagaagagccctctcagaactggtcactcagcaaaagccagatggcattagtaaaagatgttgggcaagggtgggagtttgggccagtgatctcttaggttacttttgctgctgagttaataattgtcacattattaaacagcccttggccctgggaagcccaccttctgtgaatacaagtctcagagtagacaatagggcacaaccagccatgttacatgacagactgccaagtgcattcctcttacaactcactgggatggagcgctcctcagagaaaaacaagcccagcaacatttgtattctgaacaggcatctgtctatgtttgtgacctttatgttgtgatgtgtgtgagctgctgtctggaattggaaagaatgaggaaatatgtcacctatggcccctcttgtgaagtgttaaatgcctctgaggcacttcaaaaggcaacagagcggagaggatgagtgattagaagcacatttgggatacatttttagatctaattagaattgtccttttttttttcttttttgcttttgccctgtggttagcacacaccatatgaacgtttgtcgaatgctatgttagtgatgcataatggttaataataacttttggttatatatctttaacaacagttgcttattcacaggtctttgataagaagaaataacaatgtgctggacacacatttctatacaggcaaaagtgactttttatgatagagagggctgtttcttattttctgttttgaaaacagtagtagctatgcacttgaggccaactaatccctctaagaggtgaaccttccttcccccttgcccttgattcccatcaacacacacatacatatgcacacactaccgtgcttcagtcaccatcactggaagtgaactatgtgcaacttttgggtgctttatatatatcatatcatattgtgtctgctttaataaatcatagttattgactacatatcatacaggatgtgtgccttctgtgggtcagaaaataagttcactatttagtccttttcaaaaattccttcccgatctatcttatagacagaaactaagcttttatacacccaagatttggcagattaacatctgcatattaaaatgtcaagagctagttaactttatttgaggcttaaaagttaaaaaatctgattttctaaatgtctggccttcaaaatttgagtggactgtctttctcaagataactaacaattttatgcacttggcagtcaagacctttacaataactgctgcttgggagattgaggggaaaaaagcattaaagtttgtggcccttataatcaagtactttacagtctactgatgggagaaaaggaaaacaaaacaaaacaaaaaaccactgtgagatatagatatgtcttttctttctctagcagataagtacctgaggctcaaggaggttaagcaacttttgcaaattcactttccaatatagtgtcttttcccagggtgactaatgtatatacttgatgagtgaaccagaaaagtaggaaataatatgttacatatgggatgctctattgggtatagtaaaggatgcgttgctgttataaaattatagtcacttagaaaagagatgtttatttttatttttctctcatcagtcttaaggtaagtgaatggcctagggtagttaggtgactgtgttccatatggtcattcaggggcaaatgctgatgaagcaacacagctgtcttcatctaagactagaactctgcttgttgccatttcccagcaggaaggggttgaaagaaaatttatgtagatttttttttctacccagtagttgcatatatattgtattctcacatcctattgacccaaacttagacatatggccacatctgtcagccagaaagggtgggcaatgttatctatagctgtgttgctacgtgcctattgctaaaaaggctaaaaaggaagaaggggaacatggatgctggtgaacacttggccacctctgacacagataattgctaaagtaataagaagagatggaaattaaatgtgctaagctaggagactttctaaagaaagggtttgtcatgctacgctgtgccattcatgtgtttttttgctcatgctgttccttgtgcctggaaattctccccctaattcccctgagcagtggatgcagtggataccctccccagatcccccccaacttccctgagtgttggctaccaaaagctctgagtgcacccagggagctaagtcctcctgcccacaggcaataatggactgacacggggtagacttaaagaaataagaggcacatcaatcaattgaaatgtgtgggaccttacctggactctgaattaaacaaactgtaattttttaaagctacaccttttaaacatgattggctatttgaacactaactagatatttgatgatattgaggaattattgtgaatttttagtgtagtaatgatattgtggtttgtataaatatatttagggataatatgatgcctcagatttgctttaaaataacacaggatgaggataagtggtaggactgcaagggaaacaagactggccatgagctgataactgttgaaggtgggtactgggtatataagggctcaccacaccattctcttgatttgtgtctatttcccataataaaaagtttaaagagagagaaccgatgaaggggagggagagagtcaagcacacaataagagtgacaaacagtgccaaatcagcccacagtattaagttttcacatatttacataaatatcacctggaatgcaatattgaaattaatgtatatcactagaataaaaaaagtaaagatttaataaatttgttttgaaataaaataagttgaaatacgaaaaagacagaaaaggttttgaaagaggttttaaagaaaagtgcaggatattcattggtaaagatgttggtgagaggcttggaagcaaaacttcaggggaaaaagacaacatatggaattgaccacaattgaatttacaagtgaagtggctttacagaggaatcaggggatgtttctgagagaggaaattcattaaattctaacttgaatattttctgtttgcctttaagtcagagcaaaggctttgagtcccagcttcccagtttgtgaccttgagcaattgcttaacttttccaaagcctccaatagtcttcactctaaaataaaagataatcatatgagatattgtatgcagggtatttacaaggagcctggtacttggtgtacctaatgtatgttagttattattattaaattagaggagcaaaaatttctctagcattgactgctcctgacataatcacaccgaagaggggatacacgatgataaaaccttcctgcagtagtggctatagaaatgatgacggggagaagatctggaaaatattccaaagaaggctacagatagatacattttttccattggaattaggcaatggagttaaacagaagttacaatatggttgaaataaatgtatttttttaaaaaaagatttctctttccttaattattaaaaaatatacaattttgtagaaaattttaaacaaagtataaagaaaaaaataaaaatcattcataatcctatcaaagaagcattgttaattttttctatatatcttctttttccacgtgtatacttggaaattaaattttctaaaataattttcaggaaaaacaaattttaattaattgagcttctactaaataggactgaaaagcaaaacctggactagaattctctctcggtgtgtgtgtgtgtgtgtgtgtgtgtgtgtgtgtgtctgtgtgtacatgtgtatgtgctgtgtatacatgtgtatgtggtgtagcgttcccctgattcttaacttattaccagtggacaaccaccgtggaactagagtctagtcattcttaacctttttgggggaatcacagtctcttttttgaatctgatgaaaatcaaggaccgtttttacagaaacgttctcatctgtgcatacatgagacattttgcattgcatagaatttccgagggttcacagatactttgaagcccaaaagtgatccacagaccccagattgagaactcctccgctatgccatgcttaagcttatttctgtgtatcttctttctgaggagcaggcagatgggtcatctttacaatgtgaagttcttggcatttttattttgttttgtttttctgcactacgatggagcaagcaacactggaggcaactggctaaatgcaaactcatgaagcaagaccaaaatggctggatagatagatgctgtttggttttgacaacctagaaataaccttgaagaaatcctatggagaagtcttaaagaggaagattggattttgtagactcaaagaatgtgtcatggtttggcttaatctaagccatttttattcttcttttcttgtgtttgggtctattatctgtctgtagaatttatacagtgagactgctggggaaagtcttatgtctaattatttgctgtgctgtgtggagtgtactgcagacagtcaataaacaatcaatagtaattgtagcctgcctcagagacaggagttagaaacttcaactggcttaggtgcatggtatttttcattaattttcttctgctagtttttttctctaatttaaagcctaaatttaaagattaaatagaaaagctttctttgcttatgagcacaagtaggcactgtttttaaaagaaggaatatataatcccaggtgttttacctctgttaatgagaaagatgtctgtttgcttcagattgaatgagcaaagaagaggacaaggatatttgcatggttaaatgcctatgagcccttccttcagaaagtaatattcccctgatgtcaattacttttatacggacatctggatgtttatcatgagagtgtacagatgtcaactttttcagtattatagctggaaatgtggtgataacttgactttgatttgagtaaacataaaatatctaacatttaaagtcagaagttcacttcaggaaggggtttaaactgacatttattaaaaagaatggttccttggaaaaaacatcagaaccatccctaaagatacagtcactctgataaagtaaacagagtcccagttatgctctgtgtaacaaataacagaacttgaacatgacatttatctgttccttaaacttacagaagctggctctgaagatattgacatacttcccaatggtctggctttttttagtgtggtgagtgtcttcttccttccccaaattcagcagaggagatacaagggtatttgatgagggctgcagaacagtaagttgcttttaaaattcattttccaaaatgcattctgaagaaaagagaggtcaaacaagatcttggaaaacttcctccagcttttctaaatgtagagatgaagactctttgcccattgagatagtgttctttatttccccattgcattgcactaaaatattccaatgcaatctgtgttttgttttgttttttcttttttaattttttttattttttgagacggagtcttgttctggttgccccggctggagtgcagtggcatgatctcagcttactgcaacctccgcctcccgggttcaagcaattcttttgcctcagcctcccgagtagctgggattacaggcgcccgccaccatgcccggctaatttttgtatttttagtagagatggggtttcgccgtgttggccaggctggtctcaaacacctgacctcaggtgatcgcctgcctcagcctcccaaagtgctggcattacgggagtgagccaccacgcccagcgcaatctgtgttttaaatgtgcactattaagagggatatttgaggtcttactgtggatactcaatactaacattatactattttaaatacagcatctactcatctttctattactattcaacttgaagcaaatattcttgccattattatttattttcaaatattataccaaccttgcccttttgctttctttcttttttcccctgaatagccaatcataagtggaaagtcattgagtttatttacacccttcattttgccttgattcttgtaagctgaaaaacaatatcctttctgggtatacaatagaaagactttaaaaacaattggcttgtgaatattgttgtgaatattgttgaaactagcttgtaacaatgtccattctaattggaaatccagataaggggacagatgaggaggttctgaccacctacctccctggcttgggcagacataggagttcttggcatcttcataggtccagtttttctggaggaagaagtaaccaactctgacacctgactgtaattattccatttcctctcaacatccattattttcaggctctgagactcaagagggatgtgaaatactgggagatacttagaagggagtcaccacactaataaaatagttgttagacttatgagaaaggtgagagaactcaggttggagtagaatgagaattagaacactcttcaggttcctgatggtttttatgtgaaagacagtgagcagctggttattaccactgaggcaataaagagatactgtgggctttagcagaaacaccagtatatgtatttagtttttaaaataaggttttaaaaggaatgttttatttaattgcctacacagaatgaataaagtgatatttatagtaggactctgggtttgtttaggagcacatgcttgcacatgtgtggcttaggaaaaaccactgggaccactagtctaaaatattcataagtaaagatgcaaacattctgaataaagtagaaggcagttgcattgatttttttatttgtttatttgtgttttttgttgttgttttgcaaggatgtgttcttggagatttttataatctagaattcacctatttcaagatttctctccagcccccatagtaataaatctgaagtaggagggatgaggtctccaaacacataaatctacagccattttagcttgggggcatgttatagttacaaagatcttatagccatatcaatagaactttttctgctttttttctgttaccctcctttgctcatttgactttttttaaaatttagaaacattcccagtttgctgctgtttttcatttacttggcattgtctctaataaaacctagagtgtactctcttctaaataaagaggtcctacattgtggaggttgttcattcttcttcctagcattttagctcatctaacccaacctattttacagttatgggttgagggtcacctcaaaactaatgtcacacttcatgaagaattggatgacatagaataaaatataaaaaatgtaaacaatgtgagtgtgcttaacaccactgaactgtacacttaaaaatggtgaaagtgatgaatgttgtatgtattttatcataattaaaaataaatttttaaaaagagaaaaaatacttaaataaataaggagtgcgaacataaccatgactagttatcaccatctgatagtgcttcctttgcatgtaaatcatgcttttgttttggggacattcataaagaatagggattaactgaagtggcactgccatgtaacaatagcataattccagtttgttctacttaccaggcttgccctccatgaaaatatacaattgtagataatcttttttaattggagagatttcctcttatgtccaattttatacataaagtaagacttttttattgtgtgcctaaatttgtgtaaatatgactgcatcgtattagtaaactgaattaggtagtgcattcacataaaatttaacatcaccaagaaggctttaccttaagaatgtaatgatgaatcaccattttagatagactgataggtaatttattaactgatttaaaagagaaaagacctatatcatctcagtgagtaccaaaaagcatttaataaaattcaatactcattcctaaagttccaagcaaactagaaagataaggaaaattcccacaaaactacagcaaacatcattcttgatggtgaagcattggctgcatttgcattaatgctcagaacaggaagaaaatacccaacaccacaaccatcagtaatctactagagttcttagtaattcagtaaaacgagaaaaagaaatgtgagatagaaaagaaaaagacaaaactgtcattagagaagcagggactggctcaattgcccaggctgatgtgcagtagtgcaatcatagctcactgcagcctgaactcctaaactcctgcgctcaagaggtccttccacctcagccttccgagcagctaggactacaagtgctcaccataacactcagctaatttttttttttttttttttttttttttttgtagagacagagtcttgctatgttgcccaggctggtctcaaactgctggcctcaagcagtcctcccacgtcagcctcccaaagtgctggaattataggcatgagccaccaggcctgacctaaagctgtagtaatttaaaaagtgttatattggcacaggaatagacatgagacattaaaataacaaaacagagagtccctaaatagaccaatatgtaaatgtcagagatctagcacatgataaaggtgatattttgaatcagtgggagaaggatggactgtatgccaggcactgttccaggcactgggatctagcagtgaacaaatttccacagtcagtatgtagatgtcacttttctccaccctcagctctccctggaatcacctagtccaccaaccttctgattactctctgaagagaataaatccctgatcttcttttcagttattttcaggctttcagtattccacctccccgttattattttttctgttatcttttctctgttttttgagtttttgtggctttatgccactactttaaccacaatctctatttatccttcatgtacagttcccatgttagtccataaaaatacttaagcttttgtatttaacatttttcaccgttttggaaagggtctaaaattcccaggactccacagctttgcaccagataagcctggaggaatactaatgatggatctaaaagaagaaaaaccaagggcacgggaattaagaatcagtcgtgggtttgatttggcctcattcaatccacatggcatcagcactttcatagacaacggtaagagccaatgggctaccaacatttagtaacgtgtgatggttcacaaatgactgtgaaaaatagatttggatcatatttctaggaagagaagaacaattaactcatgagtgatttctgtattcttcattacaaagaacttgttcatttgcctcttcagctggcagtaagttatgctacattttgaaattcctaacaggtaacacctgaaagaatgtttagatttcataatcttttcatatacctacgatcatcacatttaaaaaagaactgtatttttgaattaaagtagaaacagattatgcatgaattctgtatatggagtaggaaacactttcttaaaggtcagggagccaatgatcagaaataacaccagacggacagcaataggaaagacagagaatgatctgttaggtcgtctaacagcttatacattcaacctttccttgcctgtggtatttaaatgtcagtgcctgcccagaggtcccgtagttatgtcttgtaaattaactctgttctttcaattctttagatgacacagtttatctctttgttgtaaaccacccagaattcaagaatacagtggaaatttttaaatttgaagaagcagaaaattctctgttgcatctgaaaacagtcaaacatgagcttcttccaaggtacttcctcattttgttccttctctaatttatccccagcatttgcaaacaatccctatggtgggttgtcctgtcatcttttataagcgctaatgtatatattagctaatatgtaagagctaaagagcttatatttccttatttataaatgtgtgtgtatagtttccttataaaccagggcaagcatggcatatgaaagttgatgtcactcatactattcactgttctatgcggactcctttgagaaatgatgaagtgcccgactacagggtgatactcttcaggcccatcttgagggtagaaggcaaaccctaacattttttcctgctgtcaccctccatcttagatgactcatcacccagatgagtgtcttgccaaggaagaatggcctgttttttattgggtttgtatgctttgcatgggactttataccaatcgctttcatagggttagtgatggttgcatgctagtaatcccacagaattagagccactcaagttgagagtgagtcattacacttcaagaacataaagctggttgaaaatgtggctaagagagaatcatgtgtacccccacccccagttcagtgtgtattagcctactgcttcttttagtttaaacttgatgaatatttttaatttctaatgaaatttcatttctaatgaaattaaaaatattgcctatctagggcctatctatgcctatctagggcataagcatgtaacttccaatcattccttccaaaaatgcacttgataaaaaaaaataggagcataaataccatccaagcattatggtgctctttcagaaaaatgagacctaccttccctgtagctctatatttttcatttagcaaagaataaagcagctctttcagaaatttttgcatagagtaattggaatttaaatttaataacaccctcacctaactggtcttaaaatgaaattgtttttagcatataaatctctcacctgaagcattgtactatggcaattttatcatccatctctctgcaagtgtttattgagtgcctgttcattctcggcatgtcagctttgtgaagcaggtagaaattgaacagtcaaccttagtttgactaataactaagccagggaaattagaaaaatccaggaactgagtaaatggaagctaggtaaatgttactgactgcctaaccagctcaccagccaatcaggctctctccagctctgtactgtggacagctctgtccttacgtataattgttaaaccctacatttcttgctgtcaaaaaacatgccctgatggcactaagttctttcttctcttatggtaatcctgccataattgctaaatgacctgtgttcagattacctggtaccatacaaaattgttctctggcaacaatattatagtatattgtatatgactatagtcgtgatttttagctcgtcttttcctcttaccaaaaatttaaagcacatgttgcataaatcttatgagtacttaatatttaatatggagaccaacaggccttttgtttcctctcacatgctatttttctttttcagtgtgaatgacatcacagctgttggaccggcacatttctatgccacaaatgaccactacttctctgatcctttcttaaagtatttagaaacatacttgaacttacactgggcaaatgttgtttactacagtccaaatgaagttaaagtggtagcagaaggatttgattcagcaaatgggatcaatatttcacctgatgataagtatggccccttatagaatatcttcatttttcttcagttgtggtgctggccaaattctttactttgctttctttgtcaatgtgaaaatagttttcttgacatttatggtatattatacatataatatatagatacactatatatataattatatatgttttgtatatatatttacatatacttagtcacatgtatttatatgcaaatacaataccatatttaagtaaactatataatacagtaatatatatgtatttatatataatatataaagtttggaatacatcattgtcaaatttaattttataaatataaattttaaagtgtgatcatactgatgcatacatattgaagtatcaggtatttccttttaaataaatgtattatttttattggctatacattattccattataaggatgatcttaaactaatttaaccaattctctattgatggatatgtgtataggggtggggagttctacataaaaaatattttatacttcttatttaccatggaattttaaacaagtattttttttaaagaaaaagtccctaggagagtgttttttttttgttttgttttttggagatggagtctcactccgtcgcccaggctggagtgcaatggcatgatctcagctcacctcaacctccgcctcctgggttcaagtgattctcctgcctcagcctcccaagtagctgggattataggcatgcgccaccatgcttggctaattttgtatttttagtagagatgaggtttctccatgttggtcaggctagtcttgaacctccaacctcaggtgatccgcccacctcagcctcccgaagtgctgggattacaggcatatgccaccacacctggctctaagagagtattataacataatggttaaacttgcagattttggactcatacaggcctgggttcaaatcccacccagggcactggctaaatggttctatgagctacttttctgtagaacagacccctagaaatagaactatttgctcaaacagtgtgattcttttaaatgttaactttaatagatattgccaaattgtcctccagaattatctcattatttttatatgcacaaccacaacctataagagaagatattaaattcttgatagctttcttatctactgcctcagcacactgaaaaatttaaactactacaaatacaacataaaataaatttggcactccttgacaactaaatgcccttatttttgtaatccaatttctcctcctttcttgttgactatagaaaaagaatgtagaatcatttaatttaaattgtctctaactgacctgatccaacctctgcagccaaatctgtttttcactcttatatttccattatgagagtcaaactttccaatcacccaagctaacaaaaaaataacaataatgaaaagggagaatcagcttttactcctctttcaccattcctatccagcctgtaggcaggtcctgttggttctacctgtgcctccttcctctacccccaaactcctttccctttgagtgagacctgcctaatttaggttgtcatcctctctgactagcatatgagactttcttccaatttgttttctgtctacttggatttttttcactcttgccaattttgtctgtctatctctattagccttgaagggctccccaaagagggaactctgtcttcctcacctttgactccttatgccagtacagtgccaggcacaaagcaaatgctcaggaattgtggaacagaactgaccatttgttgccactttattattctaagatttcagtggaatccaattgcttatcaaatcaaggcagggtaaagggttggactttgtttaacaggccacctccaacctcccttttctactatttccatgctttctatgctttagacaaagaactcattgttttaaacattccttcctcttcttgctcctgtgattctgctcttgtgcttgcttctgcctgggaagtgcctcctccgtcctcatctcaaatctcatctctctttacacagccactgcagatgccccttccttggtgagcctttctgtgtcctcggaagttagctatttctagacctgaactatttctcatgcttattaggtgtttaatgtgtacaaaccagtgagatttgttccaacacactataaactttcaaggagagaggctgtgtcttcttcatgtttatatctgctgcaacactgagttcatggcttttcacacataattgctcaacagagcaggtgccatggaaagtcaattcaatgagtaaaattacctcaaaatagtctgttaattcactcacctttgaagtagacagattattctgcattgatacttatctcttactcttaaaattcgctatgtattaataaatattttattgaatattaaggaatgatcactattttaataagatgttctttaccatatatttctatatgtacatgataattagaagtatcaaattatattgtggaatgtaaaagcttttcttctgaagccaagcatttgttttattgtcatttcagtggcaaatatggacttcatattcaaaatgatgttctatattatttttccttacaagctttttgaaaaacaatttaataattccatgattgttgtagcaccactgaattgattctgaaagcttactttttaaataaaaattgacctttatcaagcattccttgagggcccatgattgattaacttcttggcaggttattaagacttattctttcacactgtattaatgaagctttatattggcatggagctctaaccactgtgtcctttctgcaaaggtatatctatgttgctgacatattggctcatgaaattcatgttttggaaaaacacactaatatgaatttaactcagttgaaggtaaaatatttatttttacatatagacagtaatctattatgctttgcaatgacatagtttttctataagagtaccacacgtagaacaaaatatggatgccagtgtagctattctgggtttttaaatactccctacaactagagaaagctcctgtttccagcgatctcaagaactgaccatgattacatgcagcagcaggttgagagtgatattcatcagatttagggcccattccatgaagtattgatggcagtggaagaattccaataagaattttcacaattgaaaatactaatagatgaattctcaaatgaaggtttatgcacagtgtcagttctttcaataatacatgaaggtagaaattgggttccacaccattattattttcttcctactcaacaacacatattttaggttgattaagaatttcctatcttgctttgattgagttccttgagctaactgatcattgtgcatcttttaaaggaaaaggagttcagtttttaagatagatttttacagagaccgattatcaccctaactttcttaatttcagggaagaagaaaagtggctccaaaccagtttttaatacattccttttaagcaatattggtgttagaaggtggaagcagggcgatgtgtaatttcctcacatgcatagaggcaggaaggttacctctaaattatttaatcaagtttctcatgtcatttagattttgacaatttctcatttggaaggtacttgagctggatacactggtggataatttatctattgatccttcctcgggggacatctgggtaggctgtcatcctaatggccagaagctcttcgtgtatgacccgaacaatcctccctcgtcagaggtttttatattttcagttttttaaacttaattattcaagtccttttgaactaataatacaataaattgtcacagggatgatttgtttagttattttaaagcaataatataataagcttatgtcgtggttttgtaattgcgttaagccaataattggcagaatgttacattgttcaaatactttaagaaaggtaatcttttgatgtattaaattatggtggaaactagtcaaaaggcatttttataaagacatgtgcccttcttgggtggtatactggcaatttttaaaatatctgatttattgtcagctcaccacatgatgtgatatttgttcatgttgaagtagtgtgaaagtaggcacattagtatgaaagtatttctattaaagctgaattgctataataacactaaatcctgtgttggcatggaataactagatggttttaagaaagtactttctttgaagattggagaaagtactttaatttaaacattaaaaagattggtaactgctattttcaacagcatgtccccttaatcagtgtgtcattgtggaaaacagggcttattgatgattgagtgacatgcatgtacggtggtcttatattcatactttgtatcccctgaataggttctccgcatccagaacattctatctgagaagcctacagtgactacagtttatgccaacaatgggtctgttctccaaggaagttctgtagcctcagtgtatgatgggaagctgctcataggcactttataccacagagccttgtattgtgaactctaaattgtacttttggcatgaaagtgcgataacttaacaattaattttctatgaattgctaattctgagggaatttaaccagcaacattgacccagaaatgtatggcatgtgtagttaattttattccagtaaggaacggcccttttagttcttagagcacttttaacaaaaaaggaaaatgaacaggttctttaaaatgccaagcaagggacagaaaagaaagctgctttcgaataaagtgaatacattttgcacaaagtaagcctcacctttgccttccaactgccagaacatggattccactgaaatagagtgaattatatttccttaaaatgtgagtgacctcacttctggcactgtgactactatggctgtttagaactactgataacgtattttgatgttttgtacttacatctttgtttaccattaaaaagttggagttatattaaagactaactaaaatccca

SEQ ID NO: 15744 - DNA, 30319 bp, Homo sapiens
aagtttcacatcatgagcctaatgtaaggcgtgtccgggccgtcccgaaggtatctggggaaataggtttgtgaggacaaagaccagggccaggcccagggcggagcctccgcggccccgacgcagggactcggcctaggcggaggacggggcggagcgcggccggcaccatcgagccgggaagatggcaccgcccacggagctgctggccaggccggagcgaggcagcgcgcccggctcccgcgccatggggcggctggtggctgtgggcttgctggggatcgcgctggcgctcctgggcgagaggcttctggcactcaggtaggtgggactcccgcgcgcccctcctcggcggtccccaggctcggggtggccgcgtggtgcggggagggcgcaggctgggggagggattcctgcgggacctggccctgcggccgggggtggagaatttttgaatgctgtccctcccccagctagttgaacccccatcaccccgactctccgcttctagtgaaaaaactagcaaagtttggagtgaatcgcgacactttcttgaaagtttataagcccttgctgctaacaaagttctcttctgcttaggctgacaagagaatgctttgcaattacccaagggccaaactagtggtttaaattgaaaacaaaatgactactcatgcattgaaaccttaactatgaagatttatttcaggtcattggtgctgtttctccttgttgcccaaaccagacccgtctttaataaagttgttctccacccatttctgcatagtttgagaaactcttcagctgtagatcaaagacacttgaaatattcagctactgttcttacttcctatttattcaccagggaagcctgaagccagaatgccagacagcgcagacactattccatctcgcattttagttttaatgaaaatctctggtaggtagacatcatcgtttataaattaccaactcaacgtttgttttttgtttattttattttttgtagagatggggtcttgctgtattgcccaggctgttccctaactcttgcactcaagcaatcctccagcctaggcctccccacagtgctgggattacaggtgtgagctgttctgccctgcctcaaccaaaattttataggcctcatgcaaaagagttccagaaagactgagcacctgctatgtgtaatgttctctcttaggcttctatagtagagtacgacccttatggagtttgatacaggggaagagagaattaaaatacagtaaatgtataaattaggatgttctaaggacagacacaaatgaaccgcataggcttaaagaggaaagattccatcccctgagggtggagttctagagggaggaagagacattcgacctgaccttgaagggtgggtgcaacacatatgagcatgaaggggcccatgccaaatgtatagtgcagcaggagcaaaggggctaaggtgggaagttggaagactagcaaatgggccaatttgaagggagcataaagtcaggagatgagaatagtagggtggtgggaaggataggttttgaggccattaaatataagttgaaaaatggggccccactttcataggcccaatagtgcttcaaaagggaaatattggtgggttttgcttttcaacaagaacttaatataactagttgtgttttatagagataagcctggaaggggggattggaggagagcaatggttctctgtacattagaatctcctggagggctggtgtctgagtggcaccaccaaagattctgattcagctgttctggatcagaatctacagctcacacctgtaatcccagcactgttggaggcctaagccagaagattgcttgagcccaggagttagtgacaggcctgggcaacatagcaagatcccacctctacaaaatgaataaataaataaataaataaataaaaaacaaaatttgagttggtaatttataaactatggtgtctacctaccagagatttttcgttataattaaaatgtgatatggaataatgtattgtttggcaagctggcttcagggttcccaggtaaatagataaataaggaagtgcataatgtaagaacagtggctgacagtagcagtggcattttttatttttaaaaacattcctgataattctaatgagcagtcaaggtcgagaactactagaatagagagcagacatggggtaactggttaaggtattgcagtaggtcagagaggataacagggacccaaactctggaaccccagggatgagggagaagtcaaaggtgctaccagagtttgtgccacagctccactgtcccatggttgtagtttcatctactgataaagcagtgcaaagaggaagcgtgtggtggctgagatgggagtgagatttgaggaaagaacgcttatgggtaggaaatggacatgttgaccttaattttcatgttaggtaatgcccattgtgctctacagaacattcatgagttggatgactttgtatatgatctgtcctgctctccatttcaaaggcaagaccaccaaaattcacaagcttattatgttgtcactaatgtgtaagccaccagtttttctgcaagttggaagttttctcaacagtcaaatattcccccttctcactaatcttaaggttttaaagttatagctgcaaatctaaaaaaaaaagaaaaagtaaataaaacttattgacagaatgcctgatagtttatttacaggtttttgtttgtttgttttttgtttttctttgttttttattttgacacaaggtcttgctctgccgcccaagccagagtacagtggtacatcaaagctcactgcaatctcaaacacctaggcacaagcagtcctccctcctcagcctcctgagtagctgggactacagatgcatgctaccatgcccagctagtatttttatttcttgcagagacagggtctcactttgttgcccaggctaatctcaaactcccagcctcaagtgatgctcctgcctcagcctcccaaagtggtaggattatacacatgagccaccaccctcggcctactttacaatttgatgcaccttttctttacgtgactgtgatgcactttaatgggcagtgactttataaaatggtaactttattggatatgtggagccccaaatgggctgacgtgagaatgttggggtaggtggtgggtggctggatttagcaaagaaaaatgtaggctacccagttaactttgaatttcacatggatttttttttttttttttagtataagcatgaaatacttataccatacttttagcattaagcgtggaatttgggacataattatactaaaatatcattcattgtttatctcaaattaaaatatcactgggtaccctgtattttatcatatgttcgagtgccttctgtcagaatttggtgaccctttgagtctgttttaaaaaggagcatgtttggccggacacagtggctcacgtctgtaatcccagcactttgggaggctgaggcgggcagatcactagaggtcaggggttcaagaccagcctggccaacatggtgaaaccccgtctctaataaaaatacaaaaattagccaggtgtggtggtgcatccctgtaatcccagctacttgggaggctgagtcaggagaattgcttgaaccccagaggtagaggttgcagtgagccaagattgagccactggactccagcctggacaacagagaaagactccctcaaaaaaaaaagaaaaaaagcatgttcccacctccccataaggaaaggctcttcagaggaagttgaaggaacagaggctttatgtttgatttttgctttaatctgatgcctactgtttgattattcaatatttagagatggtactttggcaatcaagttatttctctccccaggttgcccacttcaatttttagtataaggatgtcccagagggataaatgccatcaaagttgtctttcttcttctgaactgtaactgggattccacaccctccttttccacccctccctagttgagcaataaaggggaaaataacagtatacaaatattcccaggccagttcctggtgtcaaggtacacagccatggatgaatcatgaggcttgagtgcatcagagacctaagcgtgggcaggaacccccagagtacccatgtgaatgttctgcttgctgcctcgcaccttttatgacaattcccacaagaagctatgtggtctgtttctacttctgaaagagcagcctttttcccttttttttttttttaaaccaccatcctttaaatcatttattatgtaactcttgtgtgctggtcagtcagtgtgtcaaaagtgtaaaaacttctttatttatttttttaatctatcttttaaaaaatattttctttctttttttcttttttcttcaaggcaggttcttgctctgtcacccaggctggagtgcagcagcacaatcatagctcattgtaacccagaacacctgggctcaagcaatcctcccacctcagcctcctaagcagtgaggactataggcatgcaccactacacctggctaattaaaaaaacatggccgggcacggtggctcattactataatcccagcactttgggaggctgaggcgggtggatacctgaggtcgggagttcaagaccagcctgaccaacatggtgaaaccccatctctactaaaaatacaaaattagccaggcacggtggcacatgcctgtaatcccagctactcaggaggctgaggcaggagaatcacttgaacccgggaggcggaggttgcagtgagccattgcactccagcctggcaacagagcgagactctgtctcaaaaaaaaaaaaacaaaaaaatttttttgtagagatgggggtcttgctgtgttgcccaggctgatctcaaacttctagccataagtgatcctaccgcatcaacttcccaaagcactgggattatgggtatgagctactgagccctgccaaatttctttatattaaaccaaaacgtacatttactgatatttggaaagaaagctcttttacttttatgccttcatccagtcttcatagatatcttcccttttacattataactgtaaatactgaggttagagaggttaactagttagttcaacagaataatataaatattgaataatataattaatgaataattagtgctgaacctgtcgcctcagccaggtctcctgattccaaatacagtttgccccagctccccacagtcttctagcttctctgccagtggagcaaattttccctaggtttacaggcctaagcacagattcttagttacttagtgcaagtattgccagagcccaaggggtgaattccaaagggtttttacaaggctatacataaaagataaagccctggcttgtatatcacttgcacataggagataaagccccagcagttgtatgtaaatttcaaaagcagagaagtatggcacaaagaaactcctgatagtaacactgtgttcccactttgcttaggggcatattggcaccgtagcatggtacacccttactgctacctgccatgaggccagataatagctagcagcccctggtctcattctactctggatgggtactgctgtttcctgaatgaaagacactgagattgatttcatgctaatgactgttggttaagagttcatgctttctattcacaatagcaaagacttggaaccaacccaaatgtccgtcaatgatagactggattaagaaaacgtggcacatatacaccatggaatactatgcagccataaaaaaggatgagttcatgtcctttgtagggacatggatgaagctggaaaccgtcattcttagcaaactattggaaggacagaaaaccaaacaccacatgttctcacttataggtgggaattgaacaatgagaacacttggatacaggaaggggaacatcacacaccggggcctcttgtggggtagggggaggggggagggatagcattaggagatatacctaatgtaaatgacgagttaatgggtgcagcagaccaacatggcacatgtatacatatgtaacaaacctgcacgttgtgcacatgtaccctagaacttaaagtataaaaaaaaaaaaaagttcatgctttgtggacaggtagcctgagttcattcatagctctactatttacctgaaaccttggactaattatttcacttttctgtgccccagtgttgtaatctgtaggatggggtactgcctgctccacagtgggactatgagaatgcttaaaataatgccaagcgcacagtcagctcaataaatgtcatctatgtagacaatgaaattcaagcataattccttaaacctttgtgccatacatccctttggcagtctggtaaagccttcattccttctcagcatcatgtttttaaatgagtaaaataaaatatataggattacacaggaaaccaattaaatactgctaccaagctatttaaaaatctatgatataatatgctttttaaattaaacccttaaatggatctagaggtaggtaaatgtctaacagcagatattttgaagttgcaatgaatgtaaatggcactttgagctatctacaactgaaatgcgatagaaaagtatctataatttctattagtgacagtcacaaatactactaatagtattgtggtttgttgcttatactcatcatcaaaggaaatactcaatttgagttaaaggtttaaataaagatgtatttttcccccatccaagttcatggatccctgaattctacccatggattccttggtcactggactccataggggtcacttggggaatgattgtgacaccaatgaaggaagccagcggatactgtttgctgtattatacctaccataggctcgtgatgaggaaataataaaataaataactgtaatgaaaaagaaaagaaaggaaaacaaaaggaacctaaaacagagaaggcaaatagctttccttttgagtgtcaattttaacagactccctgtggttgcgaaacaatgtgtctgaggctggctctgggttagagggagagtgctgttattgattagcaattcctgcatgacagcagagtggcaacagccatgcatctctgacctggcacagtcataagcatgttatagacataaagtgttagggaacaaataggctctagcaaaagtaaagagtgttcctcctctcatatcatcacttatatgtgtttataccatttatgttgtattttttacatgaatacttttagatttattaatctaatccaaaaaggtttgtatagctttctctatattaagagaaatatatgtatttcttaaatacacaaagttcttaaatctgatgccagcgaggattgcttccagccacaagtaacatatatcagattaatagtagttcattcaaagagggatttattttcctcacatgaaaaacagctctgtgggtgacccaatatagagcttgttcattgagccagtgattatatcaaggaactgggttcttcatatattttcattctttgatctccccctattgactttatagctgtatctttctcaaggatgcagaatggctgccgcagtctcaaacactgcgtgtgtgttcaaatcatgaagaaaggagattgagtgatgccagctagctctcttctcgtgactctcctttgtatctagaacacagtgtctttccccaaaacctgggtcatatgactacacctcaatacagcggagtctgggaaagcaaatatttgctttgcccaccactacaatagaaacgacaagggagaaagaaagggggttgggcatggcgttaattttgtcagccgctagggtctgccacccagaaaacagaagtccactaacaagcagggaactgattgttctgccagggaaaaagtctggcagtttcctactgaagaaatttggaagtcttgatggtccaggaaggataaaggcaaaaccttcattttcttttatcaaaaaggaaagccaagaaaaaaattagttaagtagaagttatgcacaaccctcatgtaactcttccatgttaatagcaggtaggctgcatatgaaaacatgatattatacaagaaaactagttgatgaagattgccctatttagcaccaattacttacgcaaacctaagttgactctgaaacaggaaccccatattaaacttttcaaacacatcagaatatgttactttgaacagattttatttaatccaaagagattatctttgaaaaaggtagatggtaaacatcgttatccctatttttgtatagtcaaataggcatagtagtaagttgtgtaaaattgacatccaaaccaatgcatgatactaaaacttggtgtacaaacagcagttacatcctattgctttgtatctacatctgtttctggagtcatataacatttgtagaatcttggaggtgttttaggctcatccttattttatccataaagaagactgacacctatagagattaactgacctgccaagggtcatggcagtttcactgctgagacaagaacacagatccctttacttctttctgagaaaagtacaaagtagtttaaagcaaaagcttccctgcttccagcacttctggctaagttgcgccgtgggaaaattgttttgtctgattcagttttctcatcttttaaactggaataatgctacctaatttacagggttgtttgaagaattaaatgaatgcatggaggtaaatcacttagaacagcggtaaattatacttttttattatttatttcctttgaccacccacaattatcatcagtgtcatcctcatcatcacaattaagattactaccacattaggctacataaactttttttttctctctctgttttataatttcaattttattttagattcaaggggtacatgtgcaggttttacatgggtatattgtctgatgctgaggtttggggaacaactgatgccatcacccaggtagtgagtatagtaccctatagtttttcagcccttgtctactcccttcccttccccttctagtagtccccagtgtctaccatcgtcatctttatgtccatgtgcaccattgtttagctcccagttaaagtgagaacatgcagtatttggttttctagcttatttttcctctcttaaatcacttctgtgacacgtaggccatgagatttattgtattttttaatgccttatttaaaaatttgtattatttaatacatttaatgcattattttttattatatttaaatattgatttatttgtactttttgccttattgctatattgtttcaaaaaatttaacattatttgagttacatgatttcaaatacatactgattaacattttaattagaaactttatgtctgatatgaattgccaaaatgtgtagttggtacaacctatgagtcattctgggttatctagaagaaactggtagcctgccccatactccagaagccttccccagtgtctagacctcagaagctgtcaggaatatgcacaggagaaggacacatggcaaatagctatttcgtctcttaaatgtatggtatgtgggaaccactgaaaaatgtaaagtttctacaaggtgctatttttattatttatggctctagagaacagagaaggtgaaaaatgtgagagagaagggaaagccaatagtatgtggccttcaaaacaaaagatcccacagatattgtcccaaactgcttcctggccctctagagtggagagggagggggaagacatcctattagagttcaacattctcttattatttccttcttttaattttctgggtatacaacagcaaatagttttgctgaagtagttacagaactagttggtgttctccaaccttcctattccaatacatactgtcatggatgggtacactaaaatctcagaattcactgctatatcactcatccatgtaaccaaaaaccacatgtacccccaaaagctattgaaataagataaatacattcttatttaaaaaaatactgtcatagggatgctaccttcttttcttttttgttagtaactatttgtgggatgtctttggtgtgtcaggctctgagcaatgccattttctcttggcttctttgcagtctctgtgtgaggcttacagtcatttttcacgtttgactcttcagaaggaagacagggctactggttctacatctggaactcttttcccacaacaccaacactgagaaatgtgacatggtgctgtgtttacatttgcataggaacttgcattataagttttatttgttgagttattggctttttttttttaataacccacatcagtatatagaactttgcaataggcatttttgttttaacttcatttctggtgcagttttattttcctacccttgtctttctattttctctttcatctgctttagacttaaactgtgttttatgtattgctgtaagcctctttaaaccctttctaaaacaaagcagggaatacataaacaaatagttttttgttttttgtttttttttctttgtaacagaaatcgacttaaagcctccagagaagtagaatctgtagaccttccacactgccacctgattaaaggaattggtatgtatatgaaaatgcttgttgggcacattgcattttttggccattaacattaaaacactcattaatggcattttagcatgaaattactgcttttcagtggataaatcacattagatcaacaaaaacctctttggtcaacctcttgatctgatgaaccctgtatttattcttctttcctaccctcactgtaaattattcttttttgtgtgtaattctatgtttagcatttgatttcttgcttgttttgtgacttctctgaactatttttgttgcgtctgtattgtttgtcaggtatggccgctgcagtctgtgttctgtgagccttgtggtcagctagtgaaggaagctttatgtaggcagtgacagcatttaccctgctcactactctataactaggatctgatcttatggctaacacgtaactgaccaatatggtttggttgtgtccccacccgaatctcatcttgaattgtagttcccataatccccacgtgttgtgggagggacccagtgagaggtcattgaatcatgaggtggttaccctgtgctgctgttctcgtgatagtgagtgagttctcatgagatctgatggttttataagggcttttcccccttttgctcggcacttctccttgctgccgccatgtgaagaagggtgtgttttcttccccttccaccaagattgtaagtttcctgaagcctccccaaccacacggaacagtgagtcaattaaacctctttcctttataaattacccggtctcaggtatgtctttattagcagcctgagaacggactgatgtaccggcacttcacaatatgtattgtaaaaacttgtttttattttatcttctaagctatgactgcagagggggagtctccctcttcccttgactttatgtaggatgtattgtggagtctgagtctttgagtaggggttcctaagagcaagccccaattttgctatagataaggagggatctgtccagattcttctccagcactgagggtctctctggtgtgtttgcagtttttctccaaggtagagtctgtgtcttgctgtcttttaccctttatcatctactaagtacatgtccctagtacataatagactagtagttagattatcaatgaacaataaatattggctttccttttttttaaattttaattttttttttttttttttttgagaggtggcctcactttgtcacccaggccagaatgcagtagcgcaatcttggctcactgcagccctgatatcctgggctcaagcgatcctcccgcctcgtcctcccaggtagctgagactacaggcacatgcccccactcatggctagttttttatttttgtagagacagggtcttgttatgttgtccaggctggtcttgaactcctggcctcaagcaatcctcccagcttggtctcccaaagtgctgggattgcaggcatgaggcactgagcccagccaatattggctttccttagatatggttcatggtatgattagaaacaaaaagaattagcagtcaaaacacctagtttctagttctattctgccacaatgtaaccttaggcaaagttggtttttgtatttgtcacctataatgatgagtttgtgattagactaatggtttttagactttaaaaagcctgggaccatttatttataatcttactctgagagccacagtgtggaaataactagactgtcattgagtcacttctagtcctttacaacaacatccttctctagaggtaggagagacaatttaatattttgttttactctttagaaattaaaactcgggttacatggaaatgttctcttctctgaataggtaacattgttaaacaagttttgagtgtccttccatctttttctttttatgaatactcctgtacataatttttaaaaacataagtgaggtcaaattatgcataatatttcaaaactagctttttgtacttaatactaggttttggaaacttatgtttgtacataatgttaccttttcttcacaactgcacagtattttttgtgcaaagttcatataaacagtgtatgtgcaaacaatatagaaagatataaaatggaaagtaaataaaaataaaaatctctcatcaaactcttcatcacccccaacagaaataaccccaaagataaagctcccttttttatctttcctgatagtttcagtgcatttgcaaacaaatatattgactctttttttcacaaatagaattttagtgtaaatatttcacaaccttcttcattcctaaaacagtgtgagcagctttccacatcagcatatatagttactttgttctttttaatattttcacattccatgatttatttaaccattccccttttaatgtacatttgggttgttacagttttttgcaactatgaacaaatcagtgaacatcattgctgttgagtttgtgtgtctgtagaatatgtccttaacaatgggattgttgttcccttagaatatgtgtttagagttttgacagtcattgctaagttgctctcaatttggcaacagtaataaactcagtacctcatagttgtaaccacattcactccagacagagttctcagcactcttttagtaaaaataaaccatcagttgacagtgccaccttcagagtttctctacaaataccttgcttgcctccctttctttttttcttcttttaaatcagcttcctcaggttgatctgcctctcattccttaggcatctgtttcctatgtgttctttctcctttttttcattgatacttttgtatttccccagttctacctcccctcccctagactggttggctgtcctggaatttcccttccttctttcaattgcccaaacactaagtgggaggaggcaaactcatatcaaatagcagattgactacatctgtgctggatcatgcagacagttcaagagtcccaagtaacttagcagcttcatcttgccttccagctgcaatcaagaagagccctctcagaactggtcactcagcaaaagccagatggcattagtaaaagatgttgggcaagggtgggagtttgggccagtgatctcttaggttacttttgctgctgagttaataattgtcacattattaaacagcccttggccctgggaagcccaccttctgtgaatacaagtctcagagtagacaatagggcacaaccagccatgttacatgacagactgccaagtgcattcctcttacaactcactgggatggagcgctcctcagagaaaaacaagcccagcaacatttgtattctgaacaggcatctgtctatgtttgtgacctttatgttgtgatgtgtgtgagctgctgtctggaattggaaagaatgaggaaatatgtcacctatggcccctcttgtgaagtgttaaatgcctctgaggcacttcaaaaggcaacagagcggagaggatgagtgattagaagcacatttgggatacatttttagatctaattagaattgtccttttttttttcttttttgcttttgccctgtggttagcacacaccatatgaacgtttgtcgaatgctatgttagtgatgcataatggttaataataacttttggttatatatctttaacaacagttgcttattcacaggtctttgataagaagaaataacaatgtgctggacacacatttctatacaggcaaaagtgactttttatgatagagagggctgtttcttattttctgttttgaaaacagtagtagctatgcacttgaggccaactaatccctctaagaggtgaaccttccttcccccttgcccttgattcccatcaacacacacatacatatgcacacactaccgtgcttcagtcaccatcactggaagtgaactatgtgcaacttttgggtgctttatatatatcatatcatattgtgtctgctttaataaatcatagttattgactacatatcatacaggatgtgtgccttctgtgggtcagaaaataagttcactatttagtccttttcaaaaattccttcccgatctatcttatagacagaaactaagcttttatacacccaagatttggcagattaacatctgcatattaaaatgtcaagagctagttaactttatttgaggcttaaaagttaaaaaatctgattttctaaatgtctggccttcaaaatttgagtggactgtctttctcaagataactaacaattttatgcacttggcagtcaagacctttacaataactgctgcttgggagattgaggggaaaaaagcattaaagtttgtggcccttataatcaagtactttacagtctactgatgggagaaaaggaaaacaaaacaaaacaaaaaaccactgtgagatatagatatgtcttttctttctctagcagataagtacctgaggctcaaggaggttaagcaacttttgcaaattcactttccaatatagtgtcttttcccagggtgactaatgtatatacttgatgagtgaaccagaaaagtaggaaataatatgttacatatgggatgctctattgggtatagtaaaggatgcgttgctgttataaaattatagtcacttagaaaagagatgtttatttttatttttctctcatcagtcttaaggtaagtgaatggcctagggtagttaggtgactgtgttccatatggtcattcaggggcaaatgctgatgaagcaacacagctgtcttcatctaagactagaactctgcttgttgccatttcccagcaggaaggggttgaaagaaaatttatgtagatttttttttctacccagtagttgcatatatattgtattctcacatcctattgacccaaacttagacatatggccacatctgtcagccagaaagggtgggcaatgttatctatagctgtgttgctacgtgcctattgctaaaaaggctaaaaaggaagaaggggaacatggatgctggtgaacacttggccacctctgacacagataattgctaaagtaataagaagagatggaaattaaatgtgctaagctaggagactttctaaagaaagggtttgtcatgctacgctgtgccattcatgtgtttttttgctcatgctgttccttgtgcctggaaattctccccctaattcccctgagcagtggatgcagtggataccctccccagatcccccccaacttccctgagtgttggctaccaaaagctctgagtgcacccagggagctaagtcctcctgcccacaggcaataatggactgacacggggtagacttaaagaaataagaggcacatcaatcaattgaaatgtgtgggaccttacctggactctgaattaaacaaactgtaattttttaaagctacaccttttaaacatgattggctatttgaacactaactagatatttgatgatattgaggaattattgtgaatttttagtgtagtaatgatattgtggtttgtataaatatatttagggataatatgatgcctcagatttgctttaaaataacacaggatgaggataagtggtaggactgcaagggaaacaagactggccatgagctgataactgttgaaggtgggtactgggtatataagggctcaccacaccattctcttgatttgtgtctatttcccataataaaaagtttaaagagagagaaccgatgaaggggagggagagagtcaagcacacaataagagtgacaaacagtgccaaatcagcccacagtattaagttttcacatatttacataaatatcacctggaatgcaatattgaaattaatgtatatcactagaataaaaaaagtaaagatttaataaatttgttttgaaataaaataagttgaaatacgaaaaagacagaaaaggttttgaaagaggttttaaagaaaagtgcaggatattcattggtaaagatgttggtgagaggcttggaagcaaaacttcaggggaaaaagacaacatatggaattgaccacaattgaatttacaagtgaagtggctttacagaggaatcaggggatgtttctgagagaggaaattcattaaattctaacttgaatattttctgtttgcctttaagtcagagcaaaggctttgagtcccagcttcccagtttgtgaccttgagcaattgcttaacttttccaaagcctccaatagtcttcactctaaaataaaagataatcatatgagatattgtatgcagggtatttacaaggagcctggtacttggtgtacctaatgtatgttagttattattattaaattagaggagcaaaaatttctctagcattgactgctcctgacataatcacaccgaagaggggatacacgatgataaaaccttcctgcagtagtggctatagaaatgatgacggggagaagatctggaaaatattccaaagaaggctacagatagatacattttttccattggaattaggcaatggagttaaacagaagttacaatatggttgaaataaatgtatttttttaaaaaaagatttctctttccttaattattaaaaaatatacaattttgtagaaaattttaaacaaagtataaagaaaaaaataaaaatcattcataatcctatcaaagaagcattgttaattttttctatatatcttctttttccacgtgtatacttggaaattaaattttctaaaataattttcaggaaaaacaaattttaattaattgagcttctactaaataggactgaaaagcaaaacctggactagaattctctctcggtgtgtgtgtgtgtgtgtgtgtgtgtgtgtgtgtgtctgtgtgtacatgtgtatgtgctgtgtatacatgtgtatgtggtgtagcgttcccctgattcttaacttattaccagtggacaaccaccgtggaactagagtctagtcattcttaacctttttgggggaatcacagtctcttttttgaatctgatgaaaatcaaggaccgtttttacagaaacgttctcatctgtgcatacatgagacattttgcattgcatagaatttccgagggttcacagatactttgaagcccaaaagtgatccacagaccccagattgagaactcctccgctatgccatgcttaagcttatttctgtgtatcttctttctgaggagcaggcagatgggtcatctttacaatgtgaagttcttggcatttttattttgttttgtttttctgcactacgatggagcaagcaacactggaggcaactggctaaatgcaaactcatgaagcaagaccaaaatggctggatagatagatgctgtttggttttgacaacctagaaataaccttgaagaaatcctatggagaagtcttaaagaggaagattggattttgtagactcaaagaatgtgtcatggtttggcttaatctaagccatttttattcttcttttcttgtgtttgggtctattatctgtctgtagaatttatacagtgagactgctggggaaagtcttatgtctaattatttgctgtgctgtgtggagtgtactgcagacagtcaataaacaatcaatagtaattgtagcctgcctcagagacaggagttagaaacttcaactggcttaggtgcatggtatttttcattaattttcttctgctagtttttttctctaatttaaagcctaaatttaaagattaaatagaaaagctttctttgcttatgagcacaagtaggcactgtttttaaaagaaggaatatataatcccaggtgttttacctctgttaatgagaaagatgtctgtttgcttcagattgaatgagcaaagaagaggacaaggatatttgcatggttaaatgcctatgagcccttccttcagaaagtaatattcccctgatgtcaattacttttatacggacatctggatgtttatcatgagagtgtacagatgtcaactttttcagtattatagctggaaatgtggtgataacttgactttgatttgagtaaacataaaatatctaacatttaaagtcagaagttcacttcaggaaggggtttaaactgacatttattaaaaagaatggttccttggaaaaaacatcagaaccatccctaaagatacagtcactctgataaagtaaacagagtcccagttatgctctgtgtaacaaataacagaacttgaacatgacatttatctgttccttaaacttacagaagctggctctgaagatattgacatacttcccaatggtctggctttttttagtgtggtgagtgtcttcttccttccccaaattcagcagaggagatacaagggtatttgatgagggctgcagaacagtaagttgcttttaaaattcattttccaaaatgcattctgaagaaaagagaggtcaaacaagatcttggaaaacttcctccagcttttctaaatgtagagatgaagactctttgcccattgagatagtgttctttatttccccattgcattgcactaaaatattccaatgcaatctgtgttttgttttgttttttcttttttaattttttttattttttgagacggagtcttgttctggttgccccggctggagtgcagtggcatgatctcagcttactgcaacctccgcctcccgggttcaagcaattcttttgcctcagcctcccgagtagctgggattacaggcgcccgccaccatgcccggctaatttttgtatttttagtagagatggggtttcgccgtgttggccaggctggtctcaaacacctgacctcaggtgatcgcctgcctcagcctcccaaagtgctggcattacgggagtgagccaccacgcccagcgcaatctgtgttttaaatgtgcactattaagagggatatttgaggtcttactgtggatactcaatactaacattatactattttaaatacagcatctactcatctttctattactattcaacttgaagcaaatattcttgccattattatttattttcaaatattataccaaccttgcccttttgctttctttcttttttcccctgaatagccaatcataagtggaaagtcattgagtttatttacacccttcattttgccttgattcttgtaagctgaaaaacaatatcctttctgggtatacaatagaaagactttaaaaacaattggcttgtgaatattgttgtgaatattgttgaaactagcttgtaacaatgtccattctaattggaaatccagataaggggacagatgaggaggttctgaccacctacctccctggcttgggcagacataggagttcttggcatcttcataggtccagtttttctggaggaagaagtaaccaactctgacacctgactgtaattattccatttcctctcaacatccattattttcaggctctgagactcaagagggatgtgaaatactgggagatacttagaagggagtcaccacactaataaaatagttgttagacttatgagaaaggtgagagaactcaggttggagtagaatgagaattagaacactcttcaggttcctgatggtttttatgtgaaagacagtgagcagctggttattaccactgaggcaataaagagatactgtgggctttagcagaaacaccagtatatgtatttagtttttaaaataaggttttaaaaggaatgttttatttaattgcctacacagaatgaataaagtgatatttatagtaggactctgggtttgtttaggagcacatgcttgcacatgtgtggcttaggaaaaaccactgggaccactagtctaaaatattcataagtaaagatgcaaacattctgaataaagtagaaggcagttgcattgatttttttatttgtttatttgtgttttttgttgttgttttgcaaggatgtgttcttggagatttttataatctagaattcacctatttcaagatttctctccagcccccatagtaataaatctgaagtaggagggatgaggtctccaaacacataaatctacagccattttagcttgggggcatgttatagttacaaagatcttatagccatatcaatagaactttttctgctttttttctgttaccctcctttgctcatttgactttttttaaaatttagaaacattcccagtttgctgctgtttttcatttacttggcattgtctctaataaaacctagagtgtactctcttctaaataaagaggtcctacattgtggaggttgttcattcttcttcctagcattttagctcatctaacccaacctattttacagttatgggttgagggtcacctcaaaactaatgtcacacttcatgaagaattggatgacatagaataaaatataaaaaatgtaaacaatgtgagtgtgcttaacaccactgaactgtacacttaaaaatggtgaaagtgatgaatgttgtatgtattttatcataattaaaaataaatttttaaaaagagaaaaaatacttaaataaataaggagtgcgaacataaccatgactagttatcaccatctgatagtgcttcctttgcatgtaaatcatgcttttgttttggggacattcataaagaatagggattaactgaagtggcactgccatgtaacaatagcataattccagtttgttctacttaccaggcttgccctccatgaaaatatacaattgtagataatcttttttaattggagagatttcctcttatgtccaattttatacataaagtaagacttttttattgtgtgcctaaatttgtgtaaatatgactgcatcgtattagtaaactgaattaggtagtgcattcacataaaatttaacatcaccaagaaggctttaccttaagaatgtaatgatgaatcaccattttagatagactgataggtaatttattaactgatttaaaagagaaaagacctatatcatctcagtgagtaccaaaaagcatttaataaaattcaatactcattcctaaagttccaagcaaactagaaagataaggaaaattcccacaaaactacagcaaacatcattcttgatggtgaagcattggctgcatttgcattaatgctcagaacaggaagaaaatacccaacaccacaaccatcagtaatctactagagttcttagtaattcagtaaaacgagaaaaagaaatgtgagatagaaaagaaaaagacaaaactgtcattagagaagcagggactggctcaattgcccaggctgatgtgcagtagtgcaatcatagctcactgcagcctgaactcctaaactcctgcgctcaagaggtccttccacctcagccttccgagcagctaggactacaagtgctcaccataacactcagctaatttttttttttttttttttttttttttttgtagagacagagtcttgctatgttgcccaggctggtctcaaactgctggcctcaagcagtcctcccacgtcagcctcccaaagtgctggaattataggcatgagccaccaggcctgacctaaagctgtagtaatttaaaaagtgttatattggcacaggaatagacatgagacattaaaataacaaaacagagagtccctaaatagaccaatatgtaaatgtcagagatctagcacatgataaaggtgatattttgaatcagtgggagaaggatggactgtatgccaggcactgttccaggcactgggatctagcagtgaacaaatttccacagtcagtatgtagatgtcacttttctccaccctcagctctccctggaatcacctagtccaccaaccttctgattactctctgaagagaataaatccctgatcttcttttcagttattttcaggctttcagtattccacctccccgttattattttttctgttatcttttctctgttttttgagtttttgtggctttatgccactactttaaccacaatctctatttatccttcatgtacagttcccatgttagtccataaaaatacttaagcttttgtatttaacatttttcaccgttttggaaagggtctaaaattcccaggactccacagctttgcaccagataagcctggaggaatactaatgatggatctaaaagaagaaaaaccaagggcacgggaattaagaatcagtcgtgggtttgatttggcctcattcaatccacatggcatcagcactttcatagacaacggtaagagccaatgggctaccaacatttagtaacgtgtgatggttcacaaatgactgtgaaaaatagatttggatcatatttctaggaagagaagaacaattaactcatgagtgatttctgtattcttcattacaaagaacttgttcatttgcctcttcagctggcagtaagttatgctacattttgaaattcctaacaggtaacacctgaaagaatgtttagatttcataatcttttcatatacctacgatcatcacatttaaaaaagaactgtatttttgaattaaagtagaaacagattatgcatgaattctgtatatggagtaggaaacactttcttaaaggtcagggagccaatgatcagaaataacaccagacggacagcaataggaaagacagagaatgatctgttaggtcgtctaacagcttatacattcaacctttccttgcctgtggtatttaaatgtcagtgcctgcccagaggtcccgtagttatgtcttgtaaattaactctgttctttcaattctttagatgacacagtttatctctttgttgtaaaccacccagaattcaagaatacagtggaaatttttaaatttgaagaagcagaaaattctctgttgcatctgaaaacagtcaaacatgagcttcttccaaggtacttcctcattttgttccttctctaatttatccccagcatttgcaaacaatccctatggtgggttgtcctgtcatcttttataagcgctaatgtatatattagctaatatgtaagagctaaagagcttatatttccttatttataaatgtgtgtgtatagtttccttataaaccagggcaagcatggcatatgaaagttgatgtcactcatactattcactgttctatgcggactcctttgagaaatgatgaagtgcccgactacagggtgatactcttcaggcccatcttgagggtagaaggcaaaccctaacattttttcctgctgtcaccctccatcttagatgactcatcacccagatgagtgtcttgccaaggaagaatggcctgttttttattgggtttgtatgctttgcatgggactttataccaatcgctttcatagggttagtgatggttgcatgctagtaatcccacagaattagagccactcaagttgagagtgagtcattacacttcaagaacataaagctggttgaaaatgtggctaagagagaatcatgtgtacccccacccccagttcagtgtgtattagcctactgcttcttttagtttaaacttgatgaatatttttaatttctaatgaaatttcatttctaatgaaattaaaaatattgcctatctagggcctatctatgcctatctagggcataagcatgtaacttccaatcattccttccaaaaatgcacttgataaaaaaaaataggagcataaataccatccaagcattatggtgctctttcagaaaaatgagacctaccttccctgtagctctatatttttcatttagcaaagaataaagcagctctttcagaaatttttgcatagagtaattggaatttaaatttaataacaccctcacctaactggtcttaaaatgaaattgtttttagcatataaatctctcacctgaagcattgtactatggcaattttatcatccatctctctgcaagtgtttattgagtgcctgttcattctcggcatgtcagctttgtgaagcaggtagaaattgaacagtcaaccttagtttgactaataactaagccagggaaattagaaaaatccaggaactgagtaaatggaagctaggtaaatgttactgactgcctaaccagctcaccagccaatcaggctctctccagctctgtactgtggacagctctgtccttacgtataattgttaaaccctacatttcttgctgtcaaaaaacatgccctgatggcactaagttctttcttctcttatggtaatcctgccataattgctaaatgacctgtgttcagattacctggtaccatacaaaattgttctctggcaacaatattatagtatattgtatatgactatagtcgtgatttttagctcgtcttttcctcttaccaaaaatttaaagcacatgttgcataaatcttatgagtacttaatatttaatatggagaccaacaggccttttgtttcctctcacatgctatttttctttttcagtgtgaatgacatcacagctgttggaccggcacatttctatgccacaaatgaccactacttctctgatcctttcttaaagtatttagaaacatacttgaacttacactgggcaaatgttgtttactacagtccaaatgaagttaaagtggtagcagaaggatttgattcagcaaatgggatcaatatttcacctgatgataagtatggccccttatagaatatcttcatttttcttcagttgtggtgctggccaaattctttactttgctttctttgtcaatgtgaaaatagttttcttgacatttatggtatattatacatataatatatagatacactatatatataattatatatgttttgtatatatatttacatatacttagtcacatgtatttatatgcaaatacaataccatatttaagtaaactatataatacagtaatatatatgtatttatatataatatataaagtttggaatacatcattgtcaaatttaattttataaatataaattttaaagtgtgatcatactgatgcatacatattgaagtatcaggtatttccttttaaataaatgtattatttttattggctatacattattccattataaggatgatcttaaactaatttaaccaattctctattgatggatatgtgtataggggtggggagttctacataaaaaatattttatacttcttatttaccatggaattttaaacaagtattttttttaaagaaaaagtccctaggagagtgttttttttttgttttgttttttggagatggagtctcactccgtcgcccaggctggagtgcaatggcatgatctcagctcacctcaacctccgcctcctgggttcaagtgattctcctgcctcagcctcccaagtagctgggattataggcatgcgccaccatgcttggctaattttgtatttttagtagagatgaggtttctccatgttggtcaggctagtcttgaacctccaacctcaggtgatccgcccacctcagcctcccgaagtgctgggattacaggcatatgccaccacacctggctctaagagagtattataacataatggttaaacttgcagattttggactcatacaggcctgggttcaaatcccacccagggcactggctaaatggttctatgagctacttttctgtagaacagacccctagaaatagaactatttgctcaaacagtgtgattcttttaaatgttaactttaatagatattgccaaattgtcctccagaattatctcattatttttatatgcacaaccacaacctataagagaagatattaaattcttgatagctttcttatctactgcctcagcacactgaaaaatttaaactactacaaatacaacataaaataaatttggcactccttgacaactaaatgcccttatttttgtaatccaatttctcctcctttcttgttgactatagaaaaagaatgtagaatcatttaatttaaattgtctctaactgacctgatccaacctctgcagccaaatctgtttttcactcttatatttccattatgagagtcaaactttccaatcacccaagctaacaaaaaaataacaataatgaaaagggagaatcagcttttactcctctttcaccattcctatccagcctgtaggcaggtcctgttggttctacctgtgcctccttcctctacccccaaactcctttccctttgagtgagacctgcctaatttaggttgtcatcctctctgactagcatatgagactttcttccaatttgttttctgtctacttggatttttttcactcttgccaattttgtctgtctatctctattagccttgaagggctccccaaagagggaactctgtcttcctcacctttgactccttatgccagtacagtgccaggcacaaagcaaatgctcaggaattgtggaacagaactgaccatttgttgccactttattattctaagatttcagtggaatccaattgcttatcaaatcaaggcagggtaaagggttggactttgtttaacaggccacctccaacctcccttttctactatttccatgctttctatgctttagacaaagaactcattgttttaaacattccttcctcttcttgctcctgtgattctgctcttgtgcttgcttctgcctgggaagtgcctcctccgtcctcatctcaaatctcatctctctttacacagccactgcagatgccccttccttggtgagcctttctgtgtcctcggaagttagctatttctagacctgaactatttctcatgcttattaggtgtttaatgtgtacaaaccagtgagatttgttccaacacactataaactttcaaggagagaggctgtgtcttcttcatgtttatatctgctgcaacactgagttcatggcttttcacacataattgctcaacagagcaggtgccatggaaagtcaattcaatgagtaaaattacctcaaaatagtctgttaattcactcacctttgaagtagacagattattctgcattgatacttatctcttactcttaaaattcgctatgtattaataaatattttattgaatattaaggaatgatcactattttaataagatgttctttaccatatatttctatatgtacatgataattagaagtatcaaattatattgtggaatgtaaaagcttttcttctgaagccaagcatttgttttattgtcatttcagtggcaaatatggacttcatattcaaaatgatgttctatattatttttccttacaagctttttgaaaaacaatttaataattccatgattgttgtagcaccactgaattgattctgaaagcttactttttaaataaaaattgacctttatcaagcattccttgagggcccatgattgattaacttcttggcaggttattaagacttattctttcacactgtattaatgaagctttatattggcatggagctctaaccactgtgtcctttctgcaaaggtatatctatgttgctgacatattggctcatgaaattcatgttttggaaaaacacactaatatgaatttaactcagttgaaggtaaaatatttatttttacatatagacagtaatctattatgctttgcaatgacatagtttttctataagagtaccacacgtagaacaaaatatggatgccagtgtagctattctgggtttttaaatactccctacaactagagaaagctcctgtttccagcgatctcaagaactgaccatgattacatgcagcagcaggttgagagtgatattcatcagatttagggcccattccatgaagtattgatggcagtggaagaattccaataagaattttcacaattgaaaatactaatagatgaattctcaaatgaaggtttatgcacagtgtcagttctttcaataatacatgaaggtagaaattgggttccacaccattattattttcttcctactcaacaacacatattttaggttgattaagaatttcctatcttgctttgattgagttccttgagctaactgatcattgtgcatcttttaaaggaaaaggagttcagtttttaagatagatttttacagagaccgattatcaccctaactttcttaatttcagggaagaagaaaagtggctccaaaccagtttttaatacattccttttaagcaatattggtgttagaaggtggaagcagggcgatgtgtaatttcctcacatgcatagaggcaggaaggttacctctaaattatttaatcaagtttctcatgtcatttagattttgacaatttctcatttggaaggtacttgagctggatacactggtggataatttatctattgatccttcctcgggggacatctgggtaggctgtcatcctaatggccagaagctcttcgtgtatgacccgaacaatcctccctcgtcagaggtttttatattttcagttttttaaacttaattattcaagtccttttgaactaataatacaataaattgtcacagggatgatttgtttagttattttaaagcaataatataataagcttatgtcgtggttttgtaattgcgttaagccaataattggcagaatgttacattgttcaaatactttaagaaaggtaatcttttgatgtattaaattatggtggaaactagtcaaaaggcatttttataaagacatgtgcccttcttgggtggtatactggcaatttttaaaatatctgatttattgtcagctcaccacatgatgtgatatttgttcatgttgaagtagtgtgaaagtaggcacattagtatgaaagtatttctattaaagctgaattgctataataacactaaatcctgtgttggcatggaataactagatggttttaagaaagtactttctttgaagattggagaaagtactttaatttaaacattaaaaagattggtaactgctattttcaacagcatgtccccttaatcagtgtgtcattgtggaaaacagggcttattgatgattgagtgacatgcatgtacggtggtcttatattcatactttgtatcccctgaataggttctccgcatccagaacattctatctgagaagcctacagtgactacagtttatgccaacaatgggtctgttctccaaggaagttctgtagcctcagtgtatgatgggaagctgctcataggcactttataccacagagccttgtattgtgaactctaaattgtacttttggcatgaaagtgcgataacttaacaattaattttctatgaattgctaattctgagggaatttaaccagcaacattgacccagaaatgtatggcatgtgtagttaattttattccagtaaggaacggcccttttagttcttagagcacttttaacaaaaaaggaaaatgaacaggttctttaaaatgccaagcaagggacagaaaagaaagctgctttcgaataaagtgaatacattttgcacaaagtaagcctcacctttgccttccaactgccagaacatggattccactgaaatagagtgaattatatttccttaaaatgtgagtgacctcacttctggcactgtgactactatggctgtttagaactactgataacgtattttgatgttttgtacttacatctttgtttaccattaaaaagttggagttatattaa

SEQ ID NO: 15745 - DNA, 30125 bp, Homo sapiens
ggccaggccggagcgaggcagcgcgcccggctcccgcgccatggggcggctggtggctgtgggcttgctggggatcgcgctggcgctcctgggcgagaggcttctggcactcaggtaggtgggactcccgcgcgcccctcctcggcggtccccaggctcggggtggccgcgtggtgcggggagggcgcaggctgggggagggattcctgcgggacctggccctgcggccgggggtggagaatttttgaatgctgtccctcccccagctagttgaacccccatcaccccgactctccgcttctagtgaaaaaactagcaaagtttggagtgaatcgcgacactttcttgaaagtttataagcccttgctgctaacaaagttctcttctgcttaggctgacaagagaatgctttgcaattacccaagggccaaactagtggtttaaattgaaaacaaaatgactactcatgcattgaaaccttaactatgaagatttatttcaggtcattggtgctgtttctccttgttgcccaaaccagacccgtctttaataaagttgttctccacccatttctgcatagtttgagaaactcttcagctgtagatcaaagacacttgaaatattcagctactgttcttacttcctatttattcaccagggaagcctgaagccagaatgccagacagcgcagacactattccatctcgcattttagttttaatgaaaatctctggtaggtagacatcatcgtttataaattaccaactcaacgtttgttttttgtttattttattttttgtagagatggggtcttgctgtattgcccaggctgttccctaactcttgcactcaagcaatcctccagcctaggcctccccacagtgctgggattacaggtgtgagctgttctgccctgcctcaaccaaaattttataggcctcatgcaaaagagttccagaaagactgagcacctgctatgtgtaatgttctctcttaggcttctatagtagagtacgacccttatggagtttgatacaggggaagagagaattaaaatacagtaaatgtataaattaggatgttctaaggacagacacaaatgaaccgcataggcttaaagaggaaagattccatcccctgagggtggagttctagagggaggaagagacattcgacctgaccttgaagggtgggtgcaacacatatgagcatgaaggggcccatgccaaatgtatagtgcagcaggagcaaaggggctaaggtgggaagttggaagactagcaaatgggccaatttgaagggagcataaagtcaggagatgagaatagtagggtggtgggaaggataggttttgaggccattaaatataagttgaaaaatggggccccactttcataggcccaatagtgcttcaaaagggaaatattggtgggttttgcttttcaacaagaacttaatataactagttgtgttttatagagataagcctggaaggggggattggaggagagcaatggttctctgtacattagaatctcctggagggctggtgtctgagtggcaccaccaaagattctgattcagctgttctggatcagaatctacagctcacacctgtaatcccagcactgttggaggcctaagccagaagattgcttgagcccaggagttagtgacaggcctgggcaacatagcaagatcccacctctacaaaatgaataaataaataaataaataaataaaaaacaaaatttgagttggtaatttataaactatggtgtctacctaccagagatttttcgttataattaaaatgtgatatggaataatgtattgtttggcaagctggcttcagggttcccaggtaaatagataaataaggaagtgcataatgtaagaacagtggctgacagtagcagtggcattttttatttttaaaaacattcctgataattctaatgagcagtcaaggtcgagaactactagaatagagagcagacatggggtaactggttaaggtattgcagtaggtcagagaggataacagggacccaaactctggaaccccagggatgagggagaagtcaaaggtgctaccagagtttgtgccacagctccactgtcccatggttgtagtttcatctactgataaagcagtgcaaagaggaagcgtgtggtggctgagatgggagtgagatttgaggaaagaacgcttatgggtaggaaatggacatgttgaccttaattttcatgttaggtaatgcccattgtgctctacagaacattcatgagttggatgactttgtatatgatctgtcctgctctccatttcaaaggcaagaccaccaaaattcacaagcttattatgttgtcactaatgtgtaagccaccagtttttctgcaagttggaagttttctcaacagtcaaatattcccccttctcactaatcttaaggttttaaagttatagctgcaaatctaaaaaaaaaagaaaaagtaaataaaacttattgacagaatgcctgatagtttatttacaggtttttgtttgtttgttttttgtttttctttgttttttattttgacacaaggtcttgctctgccgcccaagccagagtacagtggtacatcaaagctcactgcaatctcaaacacctaggcacaagcagtcctccctcctcagcctcctgagtagctgggactacagatgcatgctaccatgcccagctagtatttttatttcttgcagagacagggtctcactttgttgcccaggctaatctcaaactcccagcctcaagtgatgctcctgcctcagcctcccaaagtggtaggattatacacatgagccaccaccctcggcctactttacaatttgatgcaccttttctttacgtgactgtgatgcactttaatgggcagtgactttataaaatggtaactttattggatatgtggagccccaaatgggctgacgtgagaatgttggggtaggtggtgggtggctggatttagcaaagaaaaatgtaggctacccagttaactttgaatttcacatggatttttttttttttttttagtataagcatgaaatacttataccatacttttagcattaagcgtggaatttgggacataattatactaaaatatcattcattgtttatctcaaattaaaatatcactgggtaccctgtattttatcatatgttcgagtgccttctgtcagaatttggtgaccctttgagtctgttttaaaaaggagcatgtttggccggacacagtggctcacgtctgtaatcccagcactttgggaggctgaggcgggcagatcactagaggtcaggggttcaagaccagcctggccaacatggtgaaaccccgtctctaataaaaatacaaaaattagccaggtgtggtggtgcatccctgtaatcccagctacttgggaggctgagtcaggagaattgcttgaaccccagaggtagaggttgcagtgagccaagattgagccactggactccagcctggacaacagagaaagactccctcaaaaaaaaaagaaaaaaagcatgttcccacctccccataaggaaaggctcttcagaggaagttgaaggaacagaggctttatgtttgatttttgctttaatctgatgcctactgtttgattattcaatatttagagatggtactttggcaatcaagttatttctctccccaggttgcccacttcaatttttagtataaggatgtcccagagggataaatgccatcaaagttgtctttcttcttctgaactgtaactgggattccacaccctccttttccacccctccctagttgagcaataaaggggaaaataacagtatacaaatattcccaggccagttcctggtgtcaaggtacacagccatggatgaatcatgaggcttgagtgcatcagagacctaagcgtgggcaggaacccccagagtacccatgtgaatgttctgcttgctgcctcgcaccttttatgacaattcccacaagaagctatgtggtctgtttctacttctgaaagagcagcctttttcccttttttttttttttaaaccaccatcctttaaatcatttattatgtaactcttgtgtgctggtcagtcagtgtgtcaaaagtgtaaaaacttctttatttatttttttaatctatcttttaaaaaatattttctttctttttttcttttttcttcaaggcaggttcttgctctgtcacccaggctggagtgcagcagcacaatcatagctcattgtaacccagaacacctgggctcaagcaatcctcccacctcagcctcctaagcagtgaggactataggcatgcaccactacacctggctaattaaaaaaacatggccgggcacggtggctcattactataatcccagcactttgggaggctgaggcgggtggatacctgaggtcgggagttcaagaccagcctgaccaacatggtgaaaccccatctctactaaaaatacaaaattagccaggcacggtggcacatgcctgtaatcccagctactcaggaggctgaggcaggagaatcacttgaacccgggaggcggaggttgcagtgagccattgcactccagcctggcaacagagcgagactctgtctcaaaaaaaaaaaaacaaaaaaatttttttgtagagatgggggtcttgctgtgttgcccaggctgatctcaaacttctagccataagtgatcctaccgcatcaacttcccaaagcactgggattatgggtatgagctactgagccctgccaaatttctttatattaaaccaaaacgtacatttactgatatttggaaagaaagctcttttacttttatgccttcatccagtcttcatagatatcttcccttttacattataactgtaaatactgaggttagagaggttaactagttagttcaacagaataatataaatattgaataatataattaatgaataattagtgctgaacctgtcgcctcagccaggtctcctgattccaaatacagtttgccccagctccccacagtcttctagcttctctgccagtggagcaaattttccctaggtttacaggcctaagcacagattcttagttacttagtgcaagtattgccagagcccaaggggtgaattccaaagggtttttacaaggctatacataaaagataaagccctggcttgtatatcacttgcacataggagataaagccccagcagttgtatgtaaatttcaaaagcagagaagtatggcacaaagaaactcctgatagtaacactgtgttcccactttgcttaggggcatattggcaccgtagcatggtacacccttactgctacctgccatgaggccagataatagctagcagcccctggtctcattctactctggatgggtactgctgtttcctgaatgaaagacactgagattgatttcatgctaatgactgttggttaagagttcatgctttctattcacaatagcaaagacttggaaccaacccaaatgtccgtcaatgatagactggattaagaaaacgtggcacatatacaccatggaatactatgcagccataaaaaaggatgagttcatgtcctttgtagggacatggatgaagctggaaaccgtcattcttagcaaactattggaaggacagaaaaccaaacaccacatgttctcacttataggtgggaattgaacaatgagaacacttggatacaggaaggggaacatcacacaccggggcctcttgtggggtagggggaggggggagggatagcattaggagatatacctaatgtaaatgacgagttaatgggtgcagcagaccaacatggcacatgtatacatatgtaacaaacctgcacgttgtgcacatgtaccctagaacttaaagtataaaaaaaaaaaaaagttcatgctttgtggacaggtagcctgagttcattcatagctctactatttacctgaaaccttggactaattatttcacttttctgtgccccagtgttgtaatctgtaggatggggtactgcctgctccacagtgggactatgagaatgcttaaaataatgccaagcgcacagtcagctcaataaatgtcatctatgtagacaatgaaattcaagcataattccttaaacctttgtgccatacatccctttggcagtctggtaaagccttcattccttctcagcatcatgtttttaaatgagtaaaataaaatatataggattacacaggaaaccaattaaatactgctaccaagctatttaaaaatctatgatataatatgctttttaaattaaacccttaaatggatctagaggtaggtaaatgtctaacagcagatattttgaagttgcaatgaatgtaaatggcactttgagctatctacaactgaaatgcgatagaaaagtatctataatttctattagtgacagtcacaaatactactaatagtattgtggtttgttgcttatactcatcatcaaaggaaatactcaatttgagttaaaggtttaaataaagatgtatttttcccccatccaagttcatggatccctgaattctacccatggattccttggtcactggactccataggggtcacttggggaatgattgtgacaccaatgaaggaagccagcggatactgtttgctgtattatacctaccataggctcgtgatgaggaaataataaaataaataactgtaatgaaaaagaaaagaaaggaaaacaaaaggaacctaaaacagagaaggcaaatagctttccttttgagtgtcaattttaacagactccctgtggttgcgaaacaatgtgtctgaggctggctctgggttagagggagagtgctgttattgattagcaattcctgcatgacagcagagtggcaacagccatgcatctctgacctggcacagtcataagcatgttatagacataaagtgttagggaacaaataggctctagcaaaagtaaagagtgttcctcctctcatatcatcacttatatgtgtttataccatttatgttgtattttttacatgaatacttttagatttattaatctaatccaaaaaggtttgtatagctttctctatattaagagaaatatatgtatttcttaaatacacaaagttcttaaatctgatgccagcgaggattgcttccagccacaagtaacatatatcagattaatagtagttcattcaaagagggatttattttcctcacatgaaaaacagctctgtgggtgacccaatatagagcttgttcattgagccagtgattatatcaaggaactgggttcttcatatattttcattctttgatctccccctattgactttatagctgtatctttctcaaggatgcagaatggctgccgcagtctcaaacactgcgtgtgtgttcaaatcatgaagaaaggagattgagtgatgccagctagctctcttctcgtgactctcctttgtatctagaacacagtgtctttccccaaaacctgggtcatatgactacacctcaatacagcggagtctgggaaagcaaatatttgctttgcccaccactacaatagaaacgacaagggagaaagaaagggggttgggcatggcgttaattttgtcagccgctagggtctgccacccagaaaacagaagtccactaacaagcagggaactgattgttctgccagggaaaaagtctggcagtttcctactgaagaaatttggaagtcttgatggtccaggaaggataaaggcaaaaccttcattttcttttatcaaaaaggaaagccaagaaaaaaattagttaagtagaagttatgcacaaccctcatgtaactcttccatgttaatagcaggtaggctgcatatgaaaacatgatattatacaagaaaactagttgatgaagattgccctatttagcaccaattacttacgcaaacctaagttgactctgaaacaggaaccccatattaaacttttcaaacacatcagaatatgttactttgaacagattttatttaatccaaagagattatctttgaaaaaggtagatggtaaacatcgttatccctatttttgtatagtcaaataggcatagtagtaagttgtgtaaaattgacatccaaaccaatgcatgatactaaaacttggtgtacaaacagcagttacatcctattgctttgtatctacatctgtttctggagtcatataacatttgtagaatcttggaggtgttttaggctcatccttattttatccataaagaagactgacacctatagagattaactgacctgccaagggtcatggcagtttcactgctgagacaagaacacagatccctttacttctttctgagaaaagtacaaagtagtttaaagcaaaagcttccctgcttccagcacttctggctaagttgcgccgtgggaaaattgttttgtctgattcagttttctcatcttttaaactggaataatgctacctaatttacagggttgtttgaagaattaaatgaatgcatggaggtaaatcacttagaacagcggtaaattatacttttttattatttatttcctttgaccacccacaattatcatcagtgtcatcctcatcatcacaattaagattactaccacattaggctacataaactttttttttctctctctgttttataatttcaattttattttagattcaaggggtacatgtgcaggttttacatgggtatattgtctgatgctgaggtttggggaacaactgatgccatcacccaggtagtgagtatagtaccctatagtttttcagcccttgtctactcccttcccttccccttctagtagtccccagtgtctaccatcgtcatctttatgtccatgtgcaccattgtttagctcccagttaaagtgagaacatgcagtatttggttttctagcttatttttcctctcttaaatcacttctgtgacacgtaggccatgagatttattgtattttttaatgccttatttaaaaatttgtattatttaatacatttaatgcattattttttattatatttaaatattgatttatttgtactttttgccttattgctatattgtttcaaaaaatttaacattatttgagttacatgatttcaaatacatactgattaacattttaattagaaactttatgtctgatatgaattgccaaaatgtgtagttggtacaacctatgagtcattctgggttatctagaagaaactggtagcctgccccatactccagaagccttccccagtgtctagacctcagaagctgtcaggaatatgcacaggagaaggacacatggcaaatagctatttcgtctcttaaatgtatggtatgtgggaaccactgaaaaatgtaaagtttctacaaggtgctatttttattatttatggctctagagaacagagaaggtgaaaaatgtgagagagaagggaaagccaatagtatgtggccttcaaaacaaaagatcccacagatattgtcccaaactgcttcctggccctctagagtggagagggagggggaagacatcctattagagttcaacattctcttattatttccttcttttaattttctgggtatacaacagcaaatagttttgctgaagtagttacagaactagttggtgttctccaaccttcctattccaatacatactgtcatggatgggtacactaaaatctcagaattcactgctatatcactcatccatgtaaccaaaaaccacatgtacccccaaaagctattgaaataagataaatacattcttatttaaaaaaatactgtcatagggatgctaccttcttttcttttttgttagtaactatttgtgggatgtctttggtgtgtcaggctctgagcaatgccattttctcttggcttctttgcagtctctgtgtgaggcttacagtcatttttcacgtttgactcttcagaaggaagacagggctactggttctacatctggaactcttttcccacaacaccaacactgagaaatgtgacatggtgctgtgtttacatttgcataggaacttgcattataagttttatttgttgagttattggctttttttttttaataacccacatcagtatatagaactttgcaataggcatttttgttttaacttcatttctggtgcagttttattttcctacccttgtctttctattttctctttcatctgctttagacttaaactgtgttttatgtattgctgtaagcctctttaaaccctttctaaaacaaagcagggaatacataaacaaatagttttttgttttttgtttttttttctttgtaacagaaatcgacttaaagcctccagagaagtagaatctgtagaccttccacactgccacctgattaaaggaattggtatgtatatgaaaatgcttgttgggcacattgcattttttggccattaacattaaaacactcattaatggcattttagcatgaaattactgcttttcagtggataaatcacattagatcaacaaaaacctctttggtcaacctcttgatctgatgaaccctgtatttattcttctttcctaccctcactgtaaattattcttttttgtgtgtaattctatgtttagcatttgatttcttgcttgttttgtgacttctctgaactatttttgttgcgtctgtattgtttgtcaggtatggccgctgcagtctgtgttctgtgagccttgtggtcagctagtgaaggaagctttatgtaggcagtgacagcatttaccctgctcactactctataactaggatctgatcttatggctaacacgtaactgaccaatatggtttggttgtgtccccacccgaatctcatcttgaattgtagttcccataatccccacgtgttgtgggagggacccagtgagaggtcattgaatcatgaggtggttaccctgtgctgctgttctcgtgatagtgagtgagttctcatgagatctgatggttttataagggcttttcccccttttgctcggcacttctccttgctgccgccatgtgaagaagggtgtgttttcttccccttccaccaagattgtaagtttcctgaagcctccccaaccacacggaacagtgagtcaattaaacctctttcctttataaattacccggtctcaggtatgtctttattagcagcctgagaacggactgatgtaccggcacttcacaatatgtattgtaaaaacttgtttttattttatcttctaagctatgactgcagagggggagtctccctcttcccttgactttatgtaggatgtattgtggagtctgagtctttgagtaggggttcctaagagcaagccccaattttgctatagataaggagggatctgtccagattcttctccagcactgagggtctctctggtgtgtttgcagtttttctccaaggtagagtctgtgtcttgctgtcttttaccctttatcatctactaagtacatgtccctagtacataatagactagtagttagattatcaatgaacaataaatattggctttccttttttttaaattttaattttttttttttttttttttgagaggtggcctcactttgtcacccaggccagaatgcagtagcgcaatcttggctcactgcagccctgatatcctgggctcaagcgatcctcccgcctcgtcctcccaggtagctgagactacaggcacatgcccccactcatggctagttttttatttttgtagagacagggtcttgttatgttgtccaggctggtcttgaactcctggcctcaagcaatcctcccagcttggtctcccaaagtgctgggattgcaggcatgaggcactgagcccagccaatattggctttccttagatatggttcatggtatgattagaaacaaaaagaattagcagtcaaaacacctagtttctagttctattctgccacaatgtaaccttaggcaaagttggtttttgtatttgtcacctataatgatgagtttgtgattagactaatggtttttagactttaaaaagcctgggaccatttatttataatcttactctgagagccacagtgtggaaataactagactgtcattgagtcacttctagtcctttacaacaacatccttctctagaggtaggagagacaatttaatattttgttttactctttagaaattaaaactcgggttacatggaaatgttctcttctctgaataggtaacattgttaaacaagttttgagtgtccttccatctttttctttttatgaatactcctgtacataatttttaaaaacataagtgaggtcaaattatgcataatatttcaaaactagctttttgtacttaatactaggttttggaaacttatgtttgtacataatgttaccttttcttcacaactgcacagtattttttgtgcaaagttcatataaacagtgtatgtgcaaacaatatagaaagatataaaatggaaagtaaataaaaataaaaatctctcatcaaactcttcatcacccccaacagaaataaccccaaagataaagctcccttttttatctttcctgatagtttcagtgcatttgcaaacaaatatattgactctttttttcacaaatagaattttagtgtaaatatttcacaaccttcttcattcctaaaacagtgtgagcagctttccacatcagcatatatagttactttgttctttttaatattttcacattccatgatttatttaaccattccccttttaatgtacatttgggttgttacagttttttgcaactatgaacaaatcagtgaacatcattgctgttgagtttgtgtgtctgtagaatatgtccttaacaatgggattgttgttcccttagaatatgtgtttagagttttgacagtcattgctaagttgctctcaatttggcaacagtaataaactcagtacctcatagttgtaaccacattcactccagacagagttctcagcactcttttagtaaaaataaaccatcagttgacagtgccaccttcagagtttctctacaaataccttgcttgcctccctttctttttttcttcttttaaatcagcttcctcaggttgatctgcctctcattccttaggcatctgtttcctatgtgttctttctcctttttttcattgatacttttgtatttccccagttctacctcccctcccctagactggttggctgtcctggaatttcccttccttctttcaattgcccaaacactaagtgggaggaggcaaactcatatcaaatagcagattgactacatctgtgctggatcatgcagacagttcaagagtcccaagtaacttagcagcttcatcttgccttccagctgcaatcaagaagagccctctcagaactggtcactcagcaaaagccagatggcattagtaaaagatgttgggcaagggtgggagtttgggccagtgatctcttaggttacttttgctgctgagttaataattgtcacattattaaacagcccttggccctgggaagcccaccttctgtgaatacaagtctcagagtagacaatagggcacaaccagccatgttacatgacagactgccaagtgcattcctcttacaactcactgggatggagcgctcctcagagaaaaacaagcccagcaacatttgtattctgaacaggcatctgtctatgtttgtgacctttatgttgtgatgtgtgtgagctgctgtctggaattggaaagaatgaggaaatatgtcacctatggcccctcttgtgaagtgttaaatgcctctgaggcacttcaaaaggcaacagagcggagaggatgagtgattagaagcacatttgggatacatttttagatctaattagaattgtccttttttttttcttttttgcttttgccctgtggttagcacacaccatatgaacgtttgtcgaatgctatgttagtgatgcataatggttaataataacttttggttatatatctttaacaacagttgcttattcacaggtctttgataagaagaaataacaatgtgctggacacacatttctatacaggcaaaagtgactttttatgatagagagggctgtttcttattttctgttttgaaaacagtagtagctatgcacttgaggccaactaatccctctaagaggtgaaccttccttcccccttgcccttgattcccatcaacacacacatacatatgcacacactaccgtgcttcagtcaccatcactggaagtgaactatgtgcaacttttgggtgctttatatatatcatatcatattgtgtctgctttaataaatcatagttattgactacatatcatacaggatgtgtgccttctgtgggtcagaaaataagttcactatttagtccttttcaaaaattccttcccgatctatcttatagacagaaactaagcttttatacacccaagatttggcagattaacatctgcatattaaaatgtcaagagctagttaactttatttgaggcttaaaagttaaaaaatctgattttctaaatgtctggccttcaaaatttgagtggactgtctttctcaagataactaacaattttatgcacttggcagtcaagacctttacaataactgctgcttgggagattgaggggaaaaaagcattaaagtttgtggcccttataatcaagtactttacagtctactgatgggagaaaaggaaaacaaaacaaaacaaaaaaccactgtgagatatagatatgtcttttctttctctagcagataagtacctgaggctcaaggaggttaagcaacttttgcaaattcactttccaatatagtgtcttttcccagggtgactaatgtatatacttgatgagtgaaccagaaaagtaggaaataatatgttacatatgggatgctctattgggtatagtaaaggatgcgttgctgttataaaattatagtcacttagaaaagagatgtttatttttatttttctctcatcagtcttaaggtaagtgaatggcctagggtagttaggtgactgtgttccatatggtcattcaggggcaaatgctgatgaagcaacacagctgtcttcatctaagactagaactctgcttgttgccatttcccagcaggaaggggttgaaagaaaatttatgtagatttttttttctacccagtagttgcatatatattgtattctcacatcctattgacccaaacttagacatatggccacatctgtcagccagaaagggtgggcaatgttatctatagctgtgttgctacgtgcctattgctaaaaaggctaaaaaggaagaaggggaacatggatgctggtgaacacttggccacctctgacacagataattgctaaagtaataagaagagatggaaattaaatgtgctaagctaggagactttctaaagaaagggtttgtcatgctacgctgtgccattcatgtgtttttttgctcatgctgttccttgtgcctggaaattctccccctaattcccctgagcagtggatgcagtggataccctccccagatcccccccaacttccctgagtgttggctaccaaaagctctgagtgcacccagggagctaagtcctcctgcccacaggcaataatggactgacacggggtagacttaaagaaataagaggcacatcaatcaattgaaatgtgtgggaccttacctggactctgaattaaacaaactgtaattttttaaagctacaccttttaaacatgattggctatttgaacactaactagatatttgatgatattgaggaattattgtgaatttttagtgtagtaatgatattgtggtttgtataaatatatttagggataatatgatgcctcagatttgctttaaaataacacaggatgaggataagtggtaggactgcaagggaaacaagactggccatgagctgataactgttgaaggtgggtactgggtatataagggctcaccacaccattctcttgatttgtgtctatttcccataataaaaagtttaaagagagagaaccgatgaaggggagggagagagtcaagcacacaataagagtgacaaacagtgccaaatcagcccacagtattaagttttcacatatttacataaatatcacctggaatgcaatattgaaattaatgtatatcactagaataaaaaaagtaaagatttaataaatttgttttgaaataaaataagttgaaatacgaaaaagacagaaaaggttttgaaagaggttttaaagaaaagtgcaggatattcattggtaaagatgttggtgagaggcttggaagcaaaacttcaggggaaaaagacaacatatggaattgaccacaattgaatttacaagtgaagtggctttacagaggaatcaggggatgtttctgagagaggaaattcattaaattctaacttgaatattttctgtttgcctttaagtcagagcaaaggctttgagtcccagcttcccagtttgtgaccttgagcaattgcttaacttttccaaagcctccaatagtcttcactctaaaataaaagataatcatatgagatattgtatgcagggtatttacaaggagcctggtacttggtgtacctaatgtatgttagttattattattaaattagaggagcaaaaatttctctagcattgactgctcctgacataatcacaccgaagaggggatacacgatgataaaaccttcctgcagtagtggctatagaaatgatgacggggagaagatctggaaaatattccaaagaaggctacagatagatacattttttccattggaattaggcaatggagttaaacagaagttacaatatggttgaaataaatgtatttttttaaaaaaagatttctctttccttaattattaaaaaatatacaattttgtagaaaattttaaacaaagtataaagaaaaaaataaaaatcattcataatcctatcaaagaagcattgttaattttttctatatatcttctttttccacgtgtatacttggaaattaaattttctaaaataattttcaggaaaaacaaattttaattaattgagcttctactaaataggactgaaaagcaaaacctggactagaattctctctcggtgtgtgtgtgtgtgtgtgtgtgtgtgtgtgtgtgtctgtgtgtacatgtgtatgtgctgtgtatacatgtgtatgtggtgtagcgttcccctgattcttaacttattaccagtggacaaccaccgtggaactagagtctagtcattcttaacctttttgggggaatcacagtctcttttttgaatctgatgaaaatcaaggaccgtttttacagaaacgttctcatctgtgcatacatgagacattttgcattgcatagaatttccgagggttcacagatactttgaagcccaaaagtgatccacagaccccagattgagaactcctccgctatgccatgcttaagcttatttctgtgtatcttctttctgaggagcaggcagatgggtcatctttacaatgtgaagttcttggcatttttattttgttttgtttttctgcactacgatggagcaagcaacactggaggcaactggctaaatgcaaactcatgaagcaagaccaaaatggctggatagatagatgctgtttggttttgacaacctagaaataaccttgaagaaatcctatggagaagtcttaaagaggaagattggattttgtagactcaaagaatgtgtcatggtttggcttaatctaagccatttttattcttcttttcttgtgtttgggtctattatctgtctgtagaatttatacagtgagactgctggggaaagtcttatgtctaattatttgctgtgctgtgtggagtgtactgcagacagtcaataaacaatcaatagtaattgtagcctgcctcagagacaggagttagaaacttcaactggcttaggtgcatggtatttttcattaattttcttctgctagtttttttctctaatttaaagcctaaatttaaagattaaatagaaaagctttctttgcttatgagcacaagtaggcactgtttttaaaagaaggaatatataatcccaggtgttttacctctgttaatgagaaagatgtctgtttgcttcagattgaatgagcaaagaagaggacaaggatatttgcatggttaaatgcctatgagcccttccttcagaaagtaatattcccctgatgtcaattacttttatacggacatctggatgtttatcatgagagtgtacagatgtcaactttttcagtattatagctggaaatgtggtgataacttgactttgatttgagtaaacataaaatatctaacatttaaagtcagaagttcacttcaggaaggggtttaaactgacatttattaaaaagaatggttccttggaaaaaacatcagaaccatccctaaagatacagtcactctgataaagtaaacagagtcccagttatgctctgtgtaacaaataacagaacttgaacatgacatttatctgttccttaaacttacagaagctggctctgaagatattgacatacttcccaatggtctggctttttttagtgtggtgagtgtcttcttccttccccaaattcagcagaggagatacaagggtatttgatgagggctgcagaacagtaagttgcttttaaaattcattttccaaaatgcattctgaagaaaagagaggtcaaacaagatcttggaaaacttcctccagcttttctaaatgtagagatgaagactctttgcccattgagatagtgttctttatttccccattgcattgcactaaaatattccaatgcaatctgtgttttgttttgttttttcttttttaattttttttattttttgagacggagtcttgttctggttgccccggctggagtgcagtggcatgatctcagcttactgcaacctccgcctcccgggttcaagcaattcttttgcctcagcctcccgagtagctgggattacaggcgcccgccaccatgcccggctaatttttgtatttttagtagagatggggtttcgccgtgttggccaggctggtctcaaacacctgacctcaggtgatcgcctgcctcagcctcccaaagtgctggcattacgggagtgagccaccacgcccagcgcaatctgtgttttaaatgtgcactattaagagggatatttgaggtcttactgtggatactcaatactaacattatactattttaaatacagcatctactcatctttctattactattcaacttgaagcaaatattcttgccattattatttattttcaaatattataccaaccttgcccttttgctttctttcttttttcccctgaatagccaatcataagtggaaagtcattgagtttatttacacccttcattttgccttgattcttgtaagctgaaaaacaatatcctttctgggtatacaatagaaagactttaaaaacaattggcttgtgaatattgttgtgaatattgttgaaactagcttgtaacaatgtccattctaattggaaatccagataaggggacagatgaggaggttctgaccacctacctccctggcttgggcagacataggagttcttggcatcttcataggtccagtttttctggaggaagaagtaaccaactctgacacctgactgtaattattccatttcctctcaacatccattattttcaggctctgagactcaagagggatgtgaaatactgggagatacttagaagggagtcaccacactaataaaatagttgttagacttatgagaaaggtgagagaactcaggttggagtagaatgagaattagaacactcttcaggttcctgatggtttttatgtgaaagacagtgagcagctggttattaccactgaggcaataaagagatactgtgggctttagcagaaacaccagtatatgtatttagtttttaaaataaggttttaaaaggaatgttttatttaattgcctacacagaatgaataaagtgatatttatagtaggactctgggtttgtttaggagcacatgcttgcacatgtgtggcttaggaaaaaccactgggaccactagtctaaaatattcataagtaaagatgcaaacattctgaataaagtagaaggcagttgcattgatttttttatttgtttatttgtgttttttgttgttgttttgcaaggatgtgttcttggagatttttataatctagaattcacctatttcaagatttctctccagcccccatagtaataaatctgaagtaggagggatgaggtctccaaacacataaatctacagccattttagcttgggggcatgttatagttacaaagatcttatagccatatcaatagaactttttctgctttttttctgttaccctcctttgctcatttgactttttttaaaatttagaaacattcccagtttgctgctgtttttcatttacttggcattgtctctaataaaacctagagtgtactctcttctaaataaagaggtcctacattgtggaggttgttcattcttcttcctagcattttagctcatctaacccaacctattttacagttatgggttgagggtcacctcaaaactaatgtcacacttcatgaagaattggatgacatagaataaaatataaaaaatgtaaacaatgtgagtgtgcttaacaccactgaactgtacacttaaaaatggtgaaagtgatgaatgttgtatgtattttatcataattaaaaataaatttttaaaaagagaaaaaatacttaaataaataaggagtgcgaacataaccatgactagttatcaccatctgatagtgcttcctttgcatgtaaatcatgcttttgttttggggacattcataaagaatagggattaactgaagtggcactgccatgtaacaatagcataattccagtttgttctacttaccaggcttgccctccatgaaaatatacaattgtagataatcttttttaattggagagatttcctcttatgtccaattttatacataaagtaagacttttttattgtgtgcctaaatttgtgtaaatatgactgcatcgtattagtaaactgaattaggtagtgcattcacataaaatttaacatcaccaagaaggctttaccttaagaatgtaatgatgaatcaccattttagatagactgataggtaatttattaactgatttaaaagagaaaagacctatatcatctcagtgagtaccaaaaagcatttaataaaattcaatactcattcctaaagttccaagcaaactagaaagataaggaaaattcccacaaaactacagcaaacatcattcttgatggtgaagcattggctgcatttgcattaatgctcagaacaggaagaaaatacccaacaccacaaccatcagtaatctactagagttcttagtaattcagtaaaacgagaaaaagaaatgtgagatagaaaagaaaaagacaaaactgtcattagagaagcagggactggctcaattgcccaggctgatgtgcagtagtgcaatcatagctcactgcagcctgaactcctaaactcctgcgctcaagaggtccttccacctcagccttccgagcagctaggactacaagtgctcaccataacactcagctaatttttttttttttttttttttttttttttgtagagacagagtcttgctatgttgcccaggctggtctcaaactgctggcctcaagcagtcctcccacgtcagcctcccaaagtgctggaattataggcatgagccaccaggcctgacctaaagctgtagtaatttaaaaagtgttatattggcacaggaatagacatgagacattaaaataacaaaacagagagtccctaaatagaccaatatgtaaatgtcagagatctagcacatgataaaggtgatattttgaatcagtgggagaaggatggactgtatgccaggcactgttccaggcactgggatctagcagtgaacaaatttccacagtcagtatgtagatgtcacttttctccaccctcagctctccctggaatcacctagtccaccaaccttctgattactctctgaagagaataaatccctgatcttcttttcagttattttcaggctttcagtattccacctccccgttattattttttctgttatcttttctctgttttttgagtttttgtggctttatgccactactttaaccacaatctctatttatccttcatgtacagttcccatgttagtccataaaaatacttaagcttttgtatttaacatttttcaccgttttggaaagggtctaaaattcccaggactccacagctttgcaccagataagcctggaggaatactaatgatggatctaaaagaagaaaaaccaagggcacgggaattaagaatcagtcgtgggtttgatttggcctcattcaatccacatggcatcagcactttcatagacaacggtaagagccaatgggctaccaacatttagtaacgtgtgatggttcacaaatgactgtgaaaaatagatttggatcatatttctaggaagagaagaacaattaactcatgagtgatttctgtattcttcattacaaagaacttgttcatttgcctcttcagctggcagtaagttatgctacattttgaaattcctaacaggtaacacctgaaagaatgtttagatttcataatcttttcatatacctacgatcatcacatttaaaaaagaactgtatttttgaattaaagtagaaacagattatgcatgaattctgtatatggagtaggaaacactttcttaaaggtcagggagccaatgatcagaaataacaccagacggacagcaataggaaagacagagaatgatctgttaggtcgtctaacagcttatacattcaacctttccttgcctgtggtatttaaatgtcagtgcctgcccagaggtcccgtagttatgtcttgtaaattaactctgttctttcaattctttagatgacacagtttatctctttgttgtaaaccacccagaattcaagaatacagtggaaatttttaaatttgaagaagcagaaaattctctgttgcatctgaaaacagtcaaacatgagcttcttccaaggtacttcctcattttgttccttctctaatttatccccagcatttgcaaacaatccctatggtgggttgtcctgtcatcttttataagcgctaatgtatatattagctaatatgtaagagctaaagagcttatatttccttatttataaatgtgtgtgtatagtttccttataaaccagggcaagcatggcatatgaaagttgatgtcactcatactattcactgttctatgcggactcctttgagaaatgatgaagtgcccgactacagggtgatactcttcaggcccatcttgagggtagaaggcaaaccctaacattttttcctgctgtcaccctccatcttagatgactcatcacccagatgagtgtcttgccaaggaagaatggcctgttttttattgggtttgtatgctttgcatgggactttataccaatcgctttcatagggttagtgatggttgcatgctagtaatcccacagaattagagccactcaagttgagagtgagtcattacacttcaagaacataaagctggttgaaaatgtggctaagagagaatcatgtgtacccccacccccagttcagtgtgtattagcctactgcttcttttagtttaaacttgatgaatatttttaatttctaatgaaatttcatttctaatgaaattaaaaatattgcctatctagggcctatctatgcctatctagggcataagcatgtaacttccaatcattccttccaaaaatgcacttgataaaaaaaaataggagcataaataccatccaagcattatggtgctctttcagaaaaatgagacctaccttccctgtagctctatatttttcatttagcaaagaataaagcagctctttcagaaatttttgcatagagtaattggaatttaaatttaataacaccctcacctaactggtcttaaaatgaaattgtttttagcatataaatctctcacctgaagcattgtactatggcaattttatcatccatctctctgcaagtgtttattgagtgcctgttcattctcggcatgtcagctttgtgaagcaggtagaaattgaacagtcaaccttagtttgactaataactaagccagggaaattagaaaaatccaggaactgagtaaatggaagctaggtaaatgttactgactgcctaaccagctcaccagccaatcaggctctctccagctctgtactgtggacagctctgtccttacgtataattgttaaaccctacatttcttgctgtcaaaaaacatgccctgatggcactaagttctttcttctcttatggtaatcctgccataattgctaaatgacctgtgttcagattacctggtaccatacaaaattgttctctggcaacaatattatagtatattgtatatgactatagtcgtgatttttagctcgtcttttcctcttaccaaaaatttaaagcacatgttgcataaatcttatgagtacttaatatttaatatggagaccaacaggccttttgtttcctctcacatgctatttttctttttcagtgtgaatgacatcacagctgttggaccggcacatttctatgccacaaatgaccactacttctctgatcctttcttaaagtatttagaaacatacttgaacttacactgggcaaatgttgtttactacagtccaaatgaagttaaagtggtagcagaaggatttgattcagcaaatgggatcaatatttcacctgatgataagtatggccccttatagaatatcttcatttttcttcagttgtggtgctggccaaattctttactttgctttctttgtcaatgtgaaaatagttttcttgacatttatggtatattatacatataatatatagatacactatatatataattatatatgttttgtatatatatttacatatacttagtcacatgtatttatatgcaaatacaataccatatttaagtaaactatataatacagtaatatatatgtatttatatataatatataaagtttggaatacatcattgtcaaatttaattttataaatataaattttaaagtgtgatcatactgatgcatacatattgaagtatcaggtatttccttttaaataaatgtattatttttattggctatacattattccattataaggatgatcttaaactaatttaaccaattctctattgatggatatgtgtataggggtggggagttctacataaaaaatattttatacttcttatttaccatggaattttaaacaagtattttttttaaagaaaaagtccctaggagagtgttttttttttgttttgttttttggagatggagtctcactccgtcgcccaggctggagtgcaatggcatgatctcagctcacctcaacctccgcctcctgggttcaagtgattctcctgcctcagcctcccaagtagctgggattataggcatgcgccaccatgcttggctaattttgtatttttagtagagatgaggtttctccatgttggtcaggctagtcttgaacctccaacctcaggtgatccgcccacctcagcctcccgaagtgctgggattacaggcatatgccaccacacctggctctaagagagtattataacataatggttaaacttgcagattttggactcatacaggcctgggttcaaatcccacccagggcactggctaaatggttctatgagctacttttctgtagaacagacccctagaaatagaactatttgctcaaacagtgtgattcttttaaatgttaactttaatagatattgccaaattgtcctccagaattatctcattatttttatatgcacaaccacaacctataagagaagatattaaattcttgatagctttcttatctactgcctcagcacactgaaaaatttaaactactacaaatacaacataaaataaatttggcactccttgacaactaaatgcccttatttttgtaatccaatttctcctcctttcttgttgactatagaaaaagaatgtagaatcatttaatttaaattgtctctaactgacctgatccaacctctgcagccaaatctgtttttcactcttatatttccattatgagagtcaaactttccaatcacccaagctaacaaaaaaataacaataatgaaaagggagaatcagcttttactcctctttcaccattcctatccagcctgtaggcaggtcctgttggttctacctgtgcctccttcctctacccccaaactcctttccctttgagtgagacctgcctaatttaggttgtcatcctctctgactagcatatgagactttcttccaatttgttttctgtctacttggatttttttcactcttgccaattttgtctgtctatctctattagccttgaagggctccccaaagagggaactctgtcttcctcacctttgactccttatgccagtacagtgccaggcacaaagcaaatgctcaggaattgtggaacagaactgaccatttgttgccactttattattctaagatttcagtggaatccaattgcttatcaaatcaaggcagggtaaagggttggactttgtttaacaggccacctccaacctcccttttctactatttccatgctttctatgctttagacaaagaactcattgttttaaacattccttcctcttcttgctcctgtgattctgctcttgtgcttgcttctgcctgggaagtgcctcctccgtcctcatctcaaatctcatctctctttacacagccactgcagatgccccttccttggtgagcctttctgtgtcctcggaagttagctatttctagacctgaactatttctcatgcttattaggtgtttaatgtgtacaaaccagtgagatttgttccaacacactataaactttcaaggagagaggctgtgtcttcttcatgtttatatctgctgcaacactgagttcatggcttttcacacataattgctcaacagagcaggtgccatggaaagtcaattcaatgagtaaaattacctcaaaatagtctgttaattcactcacctttgaagtagacagattattctgcattgatacttatctcttactcttaaaattcgctatgtattaataaatattttattgaatattaaggaatgatcactattttaataagatgttctttaccatatatttctatatgtacatgataattagaagtatcaaattatattgtggaatgtaaaagcttttcttctgaagccaagcatttgttttattgtcatttcagtggcaaatatggacttcatattcaaaatgatgttctatattatttttccttacaagctttttgaaaaacaatttaataattccatgattgttgtagcaccactgaattgattctgaaagcttactttttaaataaaaattgacctttatcaagcattccttgagggcccatgattgattaacttcttggcaggttattaagacttattctttcacactgtattaatgaagctttatattggcatggagctctaaccactgtgtcctttctgcaaaggtatatctatgttgctgacatattggctcatgaaattcatgttttggaaaaacacactaatatgaatttaactcagttgaaggtaaaatatttatttttacatatagacagtaatctattatgctttgcaatgacatagtttttctataagagtaccacacgtagaacaaaatatggatgccagtgtagctattctgggtttttaaatactccctacaactagagaaagctcctgtttccagcgatctcaagaactgaccatgattacatgcagcagcaggttgagagtgatattcatcagatttagggcccattccatgaagtattgatggcagtggaagaattccaataagaattttcacaattgaaaatactaatagatgaattctcaaatgaaggtttatgcacagtgtcagttctttcaataatacatgaaggtagaaattgggttccacaccattattattttcttcctactcaacaacacatattttaggttgattaagaatttcctatcttgctttgattgagttccttgagctaactgatcattgtgcatcttttaaaggaaaaggagttcagtttttaagatagatttttacagagaccgattatcaccctaactttcttaatttcagggaagaagaaaagtggctccaaaccagtttttaatacattccttttaagcaatattggtgttagaaggtggaagcagggcgatgtgtaatttcctcacatgcatagaggcaggaaggttacctctaaattatttaatcaagtttctcatgtcatttagattttgacaatttctcatttggaaggtacttgagctggatacactggtggataatttatctattgatccttcctcgggggacatctgggtaggctgtcatcctaatggccagaagctcttcgtgtatgacccgaacaatcctccctcgtcagaggtttttatattttcagttttttaaacttaattattcaagtccttttgaactaataatacaataaattgtcacagggatgatttgtttagttattttaaagcaataatataataagcttatgtcgtggttttgtaattgcgttaagccaataattggcagaatgttacattgttcaaatactttaagaaaggtaatcttttgatgtattaaattatggtggaaactagtcaaaaggcatttttataaagacatgtgcccttcttgggtggtatactggcaatttttaaaatatctgatttattgtcagctcaccacatgatgtgatatttgttcatgttgaagtagtgtgaaagtaggcacattagtatgaaagtatttctattaaagctgaattgctataataacactaaatcctgtgttggcatggaataactagatggttttaagaaagtactttctttgaagattggagaaagtactttaatttaaacattaaaaagattggtaactgctattttcaacagcatgtccccttaatcagtgtgtcattgtggaaaacagggcttattgatgattgagtgacatgcatgtacggtggtcttatattcatactttgtatcccctgaataggttctccgcatccagaacattctatctgagaagcctacagtgactacagtttatgccaacaatgggtctgttctccaaggaagttctgtagcctcagtgtatgatgggaagctgctcataggcactttataccacagagccttgtattgtgaactctaaattgtacttttggcatgaaagtgcgataacttaacaattaattttctatgaattgctaattctgagggaatttaaccagcaacattgacccagaaatgtatggcatgtgtagttaattttattccagtaaggaacggcccttttagttcttagagcacttttaacaaaaaaggaaaatgaacaggttctttaaaatgccaagcaagggacagaaaagaaagctgctttcgaataaagtgaatacattttgcacaaagtaagcctcacctttgccttccaactgccagaacatggattccactgaaatagagtgaattatatttccttaaaatgtgagtgacctcacttctggcactgtgactactatggctgtttagaactactgataacgtattttgatgttttgtacttacatctttgtttaccattaaaaagttggagttatattaaagactaactaaaa

SEQ ID NO: 15746 - DNA, 30433 bp, Homo sapiens
tgctttctatgtaagtttctcactggaatagcgagtgagaaatgtgtttgaagactagggaaacgagaaaggtatgcgggctgctagagggtttcgggtgggttgtttgaaaaaggaagtgaaggaattcaaagtttcacatcatgagcctaatgtaaggcgtgtccgggccgtcccgaaggtatctggggaaataggtttgtgaggacaaagaccagggccaggcccagggcggagcctccgcggccccgacgcagggactcggcctaggcggaggacggggcggagcgcggccggcaccatcgagccgggaagatggcaccgcccacggagctgctggccaggccggagcgaggcagcgcgcccggctcccgcgccatggggcggctggtggctgtgggcttgctggggatcgcgctggcgctcctgggcgagaggcttctggcactcaggtaggtgggactcccgcgcgcccctcctcggcggtccccaggctcggggtggccgcgtggtgcggggagggcgcaggctgggggagggattcctgcgggacctggccctgcggccgggggtggagaatttttgaatgctgtccctcccccagctagttgaacccccatcaccccgactctccgcttctagtgaaaaaactagcaaagtttggagtgaatcgcgacactttcttgaaagtttataagcccttgctgctaacaaagttctcttctgcttaggctgacaagagaatgctttgcaattacccaagggccaaactagtggtttaaattgaaaacaaaatgactactcatgcattgaaaccttaactatgaagatttatttcaggtcattggtgctgtttctccttgttgcccaaaccagacccgtctttaataaagttgttctccacccatttctgcatagtttgagaaactcttcagctgtagatcaaagacacttgaaatattcagctactgttcttacttcctatttattcaccagggaagcctgaagccagaatgccagacagcgcagacactattccatctcgcattttagttttaatgaaaatctctggtaggtagacatcatcgtttataaattaccaactcaacgtttgttttttgtttattttattttttgtagagatggggtcttgctgtattgcccaggctgttccctaactcttgcactcaagcaatcctccagcctaggcctccccacagtgctgggattacaggtgtgagctgttctgccctgcctcaaccaaaattttataggcctcatgcaaaagagttccagaaagactgagcacctgctatgtgtaatgttctctcttaggcttctatagtagagtacgacccttatggagtttgatacaggggaagagagaattaaaatacagtaaatgtataaattaggatgttctaaggacagacacaaatgaaccgcataggcttaaagaggaaagattccatcccctgagggtggagttctagagggaggaagagacattcgacctgaccttgaagggtgggtgcaacacatatgagcatgaaggggcccatgccaaatgtatagtgcagcaggagcaaaggggctaaggtgggaagttggaagactagcaaatgggccaatttgaagggagcataaagtcaggagatgagaatagtagggtggtgggaaggataggttttgaggccattaaatataagttgaaaaatggggccccactttcataggcccaatagtgcttcaaaagggaaatattggtgggttttgcttttcaacaagaacttaatataactagttgtgttttatagagataagcctggaaggggggattggaggagagcaatggttctctgtacattagaatctcctggagggctggtgtctgagtggcaccaccaaagattctgattcagctgttctggatcagaatctacagctcacacctgtaatcccagcactgttggaggcctaagccagaagattgcttgagcccaggagttagtgacaggcctgggcaacatagcaagatcccacctctacaaaatgaataaataaataaataaataaataaaaaacaaaatttgagttggtaatttataaactatggtgtctacctaccagagatttttcgttataattaaaatgtgatatggaataatgtattgtttggcaagctggcttcagggttcccaggtaaatagataaataaggaagtgcataatgtaagaacagtggctgacagtagcagtggcattttttatttttaaaaacattcctgataattctaatgagcagtcaaggtcgagaactactagaatagagagcagacatggggtaactggttaaggtattgcagtaggtcagagaggataacagggacccaaactctggaaccccagggatgagggagaagtcaaaggtgctaccagagtttgtgccacagctccactgtcccatggttgtagtttcatctactgataaagcagtgcaaagaggaagcgtgtggtggctgagatgggagtgagatttgaggaaagaacgcttatgggtaggaaatggacatgttgaccttaattttcatgttaggtaatgcccattgtgctctacagaacattcatgagttggatgactttgtatatgatctgtcctgctctccatttcaaaggcaagaccaccaaaattcacaagcttattatgttgtcactaatgtgtaagccaccagtttttctgcaagttggaagttttctcaacagtcaaatattcccccttctcactaatcttaaggttttaaagttatagctgcaaatctaaaaaaaaaagaaaaagtaaataaaacttattgacagaatgcctgatagtttatttacaggtttttgtttgtttgttttttgtttttctttgttttttattttgacacaaggtcttgctctgccgcccaagccagagtacagtggtacatcaaagctcactgcaatctcaaacacctaggcacaagcagtcctccctcctcagcctcctgagtagctgggactacagatgcatgctaccatgcccagctagtatttttatttcttgcagagacagggtctcactttgttgcccaggctaatctcaaactcccagcctcaagtgatgctcctgcctcagcctcccaaagtggtaggattatacacatgagccaccaccctcggcctactttacaatttgatgcaccttttctttacgtgactgtgatgcactttaatgggcagtgactttataaaatggtaactttattggatatgtggagccccaaatgggctgacgtgagaatgttggggtaggtggtgggtggctggatttagcaaagaaaaatgtaggctacccagttaactttgaatttcacatggatttttttttttttttttagtataagcatgaaatacttataccatacttttagcattaagcgtggaatttgggacataattatactaaaatatcattcattgtttatctcaaattaaaatatcactgggtaccctgtattttatcatatgttcgagtgccttctgtcagaatttggtgaccctttgagtctgttttaaaaaggagcatgtttggccggacacagtggctcacgtctgtaatcccagcactttgggaggctgaggcgggcagatcactagaggtcaggggttcaagaccagcctggccaacatggtgaaaccccgtctctaataaaaatacaaaaattagccaggtgtggtggtgcatccctgtaatcccagctacttgggaggctgagtcaggagaattgcttgaaccccagaggtagaggttgcagtgagccaagattgagccactggactccagcctggacaacagagaaagactccctcaaaaaaaaaagaaaaaaagcatgttcccacctccccataaggaaaggctcttcagaggaagttgaaggaacagaggctttatgtttgatttttgctttaatctgatgcctactgtttgattattcaatatttagagatggtactttggcaatcaagttatttctctccccaggttgcccacttcaatttttagtataaggatgtcccagagggataaatgccatcaaagttgtctttcttcttctgaactgtaactgggattccacaccctccttttccacccctccctagttgagcaataaaggggaaaataacagtatacaaatattcccaggccagttcctggtgtcaaggtacacagccatggatgaatcatgaggcttgagtgcatcagagacctaagcgtgggcaggaacccccagagtacccatgtgaatgttctgcttgctgcctcgcaccttttatgacaattcccacaagaagctatgtggtctgtttctacttctgaaagagcagcctttttcccttttttttttttttaaaccaccatcctttaaatcatttattatgtaactcttgtgtgctggtcagtcagtgtgtcaaaagtgtaaaaacttctttatttatttttttaatctatcttttaaaaaatattttctttctttttttcttttttcttcaaggcaggttcttgctctgtcacccaggctggagtgcagcagcacaatcatagctcattgtaacccagaacacctgggctcaagcaatcctcccacctcagcctcctaagcagtgaggactataggcatgcaccactacacctggctaattaaaaaaacatggccgggcacggtggctcattactataatcccagcactttgggaggctgaggcgggtggatacctgaggtcgggagttcaagaccagcctgaccaacatggtgaaaccccatctctactaaaaatacaaaattagccaggcacggtggcacatgcctgtaatcccagctactcaggaggctgaggcaggagaatcacttgaacccgggaggcggaggttgcagtgagccattgcactccagcctggcaacagagcgagactctgtctcaaaaaaaaaaaaacaaaaaaatttttttgtagagatgggggtcttgctgtgttgcccaggctgatctcaaacttctagccataagtgatcctaccgcatcaacttcccaaagcactgggattatgggtatgagctactgagccctgccaaatttctttatattaaaccaaaacgtacatttactgatatttggaaagaaagctcttttacttttatgccttcatccagtcttcatagatatcttcccttttacattataactgtaaatactgaggttagagaggttaactagttagttcaacagaataatataaatattgaataatataattaatgaataattagtgctgaacctgtcgcctcagccaggtctcctgattccaaatacagtttgccccagctccccacagtcttctagcttctctgccagtggagcaaattttccctaggtttacaggcctaagcacagattcttagttacttagtgcaagtattgccagagcccaaggggtgaattccaaagggtttttacaaggctatacataaaagataaagccctggcttgtatatcacttgcacataggagataaagccccagcagttgtatgtaaatttcaaaagcagagaagtatggcacaaagaaactcctgatagtaacactgtgttcccactttgcttaggggcatattggcaccgtagcatggtacacccttactgctacctgccatgaggccagataatagctagcagcccctggtctcattctactctggatgggtactgctgtttcctgaatgaaagacactgagattgatttcatgctaatgactgttggttaagagttcatgctttctattcacaatagcaaagacttggaaccaacccaaatgtccgtcaatgatagactggattaagaaaacgtggcacatatacaccatggaatactatgcagccataaaaaaggatgagttcatgtcctttgtagggacatggatgaagctggaaaccgtcattcttagcaaactattggaaggacagaaaaccaaacaccacatgttctcacttataggtgggaattgaacaatgagaacacttggatacaggaaggggaacatcacacaccggggcctcttgtggggtagggggaggggggagggatagcattaggagatatacctaatgtaaatgacgagttaatgggtgcagcagaccaacatggcacatgtatacatatgtaacaaacctgcacgttgtgcacatgtaccctagaacttaaagtataaaaaaaaaaaaaagttcatgctttgtggacaggtagcctgagttcattcatagctctactatttacctgaaaccttggactaattatttcacttttctgtgccccagtgttgtaatctgtaggatggggtactgcctgctccacagtgggactatgagaatgcttaaaataatgccaagcgcacagtcagctcaataaatgtcatctatgtagacaatgaaattcaagcataattccttaaacctttgtgccatacatccctttggcagtctggtaaagccttcattccttctcagcatcatgtttttaaatgagtaaaataaaatatataggattacacaggaaaccaattaaatactgctaccaagctatttaaaaatctatgatataatatgctttttaaattaaacccttaaatggatctagaggtaggtaaatgtctaacagcagatattttgaagttgcaatgaatgtaaatggcactttgagctatctacaactgaaatgcgatagaaaagtatctataatttctattagtgacagtcacaaatactactaatagtattgtggtttgttgcttatactcatcatcaaaggaaatactcaatttgagttaaaggtttaaataaagatgtatttttcccccatccaagttcatggatccctgaattctacccatggattccttggtcactggactccataggggtcacttggggaatgattgtgacaccaatgaaggaagccagcggatactgtttgctgtattatacctaccataggctcgtgatgaggaaataataaaataaataactgtaatgaaaaagaaaagaaaggaaaacaaaaggaacctaaaacagagaaggcaaatagctttccttttgagtgtcaattttaacagactccctgtggttgcgaaacaatgtgtctgaggctggctctgggttagagggagagtgctgttattgattagcaattcctgcatgacagcagagtggcaacagccatgcatctctgacctggcacagtcataagcatgttatagacataaagtgttagggaacaaataggctctagcaaaagtaaagagtgttcctcctctcatatcatcacttatatgtgtttataccatttatgttgtattttttacatgaatacttttagatttattaatctaatccaaaaaggtttgtatagctttctctatattaagagaaatatatgtatttcttaaatacacaaagttcttaaatctgatgccagcgaggattgcttccagccacaagtaacatatatcagattaatagtagttcattcaaagagggatttattttcctcacatgaaaaacagctctgtgggtgacccaatatagagcttgttcattgagccagtgattatatcaaggaactgggttcttcatatattttcattctttgatctccccctattgactttatagctgtatctttctcaaggatgcagaatggctgccgcagtctcaaacactgcgtgtgtgttcaaatcatgaagaaaggagattgagtgatgccagctagctctcttctcgtgactctcctttgtatctagaacacagtgtctttccccaaaacctgggtcatatgactacacctcaatacagcggagtctgggaaagcaaatatttgctttgcccaccactacaatagaaacgacaagggagaaagaaagggggttgggcatggcgttaattttgtcagccgctagggtctgccacccagaaaacagaagtccactaacaagcagggaactgattgttctgccagggaaaaagtctggcagtttcctactgaagaaatttggaagtcttgatggtccaggaaggataaaggcaaaaccttcattttcttttatcaaaaaggaaagccaagaaaaaaattagttaagtagaagttatgcacaaccctcatgtaactcttccatgttaatagcaggtaggctgcatatgaaaacatgatattatacaagaaaactagttgatgaagattgccctatttagcaccaattacttacgcaaacctaagttgactctgaaacaggaaccccatattaaacttttcaaacacatcagaatatgttactttgaacagattttatttaatccaaagagattatctttgaaaaaggtagatggtaaacatcgttatccctatttttgtatagtcaaataggcatagtagtaagttgtgtaaaattgacatccaaaccaatgcatgatactaaaacttggtgtacaaacagcagttacatcctattgctttgtatctacatctgtttctggagtcatataacatttgtagaatcttggaggtgttttaggctcatccttattttatccataaagaagactgacacctatagagattaactgacctgccaagggtcatggcagtttcactgctgagacaagaacacagatccctttacttctttctgagaaaagtacaaagtagtttaaagcaaaagcttccctgcttccagcacttctggctaagttgcgccgtgggaaaattgttttgtctgattcagttttctcatcttttaaactggaataatgctacctaatttacagggttgtttgaagaattaaatgaatgcatggaggtaaatcacttagaacagcggtaaattatacttttttattatttatttcctttgaccacccacaattatcatcagtgtcatcctcatcatcacaattaagattactaccacattaggctacataaactttttttttctctctctgttttataatttcaattttattttagattcaaggggtacatgtgcaggttttacatgggtatattgtctgatgctgaggtttggggaacaactgatgccatcacccaggtagtgagtatagtaccctatagtttttcagcccttgtctactcccttcccttccccttctagtagtccccagtgtctaccatcgtcatctttatgtccatgtgcaccattgtttagctcccagttaaagtgagaacatgcagtatttggttttctagcttatttttcctctcttaaatcacttctgtgacacgtaggccatgagatttattgtattttttaatgccttatttaaaaatttgtattatttaatacatttaatgcattattttttattatatttaaatattgatttatttgtactttttgccttattgctatattgtttcaaaaaatttaacattatttgagttacatgatttcaaatacatactgattaacattttaattagaaactttatgtctgatatgaattgccaaaatgtgtagttggtacaacctatgagtcattctgggttatctagaagaaactggtagcctgccccatactccagaagccttccccagtgtctagacctcagaagctgtcaggaatatgcacaggagaaggacacatggcaaatagctatttcgtctcttaaatgtatggtatgtgggaaccactgaaaaatgtaaagtttctacaaggtgctatttttattatttatggctctagagaacagagaaggtgaaaaatgtgagagagaagggaaagccaatagtatgtggccttcaaaacaaaagatcccacagatattgtcccaaactgcttcctggccctctagagtggagagggagggggaagacatcctattagagttcaacattctcttattatttccttcttttaattttctgggtatacaacagcaaatagttttgctgaagtagttacagaactagttggtgttctccaaccttcctattccaatacatactgtcatggatgggtacactaaaatctcagaattcactgctatatcactcatccatgtaaccaaaaaccacatgtacccccaaaagctattgaaataagataaatacattcttatttaaaaaaatactgtcatagggatgctaccttcttttcttttttgttagtaactatttgtgggatgtctttggtgtgtcaggctctgagcaatgccattttctcttggcttctttgcagtctctgtgtgaggcttacagtcatttttcacgtttgactcttcagaaggaagacagggctactggttctacatctggaactcttttcccacaacaccaacactgagaaatgtgacatggtgctgtgtttacatttgcataggaacttgcattataagttttatttgttgagttattggctttttttttttaataacccacatcagtatatagaactttgcaataggcatttttgttttaacttcatttctggtgcagttttattttcctacccttgtctttctattttctctttcatctgctttagacttaaactgtgttttatgtattgctgtaagcctctttaaaccctttctaaaacaaagcagggaatacataaacaaatagttttttgttttttgtttttttttctttgtaacagaaatcgacttaaagcctccagagaagtagaatctgtagaccttccacactgccacctgattaaaggaattggtatgtatatgaaaatgcttgttgggcacattgcattttttggccattaacattaaaacactcattaatggcattttagcatgaaattactgcttttcagtggataaatcacattagatcaacaaaaacctctttggtcaacctcttgatctgatgaaccctgtatttattcttctttcctaccctcactgtaaattattcttttttgtgtgtaattctatgtttagcatttgatttcttgcttgttttgtgacttctctgaactatttttgttgcgtctgtattgtttgtcaggtatggccgctgcagtctgtgttctgtgagccttgtggtcagctagtgaaggaagctttatgtaggcagtgacagcatttaccctgctcactactctataactaggatctgatcttatggctaacacgtaactgaccaatatggtttggttgtgtccccacccgaatctcatcttgaattgtagttcccataatccccacgtgttgtgggagggacccagtgagaggtcattgaatcatgaggtggttaccctgtgctgctgttctcgtgatagtgagtgagttctcatgagatctgatggttttataagggcttttcccccttttgctcggcacttctccttgctgccgccatgtgaagaagggtgtgttttcttccccttccaccaagattgtaagtttcctgaagcctccccaaccacacggaacagtgagtcaattaaacctctttcctttataaattacccggtctcaggtatgtctttattagcagcctgagaacggactgatgtaccggcacttcacaatatgtattgtaaaaacttgtttttattttatcttctaagctatgactgcagagggggagtctccctcttcccttgactttatgtaggatgtattgtggagtctgagtctttgagtaggggttcctaagagcaagccccaattttgctatagataaggagggatctgtccagattcttctccagcactgagggtctctctggtgtgtttgcagtttttctccaaggtagagtctgtgtcttgctgtcttttaccctttatcatctactaagtacatgtccctagtacataatagactagtagttagattatcaatgaacaataaatattggctttccttttttttaaattttaattttttttttttttttttttgagaggtggcctcactttgtcacccaggccagaatgcagtagcgcaatcttggctcactgcagccctgatatcctgggctcaagcgatcctcccgcctcgtcctcccaggtagctgagactacaggcacatgcccccactcatggctagttttttatttttgtagagacagggtcttgttatgttgtccaggctggtcttgaactcctggcctcaagcaatcctcccagcttggtctcccaaagtgctgggattgcaggcatgaggcactgagcccagccaatattggctttccttagatatggttcatggtatgattagaaacaaaaagaattagcagtcaaaacacctagtttctagttctattctgccacaatgtaaccttaggcaaagttggtttttgtatttgtcacctataatgatgagtttgtgattagactaatggtttttagactttaaaaagcctgggaccatttatttataatcttactctgagagccacagtgtggaaataactagactgtcattgagtcacttctagtcctttacaacaacatccttctctagaggtaggagagacaatttaatattttgttttactctttagaaattaaaactcgggttacatggaaatgttctcttctctgaataggtaacattgttaaacaagttttgagtgtccttccatctttttctttttatgaatactcctgtacataatttttaaaaacataagtgaggtcaaattatgcataatatttcaaaactagctttttgtacttaatactaggttttggaaacttatgtttgtacataatgttaccttttcttcacaactgcacagtattttttgtgcaaagttcatataaacagtgtatgtgcaaacaatatagaaagatataaaatggaaagtaaataaaaataaaaatctctcatcaaactcttcatcacccccaacagaaataaccccaaagataaagctcccttttttatctttcctgatagtttcagtgcatttgcaaacaaatatattgactctttttttcacaaatagaattttagtgtaaatatttcacaaccttcttcattcctaaaacagtgtgagcagctttccacatcagcatatatagttactttgttctttttaatattttcacattccatgatttatttaaccattccccttttaatgtacatttgggttgttacagttttttgcaactatgaacaaatcagtgaacatcattgctgttgagtttgtgtgtctgtagaatatgtccttaacaatgggattgttgttcccttagaatatgtgtttagagttttgacagtcattgctaagttgctctcaatttggcaacagtaataaactcagtacctcatagttgtaaccacattcactccagacagagttctcagcactcttttagtaaaaataaaccatcagttgacagtgccaccttcagagtttctctacaaataccttgcttgcctccctttctttttttcttcttttaaatcagcttcctcaggttgatctgcctctcattccttaggcatctgtttcctatgtgttctttctcctttttttcattgatacttttgtatttccccagttctacctcccctcccctagactggttggctgtcctggaatttcccttccttctttcaattgcccaaacactaagtgggaggaggcaaactcatatcaaatagcagattgactacatctgtgctggatcatgcagacagttcaagagtcccaagtaacttagcagcttcatcttgccttccagctgcaatcaagaagagccctctcagaactggtcactcagcaaaagccagatggcattagtaaaagatgttgggcaagggtgggagtttgggccagtgatctcttaggttacttttgctgctgagttaataattgtcacattattaaacagcccttggccctgggaagcccaccttctgtgaatacaagtctcagagtagacaatagggcacaaccagccatgttacatgacagactgccaagtgcattcctcttacaactcactgggatggagcgctcctcagagaaaaacaagcccagcaacatttgtattctgaacaggcatctgtctatgtttgtgacctttatgttgtgatgtgtgtgagctgctgtctggaattggaaagaatgaggaaatatgtcacctatggcccctcttgtgaagtgttaaatgcctctgaggcacttcaaaaggcaacagagcggagaggatgagtgattagaagcacatttgggatacatttttagatctaattagaattgtccttttttttttcttttttgcttttgccctgtggttagcacacaccatatgaacgtttgtcgaatgctatgttagtgatgcataatggttaataataacttttggttatatatctttaacaacagttgcttattcacaggtctttgataagaagaaataacaatgtgctggacacacatttctatacaggcaaaagtgactttttatgatagagagggctgtttcttattttctgttttgaaaacagtagtagctatgcacttgaggccaactaatccctctaagaggtgaaccttccttcccccttgcccttgattcccatcaacacacacatacatatgcacacactaccgtgcttcagtcaccatcactggaagtgaactatgtgcaacttttgggtgctttatatatatcatatcatattgtgtctgctttaataaatcatagttattgactacatatcatacaggatgtgtgccttctgtgggtcagaaaataagttcactatttagtccttttcaaaaattccttcccgatctatcttatagacagaaactaagcttttatacacccaagatttggcagattaacatctgcatattaaaatgtcaagagctagttaactttatttgaggcttaaaagttaaaaaatctgattttctaaatgtctggccttcaaaatttgagtggactgtctttctcaagataactaacaattttatgcacttggcagtcaagacctttacaataactgctgcttgggagattgaggggaaaaaagcattaaagtttgtggcccttataatcaagtactttacagtctactgatgggagaaaaggaaaacaaaacaaaacaaaaaaccactgtgagatatagatatgtcttttctttctctagcagataagtacctgaggctcaaggaggttaagcaacttttgcaaattcactttccaatatagtgtcttttcccagggtgactaatgtatatacttgatgagtgaaccagaaaagtaggaaataatatgttacatatgggatgctctattgggtatagtaaaggatgcgttgctgttataaaattatagtcacttagaaaagagatgtttatttttatttttctctcatcagtcttaaggtaagtgaatggcctagggtagttaggtgactgtgttccatatggtcattcaggggcaaatgctgatgaagcaacacagctgtcttcatctaagactagaactctgcttgttgccatttcccagcaggaaggggttgaaagaaaatttatgtagatttttttttctacccagtagttgcatatatattgtattctcacatcctattgacccaaacttagacatatggccacatctgtcagccagaaagggtgggcaatgttatctatagctgtgttgctacgtgcctattgctaaaaaggctaaaaaggaagaaggggaacatggatgctggtgaacacttggccacctctgacacagataattgctaaagtaataagaagagatggaaattaaatgtgctaagctaggagactttctaaagaaagggtttgtcatgctacgctgtgccattcatgtgtttttttgctcatgctgttccttgtgcctggaaattctccccctaattcccctgagcagtggatgcagtggataccctccccagatcccccccaacttccctgagtgttggctaccaaaagctctgagtgcacccagggagctaagtcctcctgcccacaggcaataatggactgacacggggtagacttaaagaaataagaggcacatcaatcaattgaaatgtgtgggaccttacctggactctgaattaaacaaactgtaattttttaaagctacaccttttaaacatgattggctatttgaacactaactagatatttgatgatattgaggaattattgtgaatttttagtgtagtaatgatattgtggtttgtataaatatatttagggataatatgatgcctcagatttgctttaaaataacacaggatgaggataagtggtaggactgcaagggaaacaagactggccatgagctgataactgttgaaggtgggtactgggtatataagggctcaccacaccattctcttgatttgtgtctatttcccataataaaaagtttaaagagagagaaccgatgaaggggagggagagagtcaagcacacaataagagtgacaaacagtgccaaatcagcccacagtattaagttttcacatatttacataaatatcacctggaatgcaatattgaaattaatgtatatcactagaataaaaaaagtaaagatttaataaatttgttttgaaataaaataagttgaaatacgaaaaagacagaaaaggttttgaaagaggttttaaagaaaagtgcaggatattcattggtaaagatgttggtgagaggcttggaagcaaaacttcaggggaaaaagacaacatatggaattgaccacaattgaatttacaagtgaagtggctttacagaggaatcaggggatgtttctgagagaggaaattcattaaattctaacttgaatattttctgtttgcctttaagtcagagcaaaggctttgagtcccagcttcccagtttgtgaccttgagcaattgcttaacttttccaaagcctccaatagtcttcactctaaaataaaagataatcatatgagatattgtatgcagggtatttacaaggagcctggtacttggtgtacctaatgtatgttagttattattattaaattagaggagcaaaaatttctctagcattgactgctcctgacataatcacaccgaagaggggatacacgatgataaaaccttcctgcagtagtggctatagaaatgatgacggggagaagatctggaaaatattccaaagaaggctacagatagatacattttttccattggaattaggcaatggagttaaacagaagttacaatatggttgaaataaatgtatttttttaaaaaaagatttctctttccttaattattaaaaaatatacaattttgtagaaaattttaaacaaagtataaagaaaaaaataaaaatcattcataatcctatcaaagaagcattgttaattttttctatatatcttctttttccacgtgtatacttggaaattaaattttctaaaataattttcaggaaaaacaaattttaattaattgagcttctactaaataggactgaaaagcaaaacctggactagaattctctctcggtgtgtgtgtgtgtgtgtgtgtgtgtgtgtgtgtgtctgtgtgtacatgtgtatgtgctgtgtatacatgtgtatgtggtgtagcgttcccctgattcttaacttattaccagtggacaaccaccgtggaactagagtctagtcattcttaacctttttgggggaatcacagtctcttttttgaatctgatgaaaatcaaggaccgtttttacagaaacgttctcatctgtgcatacatgagacattttgcattgcatagaatttccgagggttcacagatactttgaagcccaaaagtgatccacagaccccagattgagaactcctccgctatgccatgcttaagcttatttctgtgtatcttctttctgaggagcaggcagatgggtcatctttacaatgtgaagttcttggcatttttattttgttttgtttttctgcactacgatggagcaagcaacactggaggcaactggctaaatgcaaactcatgaagcaagaccaaaatggctggatagatagatgctgtttggttttgacaacctagaaataaccttgaagaaatcctatggagaagtcttaaagaggaagattggattttgtagactcaaagaatgtgtcatggtttggcttaatctaagccatttttattcttcttttcttgtgtttgggtctattatctgtctgtagaatttatacagtgagactgctggggaaagtcttatgtctaattatttgctgtgctgtgtggagtgtactgcagacagtcaataaacaatcaatagtaattgtagcctgcctcagagacaggagttagaaacttcaactggcttaggtgcatggtatttttcattaattttcttctgctagtttttttctctaatttaaagcctaaatttaaagattaaatagaaaagctttctttgcttatgagcacaagtaggcactgtttttaaaagaaggaatatataatcccaggtgttttacctctgttaatgagaaagatgtctgtttgcttcagattgaatgagcaaagaagaggacaaggatatttgcatggttaaatgcctatgagcccttccttcagaaagtaatattcccctgatgtcaattacttttatacggacatctggatgtttatcatgagagtgtacagatgtcaactttttcagtattatagctggaaatgtggtgataacttgactttgatttgagtaaacataaaatatctaacatttaaagtcagaagttcacttcaggaaggggtttaaactgacatttattaaaaagaatggttccttggaaaaaacatcagaaccatccctaaagatacagtcactctgataaagtaaacagagtcccagttatgctctgtgtaacaaataacagaacttgaacatgacatttatctgttccttaaacttacagaagctggctctgaagatattgacatacttcccaatggtctggctttttttagtgtggtgagtgtcttcttccttccccaaattcagcagaggagatacaagggtatttgatgagggctgcagaacagtaagttgcttttaaaattcattttccaaaatgcattctgaagaaaagagaggtcaaacaagatcttggaaaacttcctccagcttttctaaatgtagagatgaagactctttgcccattgagatagtgttctttatttccccattgcattgcactaaaatattccaatgcaatctgtgttttgttttgttttttcttttttaattttttttattttttgagacggagtcttgttctggttgccccggctggagtgcagtggcatgatctcagcttactgcaacctccgcctcccgggttcaagcaattcttttgcctcagcctcccgagtagctgggattacaggcgcccgccaccatgcccggctaatttttgtatttttagtagagatggggtttcgccgtgttggccaggctggtctcaaacacctgacctcaggtgatcgcctgcctcagcctcccaaagtgctggcattacgggagtgagccaccacgcccagcgcaatctgtgttttaaatgtgcactattaagagggatatttgaggtcttactgtggatactcaatactaacattatactattttaaatacagcatctactcatctttctattactattcaacttgaagcaaatattcttgccattattatttattttcaaatattataccaaccttgcccttttgctttctttcttttttcccctgaatagccaatcataagtggaaagtcattgagtttatttacacccttcattttgccttgattcttgtaagctgaaaaacaatatcctttctgggtatacaatagaaagactttaaaaacaattggcttgtgaatattgttgtgaatattgttgaaactagcttgtaacaatgtccattctaattggaaatccagataaggggacagatgaggaggttctgaccacctacctccctggcttgggcagacataggagttcttggcatcttcataggtccagtttttctggaggaagaagtaaccaactctgacacctgactgtaattattccatttcctctcaacatccattattttcaggctctgagactcaagagggatgtgaaatactgggagatacttagaagggagtcaccacactaataaaatagttgttagacttatgagaaaggtgagagaactcaggttggagtagaatgagaattagaacactcttcaggttcctgatggtttttatgtgaaagacagtgagcagctggttattaccactgaggcaataaagagatactgtgggctttagcagaaacaccagtatatgtatttagtttttaaaataaggttttaaaaggaatgttttatttaattgcctacacagaatgaataaagtgatatttatagtaggactctgggtttgtttaggagcacatgcttgcacatgtgtggcttaggaaaaaccactgggaccactagtctaaaatattcataagtaaagatgcaaacattctgaataaagtagaaggcagttgcattgatttttttatttgtttatttgtgttttttgttgttgttttgcaaggatgtgttcttggagatttttataatctagaattcacctatttcaagatttctctccagcccccatagtaataaatctgaagtaggagggatgaggtctccaaacacataaatctacagccattttagcttgggggcatgttatagttacaaagatcttatagccatatcaatagaactttttctgctttttttctgttaccctcctttgctcatttgactttttttaaaatttagaaacattcccagtttgctgctgtttttcatttacttggcattgtctctaataaaacctagagtgtactctcttctaaataaagaggtcctacattgtggaggttgttcattcttcttcctagcattttagctcatctaacccaacctattttacagttatgggttgagggtcacctcaaaactaatgtcacacttcatgaagaattggatgacatagaataaaatataaaaaatgtaaacaatgtgagtgtgcttaacaccactgaactgtacacttaaaaatggtgaaagtgatgaatgttgtatgtattttatcataattaaaaataaatttttaaaaagagaaaaaatacttaaataaataaggagtgcgaacataaccatgactagttatcaccatctgatagtgcttcctttgcatgtaaatcatgcttttgttttggggacattcataaagaatagggattaactgaagtggcactgccatgtaacaatagcataattccagtttgttctacttaccaggcttgccctccatgaaaatatacaattgtagataatcttttttaattggagagatttcctcttatgtccaattttatacataaagtaagacttttttattgtgtgcctaaatttgtgtaaatatgactgcatcgtattagtaaactgaattaggtagtgcattcacataaaatttaacatcaccaagaaggctttaccttaagaatgtaatgatgaatcaccattttagatagactgataggtaatttattaactgatttaaaagagaaaagacctatatcatctcagtgagtaccaaaaagcatttaataaaattcaatactcattcctaaagttccaagcaaactagaaagataaggaaaattcccacaaaactacagcaaacatcattcttgatggtgaagcattggctgcatttgcattaatgctcagaacaggaagaaaatacccaacaccacaaccatcagtaatctactagagttcttagtaattcagtaaaacgagaaaaagaaatgtgagatagaaaagaaaaagacaaaactgtcattagagaagcagggactggctcaattgcccaggctgatgtgcagtagtgcaatcatagctcactgcagcctgaactcctaaactcctgcgctcaagaggtccttccacctcagccttccgagcagctaggactacaagtgctcaccataacactcagctaatttttttttttttttttttttttttttttgtagagacagagtcttgctatgttgcccaggctggtctcaaactgctggcctcaagcagtcctcccacgtcagcctcccaaagtgctggaattataggcatgagccaccaggcctgacctaaagctgtagtaatttaaaaagtgttatattggcacaggaatagacatgagacattaaaataacaaaacagagagtccctaaatagaccaatatgtaaatgtcagagatctagcacatgataaaggtgatattttgaatcagtgggagaaggatggactgtatgccaggcactgttccaggcactgggatctagcagtgaacaaatttccacagtcagtatgtagatgtcacttttctccaccctcagctctccctggaatcacctagtccaccaaccttctgattactctctgaagagaataaatccctgatcttcttttcagttattttcaggctttcagtattccacctccccgttattattttttctgttatcttttctctgttttttgagtttttgtggctttatgccactactttaaccacaatctctatttatccttcatgtacagttcccatgttagtccataaaaatacttaagcttttgtatttaacatttttcaccgttttggaaagggtctaaaattcccaggactccacagctttgcaccagataagcctggaggaatactaatgatggatctaaaagaagaaaaaccaagggcacgggaattaagaatcagtcgtgggtttgatttggcctcattcaatccacatggcatcagcactttcatagacaacggtaagagccaatgggctaccaacatttagtaacgtgtgatggttcacaaatgactgtgaaaaatagatttggatcatatttctaggaagagaagaacaattaactcatgagtgatttctgtattcttcattacaaagaacttgttcatttgcctcttcagctggcagtaagttatgctacattttgaaattcctaacaggtaacacctgaaagaatgtttagatttcataatcttttcatatacctacgatcatcacatttaaaaaagaactgtatttttgaattaaagtagaaacagattatgcatgaattctgtatatggagtaggaaacactttcttaaaggtcagggagccaatgatcagaaataacaccagacggacagcaataggaaagacagagaatgatctgttaggtcgtctaacagcttatacattcaacctttccttgcctgtggtatttaaatgtcagtgcctgcccagaggtcccgtagttatgtcttgtaaattaactctgttctttcaattctttagatgacacagtttatctctttgttgtaaaccacccagaattcaagaatacagtggaaatttttaaatttgaagaagcagaaaattctctgttgcatctgaaaacagtcaaacatgagcttcttccaaggtacttcctcattttgttccttctctaatttatccccagcatttgcaaacaatccctatggtgggttgtcctgtcatcttttataagcgctaatgtatatattagctaatatgtaagagctaaagagcttatatttccttatttataaatgtgtgtgtatagtttccttataaaccagggcaagcatggcatatgaaagttgatgtcactcatactattcactgttctatgcggactcctttgagaaatgatgaagtgcccgactacagggtgatactcttcaggcccatcttgagggtagaaggcaaaccctaacattttttcctgctgtcaccctccatcttagatgactcatcacccagatgagtgtcttgccaaggaagaatggcctgttttttattgggtttgtatgctttgcatgggactttataccaatcgctttcatagggttagtgatggttgcatgctagtaatcccacagaattagagccactcaagttgagagtgagtcattacacttcaagaacataaagctggttgaaaatgtggctaagagagaatcatgtgtacccccacccccagttcagtgtgtattagcctactgcttcttttagtttaaacttgatgaatatttttaatttctaatgaaatttcatttctaatgaaattaaaaatattgcctatctagggcctatctatgcctatctagggcataagcatgtaacttccaatcattccttccaaaaatgcacttgataaaaaaaaataggagcataaataccatccaagcattatggtgctctttcagaaaaatgagacctaccttccctgtagctctatatttttcatttagcaaagaataaagcagctctttcagaaatttttgcatagagtaattggaatttaaatttaataacaccctcacctaactggtcttaaaatgaaattgtttttagcatataaatctctcacctgaagcattgtactatggcaattttatcatccatctctctgcaagtgtttattgagtgcctgttcattctcggcatgtcagctttgtgaagcaggtagaaattgaacagtcaaccttagtttgactaataactaagccagggaaattagaaaaatccaggaactgagtaaatggaagctaggtaaatgttactgactgcctaaccagctcaccagccaatcaggctctctccagctctgtactgtggacagctctgtccttacgtataattgttaaaccctacatttcttgctgtcaaaaaacatgccctgatggcactaagttctttcttctcttatggtaatcctgccataattgctaaatgacctgtgttcagattacctggtaccatacaaaattgttctctggcaacaatattatagtatattgtatatgactatagtcgtgatttttagctcgtcttttcctcttaccaaaaatttaaagcacatgttgcataaatcttatgagtacttaatatttaatatggagaccaacaggccttttgtttcctctcacatgctatttttctttttcagtgtgaatgacatcacagctgttggaccggcacatttctatgccacaaatgaccactacttctctgatcctttcttaaagtatttagaaacatacttgaacttacactgggcaaatgttgtttactacagtccaaatgaagttaaagtggtagcagaaggatttgattcagcaaatgggatcaatatttcacctgatgataagtatggccccttatagaatatcttcatttttcttcagttgtggtgctggccaaattctttactttgctttctttgtcaatgtgaaaatagttttcttgacatttatggtatattatacatataatatatagatacactatatatataattatatatgttttgtatatatatttacatatacttagtcacatgtatttatatgcaaatacaataccatatttaagtaaactatataatacagtaatatatatgtatttatatataatatataaagtttggaatacatcattgtcaaatttaattttataaatataaattttaaagtgtgatcatactgatgcatacatattgaagtatcaggtatttccttttaaataaatgtattatttttattggctatacattattccattataaggatgatcttaaactaatttaaccaattctctattgatggatatgtgtataggggtggggagttctacataaaaaatattttatacttcttatttaccatggaattttaaacaagtattttttttaaagaaaaagtccctaggagagtgttttttttttgttttgttttttggagatggagtctcactccgtcgcccaggctggagtgcaatggcatgatctcagctcacctcaacctccgcctcctgggttcaagtgattctcctgcctcagcctcccaagtagctgggattataggcatgcgccaccatgcttggctaattttgtatttttagtagagatgaggtttctccatgttggtcaggctagtcttgaacctccaacctcaggtgatccgcccacctcagcctcccgaagtgctgggattacaggcatatgccaccacacctggctctaagagagtattataacataatggttaaacttgcagattttggactcatacaggcctgggttcaaatcccacccagggcactggctaaatggttctatgagctacttttctgtagaacagacccctagaaatagaactatttgctcaaacagtgtgattcttttaaatgttaactttaatagatattgccaaattgtcctccagaattatctcattatttttatatgcacaaccacaacctataagagaagatattaaattcttgatagctttcttatctactgcctcagcacactgaaaaatttaaactactacaaatacaacataaaataaatttggcactccttgacaactaaatgcccttatttttgtaatccaatttctcctcctttcttgttgactatagaaaaagaatgtagaatcatttaatttaaattgtctctaactgacctgatccaacctctgcagccaaatctgtttttcactcttatatttccattatgagagtcaaactttccaatcacccaagctaacaaaaaaataacaataatgaaaagggagaatcagcttttactcctctttcaccattcctatccagcctgtaggcaggtcctgttggttctacctgtgcctccttcctctacccccaaactcctttccctttgagtgagacctgcctaatttaggttgtcatcctctctgactagcatatgagactttcttccaatttgttttctgtctacttggatttttttcactcttgccaattttgtctgtctatctctattagccttgaagggctccccaaagagggaactctgtcttcctcacctttgactccttatgccagtacagtgccaggcacaaagcaaatgctcaggaattgtggaacagaactgaccatttgttgccactttattattctaagatttcagtggaatccaattgcttatcaaatcaaggcagggtaaagggttggactttgtttaacaggccacctccaacctcccttttctactatttccatgctttctatgctttagacaaagaactcattgttttaaacattccttcctcttcttgctcctgtgattctgctcttgtgcttgcttctgcctgggaagtgcctcctccgtcctcatctcaaatctcatctctctttacacagccactgcagatgccccttccttggtgagcctttctgtgtcctcggaagttagctatttctagacctgaactatttctcatgcttattaggtgtttaatgtgtacaaaccagtgagatttgttccaacacactataaactttcaaggagagaggctgtgtcttcttcatgtttatatctgctgcaacactgagttcatggcttttcacacataattgctcaacagagcaggtgccatggaaagtcaattcaatgagtaaaattacctcaaaatagtctgttaattcactcacctttgaagtagacagattattctgcattgatacttatctcttactcttaaaattcgctatgtattaataaatattttattgaatattaaggaatgatcactattttaataagatgttctttaccatatatttctatatgtacatgataattagaagtatcaaattatattgtggaatgtaaaagcttttcttctgaagccaagcatttgttttattgtcatttcagtggcaaatatggacttcatattcaaaatgatgttctatattatttttccttacaagctttttgaaaaacaatttaataattccatgattgttgtagcaccactgaattgattctgaaagcttactttttaaataaaaattgacctttatcaagcattccttgagggcccatgattgattaacttcttggcaggttattaagacttattctttcacactgtattaatgaagctttatattggcatggagctctaaccactgtgtcctttctgcaaaggtatatctatgttgctgacatattggctcatgaaattcatgttttggaaaaacacactaatatgaatttaactcagttgaaggtaaaatatttatttttacatatagacagtaatctattatgctttgcaatgacatagtttttctataagagtaccacacgtagaacaaaatatggatgccagtgtagctattctgggtttttaaatactccctacaactagagaaagctcctgtttccagcgatctcaagaactgaccatgattacatgcagcagcaggttgagagtgatattcatcagatttagggcccattccatgaagtattgatggcagtggaagaattccaataagaattttcacaattgaaaatactaatagatgaattctcaaatgaaggtttatgcacagtgtcagttctttcaataatacatgaaggtagaaattgggttccacaccattattattttcttcctactcaacaacacatattttaggttgattaagaatttcctatcttgctttgattgagttccttgagctaactgatcattgtgcatcttttaaaggaaaaggagttcagtttttaagatagatttttacagagaccgattatcaccctaactttcttaatttcagggaagaagaaaagtggctccaaaccagtttttaatacattccttttaagcaatattggtgttagaaggtggaagcagggcgatgtgtaatttcctcacatgcatagaggcaggaaggttacctctaaattatttaatcaagtttctcatgtcatttagattttgacaatttctcatttggaaggtacttgagctggatacactggtggataatttatctattgatccttcctcgggggacatctgggtaggctgtcatcctaatggccagaagctcttcgtgtatgacccgaacaatcctccctcgtcagaggtttttatattttcagttttttaaacttaattattcaagtccttttgaactaataatacaataaattgtcacagggatgatttgtttagttattttaaagcaataatataataagcttatgtcgtggttttgtaattgcgttaagccaataattggcagaatgttacattgttcaaatactttaagaaaggtaatcttttgatgtattaaattatggtggaaactagtcaaaaggcatttttataaagacatgtgcccttcttgggtggtatactggcaatttttaaaatatctgatttattgtcagctcaccacatgatgtgatatttgttcatgttgaagtagtgtgaaagtaggcacattagtatgaaagtatttctattaaagctgaattgctataataacactaaatcctgtgttggcatggaataactagatggttttaagaaagtactttctttgaagattggagaaagtactttaatttaaacattaaaaagattggtaactgctattttcaacagcatgtccccttaatcagtgtgtcattgtggaaaacagggcttattgatgattgagtgacatgcatgtacggtggtcttatattcatactttgtatcccctgaataggttctccgcatccagaacattctatctgagaagcctacagtgactacagtttatgccaacaatgggtctgttctccaaggaagttctgtagcctcagtgtatgatgggaagctgctcataggcactttataccacagagccttgtattgtgaactctaaattgtacttttggcatgaaagtgcgataacttaacaattaattttctatgaattgctaattctgagggaatttaaccagcaacattgacccagaaatgtatggcatgtgtagttaattttattccagtaaggaacggcccttttagttcttagagcacttttaacaaaaaaggaaaatgaacaggttctttaaaatgccaagcaagggacagaaaagaaagctgctttcgaataaagtgaatacattttgcacaaagtaagcctcacctttgccttccaactgccagaacatggattccactgaaatagagtgaattatatttccttaaaatgtgagtgacctcacttctggcactgtgactactatggctgtttagaactactgataacgtattttgatgttttgtacttacatctttgtttaccattaaaa

SEQ ID NO: 15747 - DNA, 30210 bp, Homo sapiens
ggactcggcctaggcggaggacggggcggagcgcggccggcaccatcgagccgggaagatggcaccgcccacggagctgctggccaggccggagcgaggcagcgcgcccggctcccgcgccatggggcggctggtggctgtgggcttgctggggatcgcgctggcgctcctgggcgagaggcttctggcactcaggtaggtgggactcccgcgcgcccctcctcggcggtccccaggctcggggtggccgcgtggtgcggggagggcgcaggctgggggagggattcctgcgggacctggccctgcggccgggggtggagaatttttgaatgctgtccctcccccagctagttgaacccccatcaccccgactctccgcttctagtgaaaaaactagcaaagtttggagtgaatcgcgacactttcttgaaagtttataagcccttgctgctaacaaagttctcttctgcttaggctgacaagagaatgctttgcaattacccaagggccaaactagtggtttaaattgaaaacaaaatgactactcatgcattgaaaccttaactatgaagatttatttcaggtcattggtgctgtttctccttgttgcccaaaccagacccgtctttaataaagttgttctccacccatttctgcatagtttgagaaactcttcagctgtagatcaaagacacttgaaatattcagctactgttcttacttcctatttattcaccagggaagcctgaagccagaatgccagacagcgcagacactattccatctcgcattttagttttaatgaaaatctctggtaggtagacatcatcgtttataaattaccaactcaacgtttgttttttgtttattttattttttgtagagatggggtcttgctgtattgcccaggctgttccctaactcttgcactcaagcaatcctccagcctaggcctccccacagtgctgggattacaggtgtgagctgttctgccctgcctcaaccaaaattttataggcctcatgcaaaagagttccagaaagactgagcacctgctatgtgtaatgttctctcttaggcttctatagtagagtacgacccttatggagtttgatacaggggaagagagaattaaaatacagtaaatgtataaattaggatgttctaaggacagacacaaatgaaccgcataggcttaaagaggaaagattccatcccctgagggtggagttctagagggaggaagagacattcgacctgaccttgaagggtgggtgcaacacatatgagcatgaaggggcccatgccaaatgtatagtgcagcaggagcaaaggggctaaggtgggaagttggaagactagcaaatgggccaatttgaagggagcataaagtcaggagatgagaatagtagggtggtgggaaggataggttttgaggccattaaatataagttgaaaaatggggccccactttcataggcccaatagtgcttcaaaagggaaatattggtgggttttgcttttcaacaagaacttaatataactagttgtgttttatagagataagcctggaaggggggattggaggagagcaatggttctctgtacattagaatctcctggagggctggtgtctgagtggcaccaccaaagattctgattcagctgttctggatcagaatctacagctcacacctgtaatcccagcactgttggaggcctaagccagaagattgcttgagcccaggagttagtgacaggcctgggcaacatagcaagatcccacctctacaaaatgaataaataaataaataaataaataaaaaacaaaatttgagttggtaatttataaactatggtgtctacctaccagagatttttcgttataattaaaatgtgatatggaataatgtattgtttggcaagctggcttcagggttcccaggtaaatagataaataaggaagtgcataatgtaagaacagtggctgacagtagcagtggcattttttatttttaaaaacattcctgataattctaatgagcagtcaaggtcgagaactactagaatagagagcagacatggggtaactggttaaggtattgcagtaggtcagagaggataacagggacccaaactctggaaccccagggatgagggagaagtcaaaggtgctaccagagtttgtgccacagctccactgtcccatggttgtagtttcatctactgataaagcagtgcaaagaggaagcgtgtggtggctgagatgggagtgagatttgaggaaagaacgcttatgggtaggaaatggacatgttgaccttaattttcatgttaggtaatgcccattgtgctctacagaacattcatgagttggatgactttgtatatgatctgtcctgctctccatttcaaaggcaagaccaccaaaattcacaagcttattatgttgtcactaatgtgtaagccaccagtttttctgcaagttggaagttttctcaacagtcaaatattcccccttctcactaatcttaaggttttaaagttatagctgcaaatctaaaaaaaaaagaaaaagtaaataaaacttattgacagaatgcctgatagtttatttacaggtttttgtttgtttgttttttgtttttctttgttttttattttgacacaaggtcttgctctgccgcccaagccagagtacagtggtacatcaaagctcactgcaatctcaaacacctaggcacaagcagtcctccctcctcagcctcctgagtagctgggactacagatgcatgctaccatgcccagctagtatttttatttcttgcagagacagggtctcactttgttgcccaggctaatctcaaactcccagcctcaagtgatgctcctgcctcagcctcccaaagtggtaggattatacacatgagccaccaccctcggcctactttacaatttgatgcaccttttctttacgtgactgtgatgcactttaatgggcagtgactttataaaatggtaactttattggatatgtggagccccaaatgggctgacgtgagaatgttggggtaggtggtgggtggctggatttagcaaagaaaaatgtaggctacccagttaactttgaatttcacatggatttttttttttttttttagtataagcatgaaatacttataccatacttttagcattaagcgtggaatttgggacataattatactaaaatatcattcattgtttatctcaaattaaaatatcactgggtaccctgtattttatcatatgttcgagtgccttctgtcagaatttggtgaccctttgagtctgttttaaaaaggagcatgtttggccggacacagtggctcacgtctgtaatcccagcactttgggaggctgaggcgggcagatcactagaggtcaggggttcaagaccagcctggccaacatggtgaaaccccgtctctaataaaaatacaaaaattagccaggtgtggtggtgcatccctgtaatcccagctacttgggaggctgagtcaggagaattgcttgaaccccagaggtagaggttgcagtgagccaagattgagccactggactccagcctggacaacagagaaagactccctcaaaaaaaaaagaaaaaaagcatgttcccacctccccataaggaaaggctcttcagaggaagttgaaggaacagaggctttatgtttgatttttgctttaatctgatgcctactgtttgattattcaatatttagagatggtactttggcaatcaagttatttctctccccaggttgcccacttcaatttttagtataaggatgtcccagagggataaatgccatcaaagttgtctttcttcttctgaactgtaactgggattccacaccctccttttccacccctccctagttgagcaataaaggggaaaataacagtatacaaatattcccaggccagttcctggtgtcaaggtacacagccatggatgaatcatgaggcttgagtgcatcagagacctaagcgtgggcaggaacccccagagtacccatgtgaatgttctgcttgctgcctcgcaccttttatgacaattcccacaagaagctatgtggtctgtttctacttctgaaagagcagcctttttcccttttttttttttttaaaccaccatcctttaaatcatttattatgtaactcttgtgtgctggtcagtcagtgtgtcaaaagtgtaaaaacttctttatttatttttttaatctatcttttaaaaaatattttctttctttttttcttttttcttcaaggcaggttcttgctctgtcacccaggctggagtgcagcagcacaatcatagctcattgtaacccagaacacctgggctcaagcaatcctcccacctcagcctcctaagcagtgaggactataggcatgcaccactacacctggctaattaaaaaaacatggccgggcacggtggctcattactataatcccagcactttgggaggctgaggcgggtggatacctgaggtcgggagttcaagaccagcctgaccaacatggtgaaaccccatctctactaaaaatacaaaattagccaggcacggtggcacatgcctgtaatcccagctactcaggaggctgaggcaggagaatcacttgaacccgggaggcggaggttgcagtgagccattgcactccagcctggcaacagagcgagactctgtctcaaaaaaaaaaaaacaaaaaaatttttttgtagagatgggggtcttgctgtgttgcccaggctgatctcaaacttctagccataagtgatcctaccgcatcaacttcccaaagcactgggattatgggtatgagctactgagccctgccaaatttctttatattaaaccaaaacgtacatttactgatatttggaaagaaagctcttttacttttatgccttcatccagtcttcatagatatcttcccttttacattataactgtaaatactgaggttagagaggttaactagttagttcaacagaataatataaatattgaataatataattaatgaataattagtgctgaacctgtcgcctcagccaggtctcctgattccaaatacagtttgccccagctccccacagtcttctagcttctctgccagtggagcaaattttccctaggtttacaggcctaagcacagattcttagttacttagtgcaagtattgccagagcccaaggggtgaattccaaagggtttttacaaggctatacataaaagataaagccctggcttgtatatcacttgcacataggagataaagccccagcagttgtatgtaaatttcaaaagcagagaagtatggcacaaagaaactcctgatagtaacactgtgttcccactttgcttaggggcatattggcaccgtagcatggtacacccttactgctacctgccatgaggccagataatagctagcagcccctggtctcattctactctggatgggtactgctgtttcctgaatgaaagacactgagattgatttcatgctaatgactgttggttaagagttcatgctttctattcacaatagcaaagacttggaaccaacccaaatgtccgtcaatgatagactggattaagaaaacgtggcacatatacaccatggaatactatgcagccataaaaaaggatgagttcatgtcctttgtagggacatggatgaagctggaaaccgtcattcttagcaaactattggaaggacagaaaaccaaacaccacatgttctcacttataggtgggaattgaacaatgagaacacttggatacaggaaggggaacatcacacaccggggcctcttgtggggtagggggaggggggagggatagcattaggagatatacctaatgtaaatgacgagttaatgggtgcagcagaccaacatggcacatgtatacatatgtaacaaacctgcacgttgtgcacatgtaccctagaacttaaagtataaaaaaaaaaaaaagttcatgctttgtggacaggtagcctgagttcattcatagctctactatttacctgaaaccttggactaattatttcacttttctgtgccccagtgttgtaatctgtaggatggggtactgcctgctccacagtgggactatgagaatgcttaaaataatgccaagcgcacagtcagctcaataaatgtcatctatgtagacaatgaaattcaagcataattccttaaacctttgtgccatacatccctttggcagtctggtaaagccttcattccttctcagcatcatgtttttaaatgagtaaaataaaatatataggattacacaggaaaccaattaaatactgctaccaagctatttaaaaatctatgatataatatgctttttaaattaaacccttaaatggatctagaggtaggtaaatgtctaacagcagatattttgaagttgcaatgaatgtaaatggcactttgagctatctacaactgaaatgcgatagaaaagtatctataatttctattagtgacagtcacaaatactactaatagtattgtggtttgttgcttatactcatcatcaaaggaaatactcaatttgagttaaaggtttaaataaagatgtatttttcccccatccaagttcatggatccctgaattctacccatggattccttggtcactggactccataggggtcacttggggaatgattgtgacaccaatgaaggaagccagcggatactgtttgctgtattatacctaccataggctcgtgatgaggaaataataaaataaataactgtaatgaaaaagaaaagaaaggaaaacaaaaggaacctaaaacagagaaggcaaatagctttccttttgagtgtcaattttaacagactccctgtggttgcgaaacaatgtgtctgaggctggctctgggttagagggagagtgctgttattgattagcaattcctgcatgacagcagagtggcaacagccatgcatctctgacctggcacagtcataagcatgttatagacataaagtgttagggaacaaataggctctagcaaaagtaaagagtgttcctcctctcatatcatcacttatatgtgtttataccatttatgttgtattttttacatgaatacttttagatttattaatctaatccaaaaaggtttgtatagctttctctatattaagagaaatatatgtatttcttaaatacacaaagttcttaaatctgatgccagcgaggattgcttccagccacaagtaacatatatcagattaatagtagttcattcaaagagggatttattttcctcacatgaaaaacagctctgtgggtgacccaatatagagcttgttcattgagccagtgattatatcaaggaactgggttcttcatatattttcattctttgatctccccctattgactttatagctgtatctttctcaaggatgcagaatggctgccgcagtctcaaacactgcgtgtgtgttcaaatcatgaagaaaggagattgagtgatgccagctagctctcttctcgtgactctcctttgtatctagaacacagtgtctttccccaaaacctgggtcatatgactacacctcaatacagcggagtctgggaaagcaaatatttgctttgcccaccactacaatagaaacgacaagggagaaagaaagggggttgggcatggcgttaattttgtcagccgctagggtctgccacccagaaaacagaagtccactaacaagcagggaactgattgttctgccagggaaaaagtctggcagtttcctactgaagaaatttggaagtcttgatggtccaggaaggataaaggcaaaaccttcattttcttttatcaaaaaggaaagccaagaaaaaaattagttaagtagaagttatgcacaaccctcatgtaactcttccatgttaatagcaggtaggctgcatatgaaaacatgatattatacaagaaaactagttgatgaagattgccctatttagcaccaattacttacgcaaacctaagttgactctgaaacaggaaccccatattaaacttttcaaacacatcagaatatgttactttgaacagattttatttaatccaaagagattatctttgaaaaaggtagatggtaaacatcgttatccctatttttgtatagtcaaataggcatagtagtaagttgtgtaaaattgacatccaaaccaatgcatgatactaaaacttggtgtacaaacagcagttacatcctattgctttgtatctacatctgtttctggagtcatataacatttgtagaatcttggaggtgttttaggctcatccttattttatccataaagaagactgacacctatagagattaactgacctgccaagggtcatggcagtttcactgctgagacaagaacacagatccctttacttctttctgagaaaagtacaaagtagtttaaagcaaaagcttccctgcttccagcacttctggctaagttgcgccgtgggaaaattgttttgtctgattcagttttctcatcttttaaactggaataatgctacctaatttacagggttgtttgaagaattaaatgaatgcatggaggtaaatcacttagaacagcggtaaattatacttttttattatttatttcctttgaccacccacaattatcatcagtgtcatcctcatcatcacaattaagattactaccacattaggctacataaactttttttttctctctctgttttataatttcaattttattttagattcaaggggtacatgtgcaggttttacatgggtatattgtctgatgctgaggtttggggaacaactgatgccatcacccaggtagtgagtatagtaccctatagtttttcagcccttgtctactcccttcccttccccttctagtagtccccagtgtctaccatcgtcatctttatgtccatgtgcaccattgtttagctcccagttaaagtgagaacatgcagtatttggttttctagcttatttttcctctcttaaatcacttctgtgacacgtaggccatgagatttattgtattttttaatgccttatttaaaaatttgtattatttaatacatttaatgcattattttttattatatttaaatattgatttatttgtactttttgccttattgctatattgtttcaaaaaatttaacattatttgagttacatgatttcaaatacatactgattaacattttaattagaaactttatgtctgatatgaattgccaaaatgtgtagttggtacaacctatgagtcattctgggttatctagaagaaactggtagcctgccccatactccagaagccttccccagtgtctagacctcagaagctgtcaggaatatgcacaggagaaggacacatggcaaatagctatttcgtctcttaaatgtatggtatgtgggaaccactgaaaaatgtaaagtttctacaaggtgctatttttattatttatggctctagagaacagagaaggtgaaaaatgtgagagagaagggaaagccaatagtatgtggccttcaaaacaaaagatcccacagatattgtcccaaactgcttcctggccctctagagtggagagggagggggaagacatcctattagagttcaacattctcttattatttccttcttttaattttctgggtatacaacagcaaatagttttgctgaagtagttacagaactagttggtgttctccaaccttcctattccaatacatactgtcatggatgggtacactaaaatctcagaattcactgctatatcactcatccatgtaaccaaaaaccacatgtacccccaaaagctattgaaataagataaatacattcttatttaaaaaaatactgtcatagggatgctaccttcttttcttttttgttagtaactatttgtgggatgtctttggtgtgtcaggctctgagcaatgccattttctcttggcttctttgcagtctctgtgtgaggcttacagtcatttttcacgtttgactcttcagaaggaagacagggctactggttctacatctggaactcttttcccacaacaccaacactgagaaatgtgacatggtgctgtgtttacatttgcataggaacttgcattataagttttatttgttgagttattggctttttttttttaataacccacatcagtatatagaactttgcaataggcatttttgttttaacttcatttctggtgcagttttattttcctacccttgtctttctattttctctttcatctgctttagacttaaactgtgttttatgtattgctgtaagcctctttaaaccctttctaaaacaaagcagggaatacataaacaaatagttttttgttttttgtttttttttctttgtaacagaaatcgacttaaagcctccagagaagtagaatctgtagaccttccacactgccacctgattaaaggaattggtatgtatatgaaaatgcttgttgggcacattgcattttttggccattaacattaaaacactcattaatggcattttagcatgaaattactgcttttcagtggataaatcacattagatcaacaaaaacctctttggtcaacctcttgatctgatgaaccctgtatttattcttctttcctaccctcactgtaaattattcttttttgtgtgtaattctatgtttagcatttgatttcttgcttgttttgtgacttctctgaactatttttgttgcgtctgtattgtttgtcaggtatggccgctgcagtctgtgttctgtgagccttgtggtcagctagtgaaggaagctttatgtaggcagtgacagcatttaccctgctcactactctataactaggatctgatcttatggctaacacgtaactgaccaatatggtttggttgtgtccccacccgaatctcatcttgaattgtagttcccataatccccacgtgttgtgggagggacccagtgagaggtcattgaatcatgaggtggttaccctgtgctgctgttctcgtgatagtgagtgagttctcatgagatctgatggttttataagggcttttcccccttttgctcggcacttctccttgctgccgccatgtgaagaagggtgtgttttcttccccttccaccaagattgtaagtttcctgaagcctccccaaccacacggaacagtgagtcaattaaacctctttcctttataaattacccggtctcaggtatgtctttattagcagcctgagaacggactgatgtaccggcacttcacaatatgtattgtaaaaacttgtttttattttatcttctaagctatgactgcagagggggagtctccctcttcccttgactttatgtaggatgtattgtggagtctgagtctttgagtaggggttcctaagagcaagccccaattttgctatagataaggagggatctgtccagattcttctccagcactgagggtctctctggtgtgtttgcagtttttctccaaggtagagtctgtgtcttgctgtcttttaccctttatcatctactaagtacatgtccctagtacataatagactagtagttagattatcaatgaacaataaatattggctttccttttttttaaattttaattttttttttttttttttttgagaggtggcctcactttgtcacccaggccagaatgcagtagcgcaatcttggctcactgcagccctgatatcctgggctcaagcgatcctcccgcctcgtcctcccaggtagctgagactacaggcacatgcccccactcatggctagttttttatttttgtagagacagggtcttgttatgttgtccaggctggtcttgaactcctggcctcaagcaatcctcccagcttggtctcccaaagtgctgggattgcaggcatgaggcactgagcccagccaatattggctttccttagatatggttcatggtatgattagaaacaaaaagaattagcagtcaaaacacctagtttctagttctattctgccacaatgtaaccttaggcaaagttggtttttgtatttgtcacctataatgatgagtttgtgattagactaatggtttttagactttaaaaagcctgggaccatttatttataatcttactctgagagccacagtgtggaaataactagactgtcattgagtcacttctagtcctttacaacaacatccttctctagaggtaggagagacaatttaatattttgttttactctttagaaattaaaactcgggttacatggaaatgttctcttctctgaataggtaacattgttaaacaagttttgagtgtccttccatctttttctttttatgaatactcctgtacataatttttaaaaacataagtgaggtcaaattatgcataatatttcaaaactagctttttgtacttaatactaggttttggaaacttatgtttgtacataatgttaccttttcttcacaactgcacagtattttttgtgcaaagttcatataaacagtgtatgtgcaaacaatatagaaagatataaaatggaaagtaaataaaaataaaaatctctcatcaaactcttcatcacccccaacagaaataaccccaaagataaagctcccttttttatctttcctgatagtttcagtgcatttgcaaacaaatatattgactctttttttcacaaatagaattttagtgtaaatatttcacaaccttcttcattcctaaaacagtgtgagcagctttccacatcagcatatatagttactttgttctttttaatattttcacattccatgatttatttaaccattccccttttaatgtacatttgggttgttacagttttttgcaactatgaacaaatcagtgaacatcattgctgttgagtttgtgtgtctgtagaatatgtccttaacaatgggattgttgttcccttagaatatgtgtttagagttttgacagtcattgctaagttgctctcaatttggcaacagtaataaactcagtacctcatagttgtaaccacattcactccagacagagttctcagcactcttttagtaaaaataaaccatcagttgacagtgccaccttcagagtttctctacaaataccttgcttgcctccctttctttttttcttcttttaaatcagcttcctcaggttgatctgcctctcattccttaggcatctgtttcctatgtgttctttctcctttttttcattgatacttttgtatttccccagttctacctcccctcccctagactggttggctgtcctggaatttcccttccttctttcaattgcccaaacactaagtgggaggaggcaaactcatatcaaatagcagattgactacatctgtgctggatcatgcagacagttcaagagtcccaagtaacttagcagcttcatcttgccttccagctgcaatcaagaagagccctctcagaactggtcactcagcaaaagccagatggcattagtaaaagatgttgggcaagggtgggagtttgggccagtgatctcttaggttacttttgctgctgagttaataattgtcacattattaaacagcccttggccctgggaagcccaccttctgtgaatacaagtctcagagtagacaatagggcacaaccagccatgttacatgacagactgccaagtgcattcctcttacaactcactgggatggagcgctcctcagagaaaaacaagcccagcaacatttgtattctgaacaggcatctgtctatgtttgtgacctttatgttgtgatgtgtgtgagctgctgtctggaattggaaagaatgaggaaatatgtcacctatggcccctcttgtgaagtgttaaatgcctctgaggcacttcaaaaggcaacagagcggagaggatgagtgattagaagcacatttgggatacatttttagatctaattagaattgtccttttttttttcttttttgcttttgccctgtggttagcacacaccatatgaacgtttgtcgaatgctatgttagtgatgcataatggttaataataacttttggttatatatctttaacaacagttgcttattcacaggtctttgataagaagaaataacaatgtgctggacacacatttctatacaggcaaaagtgactttttatgatagagagggctgtttcttattttctgttttgaaaacagtagtagctatgcacttgaggccaactaatccctctaagaggtgaaccttccttcccccttgcccttgattcccatcaacacacacatacatatgcacacactaccgtgcttcagtcaccatcactggaagtgaactatgtgcaacttttgggtgctttatatatatcatatcatattgtgtctgctttaataaatcatagttattgactacatatcatacaggatgtgtgccttctgtgggtcagaaaataagttcactatttagtccttttcaaaaattccttcccgatctatcttatagacagaaactaagcttttatacacccaagatttggcagattaacatctgcatattaaaatgtcaagagctagttaactttatttgaggcttaaaagttaaaaaatctgattttctaaatgtctggccttcaaaatttgagtggactgtctttctcaagataactaacaattttatgcacttggcagtcaagacctttacaataactgctgcttgggagattgaggggaaaaaagcattaaagtttgtggcccttataatcaagtactttacagtctactgatgggagaaaaggaaaacaaaacaaaacaaaaaaccactgtgagatatagatatgtcttttctttctctagcagataagtacctgaggctcaaggaggttaagcaacttttgcaaattcactttccaatatagtgtcttttcccagggtgactaatgtatatacttgatgagtgaaccagaaaagtaggaaataatatgttacatatgggatgctctattgggtatagtaaaggatgcgttgctgttataaaattatagtcacttagaaaagagatgtttatttttatttttctctcatcagtcttaaggtaagtgaatggcctagggtagttaggtgactgtgttccatatggtcattcaggggcaaatgctgatgaagcaacacagctgtcttcatctaagactagaactctgcttgttgccatttcccagcaggaaggggttgaaagaaaatttatgtagatttttttttctacccagtagttgcatatatattgtattctcacatcctattgacccaaacttagacatatggccacatctgtcagccagaaagggtgggcaatgttatctatagctgtgttgctacgtgcctattgctaaaaaggctaaaaaggaagaaggggaacatggatgctggtgaacacttggccacctctgacacagataattgctaaagtaataagaagagatggaaattaaatgtgctaagctaggagactttctaaagaaagggtttgtcatgctacgctgtgccattcatgtgtttttttgctcatgctgttccttgtgcctggaaattctccccctaattcccctgagcagtggatgcagtggataccctccccagatcccccccaacttccctgagtgttggctaccaaaagctctgagtgcacccagggagctaagtcctcctgcccacaggcaataatggactgacacggggtagacttaaagaaataagaggcacatcaatcaattgaaatgtgtgggaccttacctggactctgaattaaacaaactgtaattttttaaagctacaccttttaaacatgattggctatttgaacactaactagatatttgatgatattgaggaattattgtgaatttttagtgtagtaatgatattgtggtttgtataaatatatttagggataatatgatgcctcagatttgctttaaaataacacaggatgaggataagtggtaggactgcaagggaaacaagactggccatgagctgataactgttgaaggtgggtactgggtatataagggctcaccacaccattctcttgatttgtgtctatttcccataataaaaagtttaaagagagagaaccgatgaaggggagggagagagtcaagcacacaataagagtgacaaacagtgccaaatcagcccacagtattaagttttcacatatttacataaatatcacctggaatgcaatattgaaattaatgtatatcactagaataaaaaaagtaaagatttaataaatttgttttgaaataaaataagttgaaatacgaaaaagacagaaaaggttttgaaagaggttttaaagaaaagtgcaggatattcattggtaaagatgttggtgagaggcttggaagcaaaacttcaggggaaaaagacaacatatggaattgaccacaattgaatttacaagtgaagtggctttacagaggaatcaggggatgtttctgagagaggaaattcattaaattctaacttgaatattttctgtttgcctttaagtcagagcaaaggctttgagtcccagcttcccagtttgtgaccttgagcaattgcttaacttttccaaagcctccaatagtcttcactctaaaataaaagataatcatatgagatattgtatgcagggtatttacaaggagcctggtacttggtgtacctaatgtatgttagttattattattaaattagaggagcaaaaatttctctagcattgactgctcctgacataatcacaccgaagaggggatacacgatgataaaaccttcctgcagtagtggctatagaaatgatgacggggagaagatctggaaaatattccaaagaaggctacagatagatacattttttccattggaattaggcaatggagttaaacagaagttacaatatggttgaaataaatgtatttttttaaaaaaagatttctctttccttaattattaaaaaatatacaattttgtagaaaattttaaacaaagtataaagaaaaaaataaaaatcattcataatcctatcaaagaagcattgttaattttttctatatatcttctttttccacgtgtatacttggaaattaaattttctaaaataattttcaggaaaaacaaattttaattaattgagcttctactaaataggactgaaaagcaaaacctggactagaattctctctcggtgtgtgtgtgtgtgtgtgtgtgtgtgtgtgtgtgtctgtgtgtacatgtgtatgtgctgtgtatacatgtgtatgtggtgtagcgttcccctgattcttaacttattaccagtggacaaccaccgtggaactagagtctagtcattcttaacctttttgggggaatcacagtctcttttttgaatctgatgaaaatcaaggaccgtttttacagaaacgttctcatctgtgcatacatgagacattttgcattgcatagaatttccgagggttcacagatactttgaagcccaaaagtgatccacagaccccagattgagaactcctccgctatgccatgcttaagcttatttctgtgtatcttctttctgaggagcaggcagatgggtcatctttacaatgtgaagttcttggcatttttattttgttttgtttttctgcactacgatggagcaagcaacactggaggcaactggctaaatgcaaactcatgaagcaagaccaaaatggctggatagatagatgctgtttggttttgacaacctagaaataaccttgaagaaatcctatggagaagtcttaaagaggaagattggattttgtagactcaaagaatgtgtcatggtttggcttaatctaagccatttttattcttcttttcttgtgtttgggtctattatctgtctgtagaatttatacagtgagactgctggggaaagtcttatgtctaattatttgctgtgctgtgtggagtgtactgcagacagtcaataaacaatcaatagtaattgtagcctgcctcagagacaggagttagaaacttcaactggcttaggtgcatggtatttttcattaattttcttctgctagtttttttctctaatttaaagcctaaatttaaagattaaatagaaaagctttctttgcttatgagcacaagtaggcactgtttttaaaagaaggaatatataatcccaggtgttttacctctgttaatgagaaagatgtctgtttgcttcagattgaatgagcaaagaagaggacaaggatatttgcatggttaaatgcctatgagcccttccttcagaaagtaatattcccctgatgtcaattacttttatacggacatctggatgtttatcatgagagtgtacagatgtcaactttttcagtattatagctggaaatgtggtgataacttgactttgatttgagtaaacataaaatatctaacatttaaagtcagaagttcacttcaggaaggggtttaaactgacatttattaaaaagaatggttccttggaaaaaacatcagaaccatccctaaagatacagtcactctgataaagtaaacagagtcccagttatgctctgtgtaacaaataacagaacttgaacatgacatttatctgttccttaaacttacagaagctggctctgaagatattgacatacttcccaatggtctggctttttttagtgtggtgagtgtcttcttccttccccaaattcagcagaggagatacaagggtatttgatgagggctgcagaacagtaagttgcttttaaaattcattttccaaaatgcattctgaagaaaagagaggtcaaacaagatcttggaaaacttcctccagcttttctaaatgtagagatgaagactctttgcccattgagatagtgttctttatttccccattgcattgcactaaaatattccaatgcaatctgtgttttgttttgttttttcttttttaattttttttattttttgagacggagtcttgttctggttgccccggctggagtgcagtggcatgatctcagcttactgcaacctccgcctcccgggttcaagcaattcttttgcctcagcctcccgagtagctgggattacaggcgcccgccaccatgcccggctaatttttgtatttttagtagagatggggtttcgccgtgttggccaggctggtctcaaacacctgacctcaggtgatcgcctgcctcagcctcccaaagtgctggcattacgggagtgagccaccacgcccagcgcaatctgtgttttaaatgtgcactattaagagggatatttgaggtcttactgtggatactcaatactaacattatactattttaaatacagcatctactcatctttctattactattcaacttgaagcaaatattcttgccattattatttattttcaaatattataccaaccttgcccttttgctttctttcttttttcccctgaatagccaatcataagtggaaagtcattgagtttatttacacccttcattttgccttgattcttgtaagctgaaaaacaatatcctttctgggtatacaatagaaagactttaaaaacaattggcttgtgaatattgttgtgaatattgttgaaactagcttgtaacaatgtccattctaattggaaatccagataaggggacagatgaggaggttctgaccacctacctccctggcttgggcagacataggagttcttggcatcttcataggtccagtttttctggaggaagaagtaaccaactctgacacctgactgtaattattccatttcctctcaacatccattattttcaggctctgagactcaagagggatgtgaaatactgggagatacttagaagggagtcaccacactaataaaatagttgttagacttatgagaaaggtgagagaactcaggttggagtagaatgagaattagaacactcttcaggttcctgatggtttttatgtgaaagacagtgagcagctggttattaccactgaggcaataaagagatactgtgggctttagcagaaacaccagtatatgtatttagtttttaaaataaggttttaaaaggaatgttttatttaattgcctacacagaatgaataaagtgatatttatagtaggactctgggtttgtttaggagcacatgcttgcacatgtgtggcttaggaaaaaccactgggaccactagtctaaaatattcataagtaaagatgcaaacattctgaataaagtagaaggcagttgcattgatttttttatttgtttatttgtgttttttgttgttgttttgcaaggatgtgttcttggagatttttataatctagaattcacctatttcaagatttctctccagcccccatagtaataaatctgaagtaggagggatgaggtctccaaacacataaatctacagccattttagcttgggggcatgttatagttacaaagatcttatagccatatcaatagaactttttctgctttttttctgttaccctcctttgctcatttgactttttttaaaatttagaaacattcccagtttgctgctgtttttcatttacttggcattgtctctaataaaacctagagtgtactctcttctaaataaagaggtcctacattgtggaggttgttcattcttcttcctagcattttagctcatctaacccaacctattttacagttatgggttgagggtcacctcaaaactaatgtcacacttcatgaagaattggatgacatagaataaaatataaaaaatgtaaacaatgtgagtgtgcttaacaccactgaactgtacacttaaaaatggtgaaagtgatgaatgttgtatgtattttatcataattaaaaataaatttttaaaaagagaaaaaatacttaaataaataaggagtgcgaacataaccatgactagttatcaccatctgatagtgcttcctttgcatgtaaatcatgcttttgttttggggacattcataaagaatagggattaactgaagtggcactgccatgtaacaatagcataattccagtttgttctacttaccaggcttgccctccatgaaaatatacaattgtagataatcttttttaattggagagatttcctcttatgtccaattttatacataaagtaagacttttttattgtgtgcctaaatttgtgtaaatatgactgcatcgtattagtaaactgaattaggtagtgcattcacataaaatttaacatcaccaagaaggctttaccttaagaatgtaatgatgaatcaccattttagatagactgataggtaatttattaactgatttaaaagagaaaagacctatatcatctcagtgagtaccaaaaagcatttaataaaattcaatactcattcctaaagttccaagcaaactagaaagataaggaaaattcccacaaaactacagcaaacatcattcttgatggtgaagcattggctgcatttgcattaatgctcagaacaggaagaaaatacccaacaccacaaccatcagtaatctactagagttcttagtaattcagtaaaacgagaaaaagaaatgtgagatagaaaagaaaaagacaaaactgtcattagagaagcagggactggctcaattgcccaggctgatgtgcagtagtgcaatcatagctcactgcagcctgaactcctaaactcctgcgctcaagaggtccttccacctcagccttccgagcagctaggactacaagtgctcaccataacactcagctaatttttttttttttttttttttttttttttgtagagacagagtcttgctatgttgcccaggctggtctcaaactgctggcctcaagcagtcctcccacgtcagcctcccaaagtgctggaattataggcatgagccaccaggcctgacctaaagctgtagtaatttaaaaagtgttatattggcacaggaatagacatgagacattaaaataacaaaacagagagtccctaaatagaccaatatgtaaatgtcagagatctagcacatgataaaggtgatattttgaatcagtgggagaaggatggactgtatgccaggcactgttccaggcactgggatctagcagtgaacaaatttccacagtcagtatgtagatgtcacttttctccaccctcagctctccctggaatcacctagtccaccaaccttctgattactctctgaagagaataaatccctgatcttcttttcagttattttcaggctttcagtattccacctccccgttattattttttctgttatcttttctctgttttttgagtttttgtggctttatgccactactttaaccacaatctctatttatccttcatgtacagttcccatgttagtccataaaaatacttaagcttttgtatttaacatttttcaccgttttggaaagggtctaaaattcccaggactccacagctttgcaccagataagcctggaggaatactaatgatggatctaaaagaagaaaaaccaagggcacgggaattaagaatcagtcgtgggtttgatttggcctcattcaatccacatggcatcagcactttcatagacaacggtaagagccaatgggctaccaacatttagtaacgtgtgatggttcacaaatgactgtgaaaaatagatttggatcatatttctaggaagagaagaacaattaactcatgagtgatttctgtattcttcattacaaagaacttgttcatttgcctcttcagctggcagtaagttatgctacattttgaaattcctaacaggtaacacctgaaagaatgtttagatttcataatcttttcatatacctacgatcatcacatttaaaaaagaactgtatttttgaattaaagtagaaacagattatgcatgaattctgtatatggagtaggaaacactttcttaaaggtcagggagccaatgatcagaaataacaccagacggacagcaataggaaagacagagaatgatctgttaggtcgtctaacagcttatacattcaacctttccttgcctgtggtatttaaatgtcagtgcctgcccagaggtcccgtagttatgtcttgtaaattaactctgttctttcaattctttagatgacacagtttatctctttgttgtaaaccacccagaattcaagaatacagtggaaatttttaaatttgaagaagcagaaaattctctgttgcatctgaaaacagtcaaacatgagcttcttccaaggtacttcctcattttgttccttctctaatttatccccagcatttgcaaacaatccctatggtgggttgtcctgtcatcttttataagcgctaatgtatatattagctaatatgtaagagctaaagagcttatatttccttatttataaatgtgtgtgtatagtttccttataaaccagggcaagcatggcatatgaaagttgatgtcactcatactattcactgttctatgcggactcctttgagaaatgatgaagtgcccgactacagggtgatactcttcaggcccatcttgagggtagaaggcaaaccctaacattttttcctgctgtcaccctccatcttagatgactcatcacccagatgagtgtcttgccaaggaagaatggcctgttttttattgggtttgtatgctttgcatgggactttataccaatcgctttcatagggttagtgatggttgcatgctagtaatcccacagaattagagccactcaagttgagagtgagtcattacacttcaagaacataaagctggttgaaaatgtggctaagagagaatcatgtgtacccccacccccagttcagtgtgtattagcctactgcttcttttagtttaaacttgatgaatatttttaatttctaatgaaatttcatttctaatgaaattaaaaatattgcctatctagggcctatctatgcctatctagggcataagcatgtaacttccaatcattccttccaaaaatgcacttgataaaaaaaaataggagcataaataccatccaagcattatggtgctctttcagaaaaatgagacctaccttccctgtagctctatatttttcatttagcaaagaataaagcagctctttcagaaatttttgcatagagtaattggaatttaaatttaataacaccctcacctaactggtcttaaaatgaaattgtttttagcatataaatctctcacctgaagcattgtactatggcaattttatcatccatctctctgcaagtgtttattgagtgcctgttcattctcggcatgtcagctttgtgaagcaggtagaaattgaacagtcaaccttagtttgactaataactaagccagggaaattagaaaaatccaggaactgagtaaatggaagctaggtaaatgttactgactgcctaaccagctcaccagccaatcaggctctctccagctctgtactgtggacagctctgtccttacgtataattgttaaaccctacatttcttgctgtcaaaaaacatgccctgatggcactaagttctttcttctcttatggtaatcctgccataattgctaaatgacctgtgttcagattacctggtaccatacaaaattgttctctggcaacaatattatagtatattgtatatgactatagtcgtgatttttagctcgtcttttcctcttaccaaaaatttaaagcacatgttgcataaatcttatgagtacttaatatttaatatggagaccaacaggccttttgtttcctctcacatgctatttttctttttcagtgtgaatgacatcacagctgttggaccggcacatttctatgccacaaatgaccactacttctctgatcctttcttaaagtatttagaaacatacttgaacttacactgggcaaatgttgtttactacagtccaaatgaagttaaagtggtagcagaaggatttgattcagcaaatgggatcaatatttcacctgatgataagtatggccccttatagaatatcttcatttttcttcagttgtggtgctggccaaattctttactttgctttctttgtcaatgtgaaaatagttttcttgacatttatggtatattatacatataatatatagatacactatatatataattatatatgttttgtatatatatttacatatacttagtcacatgtatttatatgcaaatacaataccatatttaagtaaactatataatacagtaatatatatgtatttatatataatatataaagtttggaatacatcattgtcaaatttaattttataaatataaattttaaagtgtgatcatactgatgcatacatattgaagtatcaggtatttccttttaaataaatgtattatttttattggctatacattattccattataaggatgatcttaaactaatttaaccaattctctattgatggatatgtgtataggggtggggagttctacataaaaaatattttatacttcttatttaccatggaattttaaacaagtattttttttaaagaaaaagtccctaggagagtgttttttttttgttttgttttttggagatggagtctcactccgtcgcccaggctggagtgcaatggcatgatctcagctcacctcaacctccgcctcctgggttcaagtgattctcctgcctcagcctcccaagtagctgggattataggcatgcgccaccatgcttggctaattttgtatttttagtagagatgaggtttctccatgttggtcaggctagtcttgaacctccaacctcaggtgatccgcccacctcagcctcccgaagtgctgggattacaggcatatgccaccacacctggctctaagagagtattataacataatggttaaacttgcagattttggactcatacaggcctgggttcaaatcccacccagggcactggctaaatggttctatgagctacttttctgtagaacagacccctagaaatagaactatttgctcaaacagtgtgattcttttaaatgttaactttaatagatattgccaaattgtcctccagaattatctcattatttttatatgcacaaccacaacctataagagaagatattaaattcttgatagctttcttatctactgcctcagcacactgaaaaatttaaactactacaaatacaacataaaataaatttggcactccttgacaactaaatgcccttatttttgtaatccaatttctcctcctttcttgttgactatagaaaaagaatgtagaatcatttaatttaaattgtctctaactgacctgatccaacctctgcagccaaatctgtttttcactcttatatttccattatgagagtcaaactttccaatcacccaagctaacaaaaaaataacaataatgaaaagggagaatcagcttttactcctctttcaccattcctatccagcctgtaggcaggtcctgttggttctacctgtgcctccttcctctacccccaaactcctttccctttgagtgagacctgcctaatttaggttgtcatcctctctgactagcatatgagactttcttccaatttgttttctgtctacttggatttttttcactcttgccaattttgtctgtctatctctattagccttgaagggctccccaaagagggaactctgtcttcctcacctttgactccttatgccagtacagtgccaggcacaaagcaaatgctcaggaattgtggaacagaactgaccatttgttgccactttattattctaagatttcagtggaatccaattgcttatcaaatcaaggcagggtaaagggttggactttgtttaacaggccacctccaacctcccttttctactatttccatgctttctatgctttagacaaagaactcattgttttaaacattccttcctcttcttgctcctgtgattctgctcttgtgcttgcttctgcctgggaagtgcctcctccgtcctcatctcaaatctcatctctctttacacagccactgcagatgccccttccttggtgagcctttctgtgtcctcggaagttagctatttctagacctgaactatttctcatgcttattaggtgtttaatgtgtacaaaccagtgagatttgttccaacacactataaactttcaaggagagaggctgtgtcttcttcatgtttatatctgctgcaacactgagttcatggcttttcacacataattgctcaacagagcaggtgccatggaaagtcaattcaatgagtaaaattacctcaaaatagtctgttaattcactcacctttgaagtagacagattattctgcattgatacttatctcttactcttaaaattcgctatgtattaataaatattttattgaatattaaggaatgatcactattttaataagatgttctttaccatatatttctatatgtacatgataattagaagtatcaaattatattgtggaatgtaaaagcttttcttctgaagccaagcatttgttttattgtcatttcagtggcaaatatggacttcatattcaaaatgatgttctatattatttttccttacaagctttttgaaaaacaatttaataattccatgattgttgtagcaccactgaattgattctgaaagcttactttttaaataaaaattgacctttatcaagcattccttgagggcccatgattgattaacttcttggcaggttattaagacttattctttcacactgtattaatgaagctttatattggcatggagctctaaccactgtgtcctttctgcaaaggtatatctatgttgctgacatattggctcatgaaattcatgttttggaaaaacacactaatatgaatttaactcagttgaaggtaaaatatttatttttacatatagacagtaatctattatgctttgcaatgacatagtttttctataagagtaccacacgtagaacaaaatatggatgccagtgtagctattctgggtttttaaatactccctacaactagagaaagctcctgtttccagcgatctcaagaactgaccatgattacatgcagcagcaggttgagagtgatattcatcagatttagggcccattccatgaagtattgatggcagtggaagaattccaataagaattttcacaattgaaaatactaatagatgaattctcaaatgaaggtttatgcacagtgtcagttctttcaataatacatgaaggtagaaattgggttccacaccattattattttcttcctactcaacaacacatattttaggttgattaagaatttcctatcttgctttgattgagttccttgagctaactgatcattgtgcatcttttaaaggaaaaggagttcagtttttaagatagatttttacagagaccgattatcaccctaactttcttaatttcagggaagaagaaaagtggctccaaaccagtttttaatacattccttttaagcaatattggtgttagaaggtggaagcagggcgatgtgtaatttcctcacatgcatagaggcaggaaggttacctctaaattatttaatcaagtttctcatgtcatttagattttgacaatttctcatttggaaggtacttgagctggatacactggtggataatttatctattgatccttcctcgggggacatctgggtaggctgtcatcctaatggccagaagctcttcgtgtatgacccgaacaatcctccctcgtcagaggtttttatattttcagttttttaaacttaattattcaagtccttttgaactaataatacaataaattgtcacagggatgatttgtttagttattttaaagcaataatataataagcttatgtcgtggttttgtaattgcgttaagccaataattggcagaatgttacattgttcaaatactttaagaaaggtaatcttttgatgtattaaattatggtggaaactagtcaaaaggcatttttataaagacatgtgcccttcttgggtggtatactggcaatttttaaaatatctgatttattgtcagctcaccacatgatgtgatatttgttcatgttgaagtagtgtgaaagtaggcacattagtatgaaagtatttctattaaagctgaattgctataataacactaaatcctgtgttggcatggaataactagatggttttaagaaagtactttctttgaagattggagaaagtactttaatttaaacattaaaaagattggtaactgctattttcaacagcatgtccccttaatcagtgtgtcattgtggaaaacagggcttattgatgattgagtgacatgcatgtacggtggtcttatattcatactttgtatcccctgaataggttctccgcatccagaacattctatctgagaagcctacagtgactacagtttatgccaacaatgggtctgttctccaaggaagttctgtagcctcagtgtatgatgggaagctgctcataggcactttataccacagagccttgtattgtgaactctaaattgtacttttggcatgaaagtgcgataacttaacaattaattttctatgaattgctaattctgagggaatttaaccagcaacattgacccagaaatgtatggcatgtgtagttaattttattccagtaaggaacggcccttttagttcttagagcacttttaacaaaaaaggaaaatgaacaggttctttaaaatgccaagcaagggacagaaaagaaagctgctttcgaataaagtgaatacattttgcacaaagtaagcctcacctttgccttccaactgccagaacatggattccactgaaatagagtgaattatatttccttaaaatgtgagtgacctcacttctggcactgtgactactatggctgtttagaactactgataacgtattttgatgttttgtacttacatctttgtttaccattaaaaagttggagttatattaaagactaactaaaatccc

SEQ ID NO: 15748 - DNA, 47420 bp, Homo sapiens
ctttggggttctgtgtgcagcgagcatggtgtccttggcaccagggtttcggcagaggagcctagcgtgggcctacttggactcctccgcgtggggcagctcgggacacccgggcctgcaggagagcggggttctaggctggccccggctctgcagtgcagccgggtgcctgccactcgcggggctctgtcgcagtactcgtgcctggcgcctcccctcagccacagagaccgcagtagctccaaccatcgcacccctaactgggccacgagttctctgattgccagacctgttgtctttgccactcactgttctgagtaattggagagtcgtgtattcactacacgccaaccagagtggtcctgtaaaagcgtaagcctagtgtagatacgcttctgcttaaaactcttgagtggctcccagtgcttttagaacaaaatccaaacgcctttccgaagtcgacaaggcccagcttgattgagcagaagatgtgataggagatgaggagcggggggcttctgcaaaagtgcttcggtcgctcaggcttttggcacattttgcttatgcaacctagttctttctaccttagggccttttcttgggaaagttggggtaaggattcctgacctgtaaaaactcttccccaacttttatcccggtctgtcttgtagatctcaaatgctagtttcctcagagtccttctgtaaccttggttttctctttctacaacgctctgtgtatttcttgcattcatgtagtctgtaatttgtattactctctcattagagtctaagctcttggagggcaagggtcttctctagcttgtggtggtggctccagtccctaatatagtgcctggcacatagaaggtatttaataaattttgttattttattttttcgagacagagtctcactctgctgcctaggctgagtgcagtggtgtgatcgaggcgcactgcagccttgacctcctgggctcaagcgatcctcacctcggcctaccgagtagctgggactacaggcacgcgccactacactcgggtaatttttaattttaatatatgtatatttatatatatatatatatatatatatttttttttttaagacagggtctcactctgtcacccaggctggagttcagtggcgccatctctgctcactgcaacctctgcctcccgggctcaagtgattcccctacctcagcctcccgagtagctgggagtaactgggactacaggcacaggccaccgcgcccggctaatttttttaaaaattttttgtagagaacggggtctcactatgttgcgcaggctggtctggaactcccagactcgatatccttgcgtctcggcccctcacagtgctgggatcacaggtgtgagccaccaccgcctagcaaatacattttgaatgaatgtagtggaccatctgctctgcagtctgacggctaatacaattagggcttggcatggtggtttctatttcctccttgtaaatggccatgcaagtttacaactcttggagaatgaggaggggttcagagaatatctcctgaatctgtagtgtagactgcttctgggagagaacaaataataatggatgagggcattcagccagagaaggtgtgtagtgcccaccagaagaggttcatgccttcataaaattgttaacacaagacatagttccaggtttgtttgtttgtttgagatacagtcttgctctgttgcccaggctggagtgcagtggcgcgatcttggctcactgcaacctctgcctcccaggttcaagcaattctcctgcctcagcctcccaagtagcagggattacaggcacctgccaccatgctggctaattttttgtatttttagtagagacggggtttcgccatgttggccaggctggtctcgaactcctgacctcaggtgatccacctgctttggtctcccaaagtgctgggattataggcgtgagtcaccgtgcctgggctgttccaggttttgaaaagacactgtggtcctggttttagactcagcaacatcacagacaagaaaggaatcctatggattaaagttcttcactataagttttttttttcctccagttcaaatgggtaacgtgccaatgtagtaaaggtttgagggaggcacgtctgacacaggcacatgaacacccagtcatcacgcttatgaactacaaaacgatgactcttaaccttgaagtgacttcagaattgattccacatggaccacaggattagtatttcaggactctaccatatggatcctattgatatgtttgacacctggtccagttttacttcactaaactgattgatataatgtgcatgattgtctaagcctttctaattggatgaaatgccttctccgtccacaaccccctccttctcctcctgcctcagctgaatccaccttttaagccttccttgaacattcagtcagatatggccatttctttctctactccaacatttgttggacacagttttctaatgcacattacagattctgacagttctagatattctgtctgtaaaataaatgttagtacatgagataaagtggattatagcaatgttgttaaactgctggttgcaacccattgatgggtcctgaccagcaagtaaaagtgcagctgggtgccgtggtgcatgccggtagtctagctacttgggaggctgacgtaggaggatcgcttgagtccaggagtttaaggctgtagagtgtaatgatcatgcctgtgaatagccactgtgatccaacctggacagcagggagatcccatctcttaaaaacaataaaaatgaaatagagcatatcagagggccttgttcgtaggaagtcagtattgttttgtggaacatttagttgtatgcgtacatgcaggtatgtgtattgagtctcattttaaagtatatttcttactggggttatcagaaagtttgaaaatcattagactaggggataggtatgctgagattttagtagtagagttttacctggacaaattgtctactttgaacctgactgccggcctgagtttgttcagggaagattgtttctaatctatttgctttttgtttgtttgttttggtgacggagtcttactctgttgcccaggctggagtgcagtggtgcggtctcagctcactgcaacctccgcctcctggattcaagtgattctcctgcctcagcctcctgagtagctgggaatacagacgtgcgccaccatgtctggctaatttttgtatttttagtagagacgagggtttcgccatgttggcaaggctggtcttgaactcctgacctcaggtgatccgcctgccttggcctcccaaagtgctgggattacaggtgtgagccaccgtgcccagcctgtttctcatctatttgtgtaagaattccatgtttacttactctagataacttcaaaagaaaaaaaactctggccaataaaatgccataggaatgtttagggatatgtggagtaggcattctttctaagttttcctgaagatgcaccaatgtttaacaagaaaggaagggcagtgtagaacacctattgctttctgcatggtaagagggatgggtattgggagagcccacacctgctgaggagtgcctttagactttgagcggtggtgtttctctccctcccagaaatagatctctttggggagacaggccatacaagacgtgaatctggtgacattttacttgtttgaagcaaaatttttttagatgatggagggtttttaaaaattgcttttaaaattaaaatttgaatagataagaagtaatcactataaaaaataatgaagcataaggaatgctagtattagctgggtgtggggcactcacttgtagtcccaactactggagaggctgaggcaggaagaatgcttgagcccaggagtttgagtccagcctgggcaacataacgagaccccatcttttaaaaaaaaaaaaaaagaaaaagaatgctaatatcgtgaacatttatgttcccaccacccaatttaagaaaaagaacaatacttttgaagtccactgcgtacccctccttgatcccatctctttcccttctcttttaggagttaactatcctgattccttgctatgctttttagtgtgatccctgaagaacgtatcactccattttgcatagctataaatttcatagaaatggaatcgtattgcatgtgttgtgtgatttgctgtttttgctcatcattatattcctgggattatccatttttaggtttatgtgtgactgtaatttattgtttagatgaaagttttcctggtttgacttgctctatcttcatatttttccttaagctaagggttcagcatacgaaggcagtattggtggcacttctttaacagtaccccatctcttctcctagccttgagggctgcacctagatgaacttgtgaggctcatttgaaccttttggaagcaccgaagcctgctgaagtttccagacatctgtatgaatctgttgtagttttttaatgttatatgctgaatataaaaccaagtaactcctgctggaaacatttacaatatcgattaacaaatactatcagtggctttgacatttttgtcagtttcttgatttttttccccgcttttgtctccccttcccccctccacattttggggcattgtgctgttaatagattttttttctgttcgtttgtttatatacctcctgtttccttctgatgttaatagatttctgacagtcagacttgtccacaagaactcaactggcaaggctgcttttctgtgctaaaactggggagctagtgggcaccatgaagatcttctgcagtcgggccaatccgaccacggggtctgtggagtggctggaggaggatgaacactatgattaccaccaggagattgcaaggtactgggttggtttacagcaggctgcagctgggtggggcacttgatctcaaagcagatgccttgggctccagtctgagcgtgggctaggctgtcacccagtgcttatgatgagggctggtgttggtcctgagcaggtctgctcagccaggtaggtatatgtagcagttaggcaaaatcatgcctgtttggagagtcagacattatgtagcagccttagcagagcctcagcatctgtttaacggagcaaagaaaacccaagcctcagtagtgttgatgaagttgaatcatttacttgccttactgaaatggtgacatgttcatcatatggttaaattcttttgaatgaaaaaaatgaaaatggttttttttttcccttagaagaaatatttaaaagtatgtgagttgttggccaggcgcagtggctcacgcctctaatcctagcactttgggaggccgaggtggccagatcacctgaggtcaggagttcgagaccagcctgaccaacatggagaaaccccgtttctactaaaaatacaaaattagctgggcatggtggctcatgcctgtaatcccagcttacttgagaggctgaggcaggagaatcacttgagcctgggaggcagaggttgtgttgagccgagatcgagccattgcactccagcctgggcaacaagagcgaaactctgtctcaaaaaaaaagtatgtgagttgttatgtagcaatcattaagtgcattcagtgtgccagcattgtgctaaggctgtggataccagatgaagaagatcctgttctcatcttcaaggaccatgcagttttgtggaagagacaggcacatacaaaattacagcacaaaagccaggcacggtggctcatgcccgtaatcccagcactttgggaggcaaagggcgggcgggcgggcggtggagggggtggtggcggctgatcacttgagggtcaggagttcgagaccagcctggccaacacggtgaaaccccgtctctataaaaaaaaattagctgggagtggtggtgggcgcctgtaatcccaggtactcgggaggctgaggcaggaaaatcacttgaactcgggaggtggaggttgcagtgagccaaggttgtgccactgcactccagcctgggtaacagagtgagactctgtctcaaaaaaaaaaaaaaaaaaattacagcacagtgagataaaggcacaagaggtcatggaagcagcaagaaccagctgaacttggggtgggaggtaatgtttgaataatttctcagttctaaaggaagagaaggtgaagtttgagcagcagggattacaggtaagctttcagatgagccagattgtggctgggtgcagtggcctacacctgtagtcccagctacttgggaggccaaggcaggaggattgcttatgcccacgagttcaacatagtaaaacactgtctcacaaacaaacaaagaccaaaaacaggctgggcacagtggctcatgcctgtaatcccagcactttgggagaccaaggcgggcggatcacctgaggtcgggagttcgagaccagcctgaccaacatggagaaaccctgtctctactaaaaatacaaaattagccaggtgtggtggcgcatgcatgcctgtaatcccagctgctcgggaggctgaggcaggagaatcacttgaacctgggaggcggaggttgccatgagccgagatcgtgccattgcattccagcctgggcaacaagagctaaactctgtctcaaaaaaaaaaaaagaaaaaaaaccacacacacacagatgggctattctggggagcagctagcagtttagtgcagctggagtgtggtacaaaagtactatggtaagagaggctgccgaaagcatacgcggggtcattttgtaaagggtggtagcaaaatgcaggaagaggaacatgagtttaagtccaagctttgccacttctttactctcttggccaagttacttctctgagccttaatataaaataatatatacttcaatatagtaatacattatctcacagtataatacaattatcttagaattgtttgatgattaaatgtaatacagtatctggtgcagaattagggcttaaaatatttacttttttttctttttttttttttgagacagagtctcgctctgtttcccaggctaaagtgcagtggcacgatctctgctcactgcaagctccgcctcctgggttcacgccattctcccgcctcagcctcttgagtagctgggactacaggtgcccgctgccacgcccggctaattttttgtatttttaatagagacggggtttcaccgtgttagccaggatgatcttgatctcctgaccttgtgatccgcccgcctcggcctcccaaagagctgggattacaggcgtgagccactgcacctgcccaggtcttaaaatatttctaaacattttggacattattttcttgttttattgttcagatggagtcttactctgttgccttggctggagtgcagtggcgcagtctcggctcactgcaatctctgcctcccaggttcaagggattctcttgcctcagcctcttaggtaactgggattacaggcatctgccaccacacctggctaatatttgtgtttttagtagagacttggtttcacctgttggccaggctggtcttgaacttctgacctcaggtgatccacctgcctctgcctcccaaagtgctgggattacaggtgtgagccacagtgtcaggcctggacgttattttctgagtgatatattaaacaggagagaaagaggattggattgcattttggaacactcactgagagcggtgtggagaggagagcatttggggatattgtagtcccagagctgcatagtcccagaggagacagctcgggggaacttgagtttggtaactcactggatatgatggagggagagagaagattcaagaagcaccaagacttctggttagaatgacaaagtggatggggcctgcaagggaggaatgggtggtgtggggaggggaacacgatggagattaggcgtttaggtttggacatccacatagagatgccaatggcagatagaattttgggtctggagacagaatttgtagttgttggaactgaaactgggagaggttgcagtctctcaagggggtgtggaatgtgaaaggtagagggctgaagaaggaatcccggaatagctgaggaggcaaagaagggcaagggagatagccagcatggaaaggaagaaagagggagtgtgtctagcaaggtcagaggcactgggaagtcccagatactgatgactgacatcagctgcaggagtgagctggtggtggttaccgagagtgatgtcagtggagtggtgggcagtaagtgtgaagaggccaggaaggtggtgagtgagatgccttttaaatagtgagcagaggtagaaaggactacatttcagctaagcatccatagctggcttcagatataaaaccttgatgtgccattaaaaaaaaaaaaaaaagaacccccttctttcagtgcaccgctcttcaaagtgtggaatgtggaccacctgtggcacaattgcctggagcacattagcccagccttctcaataagagtgagagtgtgtgtgtgtgtgtgtgtgtgtgtgtgttctgggactctgcatttcaggtaagctttctagtgattctagtgttgacccaaggctggagggcctctgttttaatgtgagctccttagctgtccccttgaattcccagaaagcgtggcagggcctgcctagttctgggtgctcatcccgaccccgcctgagggttttcagtgtgtgaattactgcagtaggaaatatggagaagtgattctcctccctttactacggtattggtgaactctttagttttccctgatgatgttaagtgaacgtgcccagtggggtacctgtcacatatacagtgggtgtatgtgagtgcttctctttccccggctgctctccctaataccgcatcagtggttatctccaggcagagatgtaggccaggttaggtcaagtattaggcagattgagtctgagtttttcctgaggaggaaaatgtgtagtgtatagcaagatcaagatgctagtggctgtggaattactgtgacagggctaactgccgagaccagctcggtcgtggagaccctaacccagtggcgctagaggaattaaagacacacacacagaaatatagagtgcagagtgggaattggggggctgacagccttcagagctgacagccacgaacagaactttacctacatatttattgacagcaagccagtgataagcattgttcctatagattatagattaaaacgggaaacaaagggatgggctctggctagttatttgcagcaggaacatgtccttaaggcacagatcactcatgctattgtttgtggttcaggaacgccttaagcgaaagccgccctgggtgggccaggtattccttgccctcattccagtaaacccacgaccttcagtgtgggcatcatagccatcaacgagcatgtcacagtgctgcagagatttgtttatgaccagttttggggcctgtttttggccagatttgggggcctgttcccagcagctaactactggagcatttttaggtctgagaacatctttctctgagacttttttctgcagcactagagaataacagcttgaaactctattaaaataaagtggccaggtgcagcgacggatgcttgtattgtagttctgctgaggcaagaggatctcttgagctaaggagttcaaggctgcagtgcccaatgattgaggctgttcatagccactgcactacagcctgggtgacataacgagaccctgtttctaaaaataaacaaaaaaataggccaggcgcagtagctcacacctgtaatcccagcactttaggaggccaaggtgggcggatcagttgaggtcaggagttcgagaacagcctggccaacatagtgaaaccccatctctaatgtaaatacaaaaattagccaggcgtggtggtgagcacctgtaatcccagctacctgggaggctgaggcatgagaatcacttgaacttgggaggcagaggttgcagtgagctgagattgcaccactgtactccagcctgggtgatggggtgagaccctgtctcaaaaaaaaaaaaataaataaagataaaagacaaccaaaaaatagtttaaaatagatgacacgtttgttctatctgtttagcaatgtgtttatatatgtgaatactcttgtgtgttgatgtgtatcatgcaaaggttactgacttttttgttttttaggtcatcttatgcagatatgctacatgacaaagacagagtaagtgtaaaaggaaactattatcttgatgtggggtgttttgaagtcttggattacaagaaggttaagaatccctgggggtcatgatgttaaatgatactgagaggcgtatggtgtagaagtcaggaaatcagttgggagactgggtcctacttctggctctatttttgttgtttaatctcccagctttatcaagatagaactgacaaataaaaatggtctatgtttatggtaatacaatgtgatgaatatatgtgtatggtgtaaaatgattgaatcaagctaattaacaaatctaccgcctcatacttttttgtgtgtggtgagaacatttaagatctactcgcttagtaatttttaagtgtacattattaactatagctcacaatgccgtacagcagatctccacaacttattcatcctatctgactgaaacatcagatcctctcccttagcaggtaccattctctgggcttctgagttcaacatttttttttttttttgagacagaatctcgctctgtcactcaggctagagtacaggggcgagatctcggctcactgcagcctcagtctcccgagttcaagcgattctcctgcctcaacctgcctaagtgttgggattgtacctagtattgggataatactattattatactattatacctagtattgggattataacttgggattacaggtgcgtgccatgacacctggccttcactgtagttttaatttccatttttaattttaattttatttttttgagactgggtctctgttgcccagtgcagtggtgtgatctcggctgcactgcagcctagacttcttgggcttaagcgatcccccaacctcagccttcccagtagctgggactacaggcatgccaccatgcctggctaatttttgtatgttttgtagaggcagagtttcgctgtattgcccaggctggtcttgatcccctgaggtcaagtgatccacccgccttggtctcccaaagtgctgggattatgggcatgagctactgcgcccggccatcgtgtgcttgtttaccatgtgtatatctttgttctagtctagggttatgaacataggtgtgattcttgatagacactgccacattgccttcaaaaagggttccagattcactgtaatatcttcaaaactgggtcattaaaaagtgacagctaatttaatggcatcgttaaagtgaaggctgtgccatccctggtttacaattgaggacgctgttcatcaattttttttaacttaaaaaataaataaaacaaggccaggcacggtggctcatgcctgtaatcccagcactttgggaagccgaggcaggcagatcacggggtcaggagatcgagaccatcctggctaacatggtgaaaccccgtccctactaaaaatacaaaaaaaagccgagcgtggtggcgggcagggcctgtaatcccagctactcaggaggctgatgcgggagaatggcgtgaatctgggaggcggagcttgcagtgagccgagattgcaccactgcactccagcctgggcgacagggagactccgtctcaaaaaaaaaaattgtggtaaaaacacataacataaacggtcatactgattgtatctaagacataaatgcacttactttgacaatgaaatagttctatatttctgtgaaaaattatttcacccagactaaacatttttgtgctttacctcagaggcaacgtcatttcttttttttcttttttctttctttctttttttttttttaacaagaatgagtctccctctgttgccaggctttagtgcagtggtgtgatcttagctcactgcaacctccacctcccgagttcaagtgattctcctgccttagcctcccaagtagctggggttacaggcatgcgccaccatgcctggctaattttttgtatctttagtagagatggggtttcaccatgttggccaggttggtctccaactcctgacctcaagtgatccacccgcctcagcctcccaaagtgctgggattacagatgtgagtcactgcacccggcctggtaattctaaagaatattcagttctagatattttctaattccagtctgatttagtcttttgcctatcagtttagaagtgtgtttcttaatgtatgaaaaattttttttcttcagttgtgtttctgatattaagatttttgacttgttttgcattgtggtcagaggatatcacccttttgatgccagttctgtattagctgtctaatgttatttaacaaattaccttaaattttaatagcctcttaatatttcttactaacttggcaggtcatcagtctatttaaaagatttgcacatattttttccatcatctttagttattttcaacagaagggtcactgtgcctattgagtcagaccgttatagatgaaagatgtatgtgtttactaaagacagaagtaaaaatcttcaagatgcaaagaagttattttctgatggggaaaatactttttagtgaagctctctgagttagagtcggtaaaggaaaacaagccatacatattgcagcagagcggctttaacacaaggagctggctacccagctgtgggagggctagaaagcaaatgggaacgctgagtaacctaacagtagagattgcagggagcagttaccttgcctagggctgagaaactaaacgagaagattaggatttccagaagccacaagcattgaggagagatcctgtggaccactgtccaagtacggctgcagctctgaggggcccaaggagctggttatgggatcattgggaaaagttggagtctgcaatcaactgcccctaccgagaggaccctgatgagaacagcagcatgcagaaaggagcaagcctgctctgtcctcctaccttccagtcgccctcttggtcccccttttggctgtacctaacagttggaaaaaggagaacatggtttgcagggctctggcatcacttagtagaggatagaagagtgagtgtggagcagggacagtcgcttaataaagggcaaggggctgactcacaagacctgcccaactcagccagagctgttctgccaggggccagaaaggccatagggccctgacttgcactgccactgccagctgtgactctagaactttgcaaagcacctttccacttacttataataactggtagtaagtgacggccatgtcttccttagaatgtaaaatactaccaaggtatccgggctgccgtgagcagggtgaaggacagaggacagaaggccttggttctcgacattggcactggcacgggactcttgtcaatgatggcggtcacagcaggtgccgacttctgctatgccatcgaggtaagccattcccttcaggtgtgtgtcctgcatcttgcatgggaaatcccctatgctcttgcactttccccgtctgttccttcacaaacattcatggagtgctcactctgtgccaagcacagagccaggctctgagcgtatagagatgagtcagacacagttccttcctccaggagctaattttctcctctgtcagcctaggctgcacatcagaatcactaggagctttagaaaatacttacaggctgggcacagtggctcacgcctgtaatcccagcacttcgggagggtgaggcaagacaattgcttgagcccaggagtttgagaccagcctgggcaacatagtgagatcccatctctacagaaaaacttttaaatattagctgggcatggtggcatgtgcctgtgttccagctattcttgaggctgagatgggaagatctcttgagcccggaaagtcaaggctgcagtgagccatgatttggacttcatgtaagaaagcaaaaaattacttctaccttgtttaagccagttattgtgggactttgttgtttccaactaatcagtatatgaactcagttttgtaggggaaagtatttaaatacatgcccccacaccaccacactccagcctgggtgacagagtgagactttatctcaaaaaaatcaaaacgaaacaaaggctgggcacagtgtctcacccctgtaatcccagcactttgggaggccgaggcttggatcatgaggtcaggagttcaagaccagcctgaccaacatggtgaaactccatctttactaaaaatacaaaaattagccgggtgtggtgatgcgcgcctgtaatcccagctactcaggaggctgaggcgagagaatcgcttgaacccaggaggcagaggttacagtgagccgagattgcgccactgcactccagcctgggcgacagagtgagactccatctcaaaacaaaacaaaacaaaaaaaccttatgcctagtccccagccctaacagattttgatttaacttttctggggtgaggcctgagccttgggacttgggaatgtgcggcaaggttgagaaccactaccttaaatgtccctatggagtcagctctcttatgtttaccaatttgtcatttctttaataaaacattaaacagcttgagcccacagagcaagaaaaattaaaaaccaaacaaaattaaaaattaaacatgttatttttctcataaaacaaataatgcatattattataggaaatttggtaaataccaaataaaaatagtatgttgacccaaagttaagtactgttaacattttggtgtatattcttccaagttttgggggcaggcagggagcatgtatataaatactttccctacaaaattgggttcatgtagtgattgagttggaaataacaaagcctcaaaatcactgtggtttaaggtagagtagttttttgctatctttttcgtggcgtgatctctattcaccgcaacctccgcctcctgggttcaagcaattctcttttctcagcctcccaaatagctgggattacaggtatgtaccactgcacctggctaatttttatatttttagtagagatagggtttcgccatgttggccaggctggtcttgaattcctgatctcaggggatccccccacctcagcctcccaaagtgttgggattacaggtgtgaatcactgcgccctgccttgttcctcttttttaaaagtaagaataactttcccaggaatttctattatagcaaacctctccttgggtaccatcggctagaatgaggttaaatctcatttcttatctctggcaagagggattcagttactcttagctcagacaagtgcaccactgcaaaggtcagttccccacgctgcaccctcacctgatttcaggggagaggaggacacagaatggatgtcgggaggtcatcttcagtgtccactcctggtagtgttttgggtgagatcttgagcttcttgatgggctgaggagaaggaggtgtgaaggtaccagcttgcaggttcagggagaggtgactgatgagtcagaaggcagcaggggtgagggacgacactggctttggatattgtcagggtggaggcaaagtgattggtgagaactagggtttaaggccctcaaaccacatctaaaaacatcaaggcaaatcctagaaataatttgaaatagatgatgaagatttttctaggagaacatgtgtgtgtattccatgtaaatactgcgcgctaatcaattgcacaactggagctgctcacgtaagtactctttacgaaaggatacagcatttgtcccttgattatagtaaaaaatatagtattcatggtagaaaatgtgggaaatacagaaaaggatttagaaaaaaggaaaatcttatcaggaacagtctcggtatcattttgtggtttccacttcgtgtgtagggccacacgtgagtctgtttgttttacatgctagagctcttggggctgtggaatctagactggataagttgaaaacaaagagttggaggtgcttatttatgttcagggaaactcgaagagttcagggaagacttctggatgggggattcatgctgccctgggaagtggggtttgatttggcaggtggggccaggatagggaaggctcagtgatcatgagatcattgtggctggagtgttggttgttgggggaatgggggaggaagactgggaaggtaagggagggcctccaaagcagtagtttccccttatctatggtttcacttttcgtgatttcagttacctgtggtcaactgaggtccaaaaatactaaatggagccaggtgcggtggctcacgcctgtaatcccagcactttgggtggctgagacaggtggaaaccttgagtcccagagttggagaccagcctgggcaacatggcaaaaccccgcctctacaaaaagtagctgggcatggtgatctacgcctgtagtcccagctacttgggagattgaggtgggaaattgcttgagcctgggaggtggaagctgcagtgatcatgccactggactccagcctggacaatagagtgagacccttctcaaaaaaaaaaaaaagaaaaattaaatggaaaattccagaaattatttataagttgtaagttgtgtaccattctgagtattattacataattgttctatttttagttattgttaatttataaattattatttatatttattattgtgcctaatttataaattaaacctggtcataggtaagcttggaggctgaagcagctccactgtgaatgctaatcctccacgctgacttctgaccaaccccagcttcaggaatgcctctaaaatttccgctctcatgcactttgatgtaaatcctgccctcaggtcagaacaactttgatgttatcataaatacatacttaccgtaaatcctgcccttcgtcaaattccctgtggtatgtaagccctgcgtctgagccataacagtgtgggggcccagtttctcactgcccgagacaaggcttctgtttgtatgtctctataaagtgtgtctttctgagaagctggatttgccagtctttcctcagcctctcagctcccgtggcctgttggggtaggtttgcatagagctgcccaccatggaacagtatgtatgtatagcaaaaaaaaaaaaaaaaaaaaaatggtatacataagggtcagtactgtctgaggtttcaagcatccaccaagggtcttaaaatgtatcccccatggacaagaggcactgctgcaccataagaaaatagaggctgtgttctgccaacagtggggatttgggacaattttgagcccagaggatgacctacttactcacacctacagtctgctctcctctggagggcacagcacgcctcccaggttcgtgaggcaagtccctttcctggctttttggcgtcctcttgtgcggtactgacacctactgctcttactaagtagtgcagcctcctcaggatccccggcatccccgctgtgcctggcacggaatgagagtccctaatcacaagttaaagccagctgaatctcagccctttttcatgatgcacatttggagaataaagtatttaagttacatatcttaggaccagaatcaaggaatagcttgctcaccttaaaggtcagactactgtttaatttattgctcatttttccttgggtttcggctctattttctaggttttcaagcctatggctgatgctgctgtgaagattgtggagaaaaatggctttagtgataagattaaggttatcaacaagcattccaccgaggtgactgtaggtccaggtgagatttacacaccctgtgttgaaagctttgcttgctcttgtgtgagagaggaaaagggttattccagttacctggaacaaatccaggtcatagcatagaagtgggacctctctgtgtggagctctgacagtaaggacttggtttctcttgatgtttattttcctgctagttaaaactagtcaacaaggagtagactagagctagtcaggtccagcaatggagacgcaaacaaaacctacatttgctttaagcaaattggaattcttatggggctcaactcttgagtttcaactaccaataattacgccttggataaacctcattggctacgatactgccactgctcaaagctcaactctgagtttcatcaggcagaaagtacttagttcttttatttatttatttttttgagagagagtctcactctgtcgcccaggctggagtgcagtggcgctatcttgcctcactgcaagctctgcctcctgggttcacccatcctggctaacacggtgaaactctatctctactaaaaatacaaaaaattagccaggcatggtggtgggcacctgtagtcccagctactggagaggctgaggcaggagaatggcgagagtagttctgacattctgcttctgcatacaacatgaacaattttcctgtatagcattgtctcttaaggtttccagaatatgtatatgtacacacacacacacacacacacatattttttttttgagacggaatctcactgtgtcacccaggctgcattgcagtggtgcaatcttggctcactgcatcctccacctcctgggtacaagtgattctcctgcctcagcctcccaagtagcggtgattacaggtgcctgccaccacacctggctgctttttgtatttttagcagagacggggtttcaccatgttggccaggctggtcttgaacccctgacctcaggtgatccgcctgcctcagcctcccaaagtgctaggattataagcgtgagccaccatgcctggcctccagaatattttttatagtctagaactttgtttcagtctttgaaaatttcacatgccactgacacttagagaacatagttgaaagatttgcaaaggaaaaactgtggtgaagttatggataacaccatgggttttttctaattttttgtggagatagggtcttactatgttgcccaggctggactcaaactcttatgctaaagtgatcctcccatctcagcgacccaagtacctgggactacaggtgtgcactactgcacctggctttttcaccacggttttggagaatgcagtatcattctgaattgaagcttctacctaaggtcaacattattctcccatttaacaatttttttttaatggagaatctgaaacatgtacaaaagaagtgggtactatcttatttatttatttatttgagacagagtctcactctgttgcccaggctggagtgcaatggcaggatctcagctcactgcaacctctgcctcccatgttcaagcgattctcctgcttcagcctcatgagtagctgggattacaggcgtgcaccaccatgcctggctaatttttgtatttttagtggagacggggtttcaccgtgttggccaggctagtcccgaactcctgacctcaggtgaccagcctgcctcggcctccgaaagtgctgggattacaggtgtgagccaccgcgcccggcctatcttttttatttttaaaatatacaatagagtgctcaaatcattccatttacaatcaacgttattgaagtatgatttacattaaatgaatatccattttcattatggatatttgacaaatataaacacacttgtaaccaccatcaccataatgaagataatagaacatctccatcatgcccaaagagattcctcataaccctttctatcagtccccccatatcctggtcctaggcacccactcatagacttcattatagattagatttgcctgtctaggatttcaaggaagtggaatcaaagaagtgtggactcttctgtgtgtgtgctctcttttttatagcgtgatgctggtaagattcttccacactgttcatgtcttgggggtccgttcttttgtgttactgagcagcactctattagatagatgtaccataacttgtttatctctctacctgttgatggacagggatttcttggataggtctttagattcactgatcttttcttttgcagcatctaatatgctgttaagtatatttagtaaacttttcatttctctttctttgttgttcttttttttttttttttgagacaggatcttgacctgtcccccaggctggagtgcaggggtgtgagcatggcttattgcagctttgacctcctgggctcaagcagtcctcctgcttcagcctcctgtgtagctgggaccacaggctcatgccaccatgcctggctaacttaaaaaaaatttttttttgtagagatgggatctcagtttgttgcttaggctggtctcaaactcctgggctcaagcgattctcccacctcagcatcccaaagtcctaggattacaggcgtgggccgctgtgcctggcctcatttttgatattgtattttttaatctctgaaagttccacttgattctttttcataacttccatttttctcatgttcatagttttctataagcacatttattttagctttttgaacatccttatcttctgttcccaccatctttgttttttctgggtttgttctcttgactcatttttatccttattctgggtcacattttccttcttcacatgtctaaccatttttgtttggatgctgtggctatttggaattccccattgttgagtgctagacttcgttggttttgctttttaaactttggcatgcagttgggttacttgcagttcagattgatcctttcagggcttgtttaagctttctttggagtggggttagagtagctttaagtcaggccttctcaacagtagtgctgtgacgttttggcattctccaactatgtgacattttgataattctttgttgtggaccctgtcctttgcattgtaggatgtttagcagtgtccctggcctcttcccagtggatgtcagtagcactcccctcctcccaccattcttgccaactaaaaatgtctccagactgccacgtcttccttggtctcgagtgtgtaaaattgccacctgttgagaaccactgctctaaggctgtttagccagacagttactgtaacctttctggagtgtctgctgagagctctaggtgctcagcagggtttcccttgtctggctgatcagaacttgaatgtttcccaggcctctgagagctccggagattgttatcactcatgcaacctttgctcggcttcacagagtattaccctgtgtgtgtgtgaatgtattaacacagaccctagaggaaccctgtgcagcattctgaaggctttttttctgtgtaatttcctctctgattctctgcctggcaagttccagctgcttccacttccctgaactcgtttcctgtctgtttaactcagcaagactgccgtgctctgtgtcacctcttaccctatactgtggtctggaaagggtctcctggctgatagccagagcagggtaagggttacttggtttgtttcccttcttagggagcaaactgtgttgcctcttgctcaacatctgaaaacacttgtttcatatattttgcccagttttctagttgataacagccggagggtaagcctgatcccacttattccactatggccagagtggagattgattcatttatttatttttttttgagacagtctcactctgttgcctaggctggagtacagtgatgcgaacacagctcactgcagcctcgacttctgggctcaagtgatcctcctgcctcagcctcctgagtagctgggaccacaggcaggcgccaccatacccaactaatttttttgtttttttaaatttttattagaaactaagtcttgcggctgggtgcagtggcttatgcctgtaatcctagcactttgggaggccgaggctggcggatcacctgaggttgggagtagcaaccagcctgaccaacttggagaaacctgtctctactaaaaatacaaaattagtcaggtgtggtggtgcatgcctgtaatcccagctactgaggagattgaggcaggagaattgcttgaacctgggaggcaaaggttgcggtgagccgagattgcgctattgcacttcagcctgggcaacaagagcaaaattctggctcaaaaaaaaaaaaaaagaaaagaaaagaaactaggtctcgctttgtttcacaggctggtcttgaacgccaggcctcacacagtccttctgcctcagcctcccaaagtgctgggatcacagatgggagccactgtacctggcgagatcatttattcttgaaaatttatccattttgacggcagggagactgatctgcagggcagccttggccatgaagtatgctgactctgcctccaggcagcattgttcacacacacctcagcttaggccaggcccctcatatgatttcttattaaaaaaaaaaattttttttagatagagtggctctgtcgcccaggctggagtgcagtggcatgacctcggctcactgcaacctccacctcccggattcaagtgatccttccacgtcagcctcctaagtagctgatattacaggcatgcaccaccacctggctaatttttgtatttttagtagagatggggtttcactatgttggccaagctggtcttgaactcatgacctcaagcgatctgcctgccttggcctcccaaaatgctgggattacaggcatgaaccaccacgcctggccaatttcgtaatacttttcttcatagcgcttaccactgcaatcattaaatcattatgtagttatgtatttaatgtctgtatccccacccagctgaggcatcctgaggtcatgcactgcgtgggttgtattaactattccattccgttatttgctccgggcctgtcatgtaaaggagttaggtaatttttgtaaagtgagtagattgtcagttgtgcttcatccataatcccttgtaaatgtgactttgtttccgatcctcagcctgacaagtggcttcctcattgccaagttgggtggtctttcctctgcttttcctctctaaccactgccgctttggtacttctgccattccttccttcttgaaactctccctggaccttagtgacatctcttcatcttggttctcctgtgttgctttctttctgctccagatgtatactttccaaggttctgctctcagccctttttaaaagtggcatctgaagttgcctgttccccagagctgggttacatgctgaggcttgtggagagccaacccagggagcagcgtgtgttcatccgtccattttgttcatttggaaagggcttaggaagctcctggggtggctacctgcttcagactcccccaccccgtgcccttatacattagcagtcacactcaaaataccaggccctcaagaagtacttgttaaaatgcactggaccataaagcttgaattttttttttttaatttttattattttttgagacagtctcactgtatcacccaagatggagtatggtggggcaatttcagctcactacaacatctgcctcccgggttcaggcaattctcatgcctcagcctcctgagtagctgggactacaggcgcgtgctactacacccggctaatttttgtatttttagtagagacaaggtttcaccacattggccaggctggtatcgaactcctggcctcaagtgatcagcccagcttggcctctcaaagtgctggaattacaggtgtgagtcactgtgcctggctcttgatttttattttaatgaagcaatttggactataaagcattttaagttatataattggtttaaacattcaggagatagaattggcagagtgggtgatcagtgggttgtagggtgacagaaatcaataatttatctaatgtgtgttgactgttacggggcactagaccttgtgggtgctggggtacagtagtggacaggcagtcagcggtcctgctgtcctggaactagtaaatgatgcccagattcctggactatgtgactcattgattgattgaggcagaaaccctggagggaggagcaggcgtgttagctggggtgggtgggatgagttttggacagtgtattccagttggagtttgatgtgacatcagagaggatgggcagggcttctcgggagggtggtctctgtggcagaagacagaagtttcttcttaagctcctccacgtgatactgtcatggagcacaggtgagcttcataggaagtgtgcttttttttttttatcttcatcatcccgaccaccaccacatgagacagagcccattcacccgttttactgatgaggcaactgatggtcagaacggagggctcagggataggaagtgagatccaggccaggctccagcctcgagctcgaggttcacgctgtctctgttgtgctcttctatcagctgctctctttcttttttttttttttttgaaatggagtctcactctggcccagattagagtgcagtggcgtgatctcggctcactgcaacctctgcctcccaggtttaagtgattctcctgcctcagcctctcaagtagctgggattacaggcacccatcaccacgcctggctaatttttgtattcttagtagagacagggtttcaccacgttggccaggttggtttcaaacttctgacctcaggtgatctgcccatctcagcctcccaaagtgctgggattacaggcgggagccaccgcgcccggcccctgtcagctgctttcatgcttctcttttccttgtgtcatctgtgagacttgtgctctgtgtaggggaaatgagtgggctttgtcagattataattcatgaggcattaaaagtgtttacagttaattctccctgatgaatagccccttccaaagtctattttggctcttggctcattaaaaattataattgtagaagtagcagtacattactgaggtttagaaaacagttaacagaagatccctcccaaatcctactcttctctaaaatcctactgtcctaaaacaactgttatttaagagattgtttggtgacaaggcgctttcattaagggaatttgccatagtgatctggggattctaagtcatggatctcaattttggctgccagagcctaactcacagtagctggaagatcatcagagaaccttgttgtcttgctttggctttccctccctctccctgcaacctagaagtatttgacataccagcattctgtttttgcttttcaaataatttttctaatttagtggttaatagtttaattgttaatttatatctctctaattgctaatagggatgaaaaagttttcataagtttgatttctgttttgaattttctgtttatatttttacctggtttctttttgggtgtgtgttttttttgtttgtttgagacagagtctcactctgtcgcgcaggctggatcactctgtcgcgcaggctggagtacagtggcacaatttcggctcactgcaacctctgcctcccaggttcaagtgattctcatgcctcagcctcctgggtagctggggttacaggcgtgtgccatcacacctggctaatttttgtatttttagtagagatggggtttcgccatgatggccaggctggtcttgaactcctggcttcaagtgatcctcctgccttggcctcccaaagtgctaggattacaggcgtgagccaccatgcctggctaatttttgtattttttgtggaaatggggttttgtcatgtttcccaggctgatctcaaactcctgaactcaatccattgggtatttatagttttcttatcattttttgcagtctccctcccaatattaagcatacagaatagctgtaagagcagtacagtaaacacttatgatcccttaccctagatttatcaattagcgttttgtcatacatttacatatggattttttttttttcctgaaccattggcaagtcagttgcagacatcctgacacttctgaatacctcagcatgtatatgtgcttttagcgtgatggccccttaaccacttatctttcccatatttgctgtaaatatttttcctagtctgttgcttatgtccaactctgttttcttgtgtttttcagagggtgacatgccatgccgtgccaacatcctggtcacagagttgtttgacacagagctgatcggggagggggcgctgccctcctatgagcacgcacacaggcatctcgtggaggtagtagacggagggctccctcagacgtgtctgtggtctcagccagctcacatagcactcactcatgcaccgtgtcccacacagcccaagccctcagcacctctgatacacctgggacacccctccattcctgggggggctctggttctcctcacttaaaactttcatgtcccttgaatgccaaatcttaataggttagagttgaaaagcaagaaactatattcaaattcagttaagttcagcaaatattctcaggaaggcgatgcttgagctgtcagtcttgagaagtgatcaggtgttggcctggcagatggaatatttctggtagaggagagcagcacgtgctagacgtgagactgaatcggtgcggtggctccggagcctgctttggattttgtgctgtgtgggaggcaggagagatgggcttagcaactgaggctagagagctgggcaggggctagatggagtggggtttgggggccatgcccagagggtagctgtcattagaaggtggggtggcatcacaggagggtttgaagcagaggattgacagcagacttatgcaggcagatgtgtggagggcagttggggtatagggctggaggttgcgggtgggttaaaaggctgtggaatcgtccagacgctgtggtacagtgggcctcagctaaggctgtagacagaggcctgataggtggtcccaggagttggtggtcccttaggtgtagagatatcgatgctagggtttgggcacctggattggatggtggtgcttcctgttgacggggagtgcaggaagaggggtagccttgggaaggttgggaagtggtgagggcgattcttctggtttacacagagtttgagctctctaaaggtcagccaagcaaagaggcccagagatgcatggatttactcagtgaagagggcatggttgaggtcactgtggagagtgtggagggagacagtccggaccagggagtccccttgtgaggtggggcggaggaagcacagcctggggaaggcagcgggagtgagtccagttagagcagcatttgtctaccagagcaaggttgggagatgcttcgcagggaggccagttattctgctagccttttaccatgcccagagcaacccctacagcagagaatcatttggcccaagaggccagtggtgtcctggtggtgaaagccatgtgggtagcagctgtgagtgtgctcttgccgggtccctattgcctggtgcatggaggacgtggagtggatgcaagaggtaggaggagagccggacaaggagccggagccggagccacagccctaggggctgagtgtgcagcagtgcccagcggcgctagagggctgggcagctgagggggcaccgtggtccacagggctttgccacaaggaggctcttgttttggtgctgggcaggagcggcactgaagggacactgagcccagagccaggatcaccacccagcagcaggacgtgaagcatttaagagtgccaggtagccaggaacttagctgacagaagtcattttaggcacagtgtgtgttctttttgaaatgtagtaccctttttttcccttttccaagggcatagggctgaaaacagttcactattctaatagtataaggtgttgggcattactgaaccaacctaatgttaaggaataaacctcttttgatcaatgggaattactgtgggtctaagcatctgatttttgtttggttttgtttttaatataaacttaggaaaattgtgaggccgtgccccacagagccaccgtctatgcacagctggtggagtccgggaggatgtggtcgtggaacaagctatttcccatccacgtgcagaccagcctcggagagcaggtcatcgtccctcccgttgacgtggagagctgccctggcgcaccctctgtctgtgacattcagctgaaccaggtgtcaccagccgactttacagtcctcagcgatgtgctgcccatgttcaggtaccaaggagccaccataggtgatggcgctttgagacatttgatggaagttgggtattaggaggttctttttgagtgggaaggaaatctagctgctgtcacctgcctcgaaggcaagagtcctttgcagccaaatgtcattgccagtgaagtcactgtaaaagcttaaaaaatggagtgtgtgaggttaaactctgcttacattcttgaatattattcctcagcatagacttcagcaagcaagtcagtagctcagcagcctgccatagcaggcggtttgaacctctgacatctggccgagctcaggtggttctctcgtggtgggacattgaaatggaccctgaggggaagatcaagtgcaccatggcccccttctgggcacactcagacccagaggagatgcaggtaagaggcaggagcctagcatgtgccctgtcaggaaacttgtccactgctgttcatgggaaagtaacagttgagccttggacccaggagaatttagagacaggagggctgtgtcagaatcaaagacaaaagtttttaaaaagcaagcaaaggctagctgtagtaacgtagccttcccagggtgagctcatggtgagcactcatggacacagtgaggaacagagaagttggctttcctctcccgcctcatcatgatgcagccacccttagataccacccctcatcccctgagtaatcccagggggctcccatcagcttggaatagagaactacagcctcaccttctgtggcctcaaaatctcctttctccaccccgatagaaagtaggcagaggacatgaaacacagaaaaggaaatacagatgatggggatagttgcccactgtccctcataataagagaaatgcagttttagctgctcacagcacctatgctcccagcctctcaggagactgaggcaggagggttgcttgaacccaggaagttgaggctgcagtgagtcgggactgcattactgcactcccgcctgggcaataagatgagaacctgtctctaaaaaaaaaaaaaaagagaaatgcaactttaaactgcaatgagatctcattttcacctactagtgaataaagtttaaacagtttgcaagcacactgttggggaagctcagggaaaaagcaggaaagcgagtcatcagaacgtttcaggtagaaagcaatgctgctttcagacatggggctgtggctggatttgcgtctgtgcagaatagatgtgtgcagccctggtttagtagaaaaaggccaacctaaaggccactagcagggatcaagtccattatcctttcagtgggtgaggtagctctctgtgcactgatgtgggacaagcttcagggtggattattacctgacacaaaaataaaggtgcagaatggtgtgttgtgtggcagcactggtgttagtaaaaataggaatatatgtgtttgtgagtggatagtcatgtgtggtgtacatataaggaggtctttggaagaattcccagaaattcgtaaaactgactgcatctgggaatggggactggaggttaggggtggaaaggaaacatattttttactatgcgtccttgtataccttttgaattttctctcatgtgcttgtgttatttacacccccatccaccctctctcactctcacactcaaaggaaaagaaagtgggaaaggtgtgtcggaattgcctgatgggttcttcccacccactgttcagacaaaaccaattcgctgacaccatggcattgcaataaagactttaattgacacgaagccagccacaccacgtgggggagagatttgttactcaaatcagtctccctgaaaattcacaggctacggttttttgtttgtttgttttgagatggagtttcgttcttgttggtcaggctggagtgcaatggcgcgatctcagctcactgcaacctctacctcccgggttcaagcaattctcctgcctcagccccctgagtagctgggattacgggcatgcgccaccatgcctggctaattttgtatttttagtagagatggggtttctccacgttggccaggctggtctcaaattcccgacctcaggtgacctgccccaccggcctcccaaagtgctgggattacaggcgtgagccgctatgcccggctcaggctagggtttttcaaggatagtttggcaggcgagggagtccacttctgggtggagtcatcagacagaaacgtaaaaacccgaaaagacatttcaaagggtcaatcttagtttctgcaaggtggtgttatctgcaggaggaatcagggaaggttgcagatcttgtgacctaacaatggcttcaccttagcagaattcagcctcctctcatcctcctaacctgatgatctttcattcagtttaagtttaattttggggaaggacggttatcatttaaagtattaaccagctgggtgtggtggctcacgcctgtaatcccaacactttgggagccccaggtgggtggatcatttgaggtcaggagttcgagaccagcctggccaacatggagaaaccccacttctactaaaaatacaaaaattacccggatgtggtggtgcgtgcctgtaattccagctactcgggaggctgaggcaggagaattgcttgaacccaggaggtggaaattgaagtgagctgaggtcacaccactgcactcaaacctgggtggcagagcgagactctgtctcaaaaaataataagaacaaaaaataaactgttaaccaaatgtctcccaaagttagcttggcccggacccaggaatgattaagggcagtttggacattaaagcaaaatgggggttggttagatgagatctctttcactgtcataattttctcactttttcgcaaaggcagttttggtttcaggaccaagaaatagaacctgtctctacccaggagcgcctcaggcaccatcctttgtccatggtccagcctgcctggccttaacccctggctttgtgttgaatgctcacctgctggttctaggtgtccacaacattatggaaggccttagcagcttcacctaccccattcccagagttactgtttaggccgaagggttgtgactgctggggaattgctgtcaatcagcgtacccataccgacagcagcatgtgagactaagaagtatgtgagcttcctagtctcccctccaccttccaggtgcctggccccgggtgtgtgtgtgtccagccagggcctgccagcatccctctgcaggctgtgtgtgtgtcactctgaattcacccacagagttgagattggcaccgcgtcacattcttcctaagactgtgttgcagaattagcataagaatagcattaaaatgttagtacttttggccggtggctcactcctataatcccagcacttgggaggccaaggcaggtggatcacctgaggtcaggagttcaagaccagcctggctaacatgttgaaaccctgtctctactaaaaatacaaagaaaattagccgggcatggtggcaggcgcctgtaatcccagctacagggctgaggcaggagaatcacttcaacctgggaggtggaggttgcagtaagctgagactgcaccattgccctccagcctgggcaacaagagcgaaactccgtctcaaaaaaaaaaaaagttagtacttttaatttgcatatcttcggagcgctactatgtattttttctccttgaatcctcttagtagacaaacaaggtaaccacaaccatagccaacccgggactcagcaggctccagggattggagcggggccttgtgtccaggagcagtagagtgggtcctgcccctggtctcttgactgtgggtcttgtgttgtttctctaccagcgttgacttttggattggaaatttgaaagctgctaatgaatctccctcatgaattcatgtaactgctttgatcctaagtatatttagtctgtcccaccttggcacagtgggttctgtcaccagctcctcaacgttaggacccaggaggtccctgtggtaggtagtatgggaaggacatgatgacagggcagtgccatgggagcctaggaggggtcgggaaagggttctcctgtcttcttcacatgcatttgcatagtgtgggaatgaataaaaggtttaaaagaacctgtgttattcctgttactatttatttttccagaacatatctggtcagattttcattttctagtttttatgttcaagtaagcgtcttaagcgtgtgggaatgtcattctcctgcctttttgttaaattaaagaccaggtgggtgggcacattccttacctgtgctcttggagtcccacagggccaagtttttcttagttcctgaaggtgacagaatgagcaggcagtcgtctcatcagagttgagccaggcatctcctgtttttgtttgttagagacagggtcttgctttattgctcaggttggattgtggtggcacctcttagctcactgcaactgtgaactcctgggcacaagcgatcctcccacctcagcctcctgagtagctgggactacaggcacttgccactatgcatggctaatcttgtgttttttgtagaaatgggtgtcactggtatgttacccaggctggtcccgtacacctggcctcaaacgatttgccagcctcggcctcccaaattgttgggattacaggcatgagccaccgtgtccagctggcatctactttttagggcagttcttcctttttcaaaaagaggcttaacaattatgagcgaaataaacctcattatataaaataaaaatatcactcatggtcctccctttcactcaaaatagctccctttgtttggtctctctccaaacgcgtgggtgtcatcggtgctcatctctgttccgggccccgtggccttcagcagcagcgtttaagatgtctgtccgtattctgcacgagggtttatatcccgttctgagtgctggccatttgggtgggttccagtttttgctggtataaataattctgtgatttgcatttttatgtgaatataacttttttttttcttttggggttttcttaggatagaaacctgtatgtggggtttgtagtaaggactagcacagcttattaaaaattgaccgtggatcattgtcaaccatgtttcacaatttagaatattcagttatttaaatacttcaatttaattcaaagaataagccaaaacctttttgtattttcccacctttttattttgaaaaattatatatccacagaataagtgaaaatgaacactgatggtcgctttattaatttaaatttaccagttgttaacgtttgccacatctgctttatctttgtctttctgcctcccttcctgcatctctacacacacacacacacacacacacgggcatgcacattttttttttttattgctaaatcatttgaaagtaagttgcagacatctgacactttacttttaaatacttcaacacttatctcccaagaatgaaaacagtctgcaacataaatgaaacacatgatcacacctaagaaaaacagtggttccatagtatcgtctaacatatggttcaaaataaaatttgtctccagaagtccttgatagcttttgtttcctcagtctacgatccagttaggtttagtgcattgagtctgactgttttgtaaattccgagtacgttaaagcctttggaatgcgtgccatggactgttctgaaaaggttccccttaaaccactaggtttaaaccaatttttttccttcaaaggaaacattcagcacagctctacgtgttgaagagagagctttggtgctactctgatggggtggggactggagcctgcacttgtcccctcccctgagccactctggcagattgctgctcttggccacattgtgtcttcctaaagccagcagggttcccgcaaacttttgggccactggcctctgagtttagagtttatttatctccttggccacaatagccagctgtagtctacattgtggacgtcctgaaaactggcagttctctggcatttggctcctggattagaagcattgctcatactgcagctcgttgacagctgactctgttctccgtttcagtggcgggaccactggatgcagtgtgtgtacttcctgccacaagaggagcctgtggtgcagggctcagcgctctatctggtagcccaccacgatgactactgcgtatggtacagcctgcagaggaccaggtacgtcgagcctcgtgggggtggaggatgagcctctgagacttgtatgtaaattccccatttacagatcctctggaggtgccagtgggttgatttgtgtctggacagaataacataagaacaaagatttgtgaccagtgtgtcagtgcccattcgtgtgtacccaggagaggctgtcatgggttgctggaatctgtttagagcagatgcgtaggaaaagtctggaattagcgggtgctctaagccctcatgcctactggagaccagtgtccagattcatgccctctggagacctgtggaggcgctcacagcccacgtctgtttgttcatctcctggcctagccctgaaaagaatgagagagtccgccagatgcgccccgtgtgtgactgccaggctcacctgctctggaaccggcctcggtttggagagatcaatgaccaggacagaactgatcgatacgtccaggctctgaggaccgtaagtgtccagccccttggcttgttgtggggaaaagggagaaagaagtttgtcccatgaaccccagcactttgcttatgatttgctgtttctttcctgtgtcctcttgtctatgagtggcttcagcgagcgcctcctgggtgggcactggagcagaaagcgggagagcctggggctggacttcctgagggcttgctctctgctctactgggagagcctctggctgggctcctgctggacacctttgccttgtcagacacagtcattgctgtgggtggtcacggtggattaggccaccccctcttttcatgtgttgtcacctttctaaaattttctaagatgtaaatctgatcatgtcgctctcctgcctgaaaacctttgctccctgctacctgtagcaggggactcggcttggggattacagatggggcttagagggagggtctcttgaggcccttgggggtgtgtacagaaataggtgtgaatgtgtgcattttgggggatggggggaggatccaagccatcctgagtttctctcagaggggtctgtcacccagaaaggcatccttgcctttgggcagtcaattgtgaacactcaagccttggaggctctcagctgtctgtgctctaaccagacagggaagaagcctgttgtcatggactggaaggtggcctgcaggtggtgcaggccttcagcggggcctctaggctgggttgaggggtgtctttcctgacactggggacaggtggggagatgtgagcaaggcgggcatgtttgtggctgggggtggttactgcatgaggacgcagggggatggtctgaggtctgggcaagtggagtgagaagggaagtatttctgacagcttgccagcaggaatcttctggcaaactggaggaagccctgtgctgagcttgcctgttccccgcaggtgctgaagccagacagcgtgtgcctgtgtgtcagcgatggcagcctgctctccgtgctggcccatcacctgggggtggagcaggtactgacatgcacccttgtcagcctcctgatgtgggcttgtgagttagagcattgcgtggtccgggtgcacaattctgtgatcaaggctctttgcaaaggccactgttgtgggcacagcatgctcgggtcaggggctggggggtttattgcctgtgcgtgcaggcaggcgtcaggcctcagagctggtgttcaggctgccccagggagggaatgagggcagggagggttgttcaggtgtgtcctctgtcttaggatggtcttgtcgcattttaatctttaatttcttctctgttaagtgaatatcttacaactaatagcgtggtgttccctctaggtgtttacagtcgagagttcagcagcttctcacaaactgttgagaaaagtaagtgagaattgttgttgctgaaatagtgagaggacctgtggggtctgggttgatggctttgaagtggcattggccccaggggaacaaaggagtggtggctcgcttgcacccctgtgttgtcttggttgctgcctggagagcagccagaggccttgggagctgtcactgaaatagaggcaggcatttgcactctgctttgtttttttgtgtctgaagaagtttaggcttttttcctcacttcacataagctactgttgcggtagaattaaatgtaggatgtgtttctgggacatcagtgctgagggagccagtgctcacagcctgatgggagatggcatttctctccctggccagtaactggtttgatttcctctccaaaggggaactcccttcaccagaactgcaggctcgcactgagtcctggtgtgcacatgcgggagaaatttcttttgcttttatcacattgtgctcctgatctcatccgtggtctataggatgccccccaaggagaggatttttccacaaagcagataaaagtggtgttccagaaccatttgccggaaaattcaaagcggagaatgcaactttgagagatttttttttcctgacaaacacaatactttagtatgaatacagtaattttacggttttctttctaagatcttcaaggctaaccacttggaagataaaattaacatcatagagaaacggccggaattattaacaaatgaggacctacagggcagaaaggtgagtagcgggagccttttggccacgctgggctgtgttagggtggtcagcacggcactgaagtagcccaggccccaccctgtccctggagtctcacagtgggtcctccacatgcaaccttacctcctacgagctcccaccatcaagggtgtggtgaagctttcatggagctgcccggtgagcagatggttgcactgctcttttttttttttttttttttttttttttgaaaatggggtctcgcgctgtcgtccaggctggagtgcagtggcacgatcttggcttactgcagcctcgaccttccagcctcaagcgatcctcccacctctcccgagtagctgggactgtaggcatgtgccattatgcctggctaatttttgtattttttgtagagtcagcgtttcatcatgtggcccaggctggtcttgaactcctgggctcatgcgatctgccagtctcagcctcccaaagtgtcggggttacaggcatgagccaccacacctggctgtactgctcttagctcagcctcatctctgctccttcaggtcaggacagagcagctctcttggggttcctaggagcagagcatgtcctttcctctccaccgcactcctgtcttcattccccgtccacggcttcctgctgcagtcaggcttccgggccctgaaactgcttctgccagcaacctcgtcgttactcccacggtctccctgcaggcttcatctgctctacccgcttgtccttgtgacccgggacttctgcctgtgctggggaggtcgctttcccctcaccttcctggctgctccttaccttgcactgctccgtggcactctccccgtgtcccccgcttcccctactgcatcctctctggtaatcacgttccttctcatgtgtgaatcagtgaccatcagagccggccttcactctttactattttggattcaaatctcatgtccagctgccatcctgtcacctttccttgaatatgccacaaactggactcacccaacgcggagctatcatctttcatctttcctgccagtctttttttaaataacagctttattgagatgtagttgacataccacaaaattaatgcatttcaattgtacagttgagtgatttttttaagtaaatatatggagttagccgtcacccagtctcatttagaacatttccaggcccgacatggtggcacatgtctgtaatcccagaacttcggaaggccaaggtgggaggatcgcttggacccaggagttcaagaccaatctgagtaacatagggagaccctgtctctataaaaacaaaaaaaattaaccgagtgtggtggcacgtgcctgtagtcccaggaggctgaggtgggtgaggtgggaggatcgcctgagcccaggagttggaggctgcagggagccgtgcttgtggcagagcactacagcatggctgacagagtgataccttgtctctaaaaaaaatgggaatgaaaagagaacatttctgttacctcccaaattcctgggagcctgttgatagtctgcatccccatgccccaggcctggcagccactggtctggtttgtgtctccagtatgtgcctcttctggcatatctcaaaagtgaggtacgcagtgtgtggtcttgtgagtctggctcctttcgctgagcataatgtctttgagattcacccatttcgttcttttgaaggctgtgtagcattccacggtgtggctatccattcatgtgcttatggacgtttggattgtgtccagtttttggccactttgaataaggcttctgtgaacatggattcactggtcttagagaggatgtatgtcctcagtctcttatgcagatgccttggtgtggattgctgggtcatgtggtagttacgatcgactttttaagaagctgctgaactgttggttgaagtggctgtccttttgacatccccatcggtaacatctgagggtccaggttctcggatcctcaccagcacctggcattggctttttttttttagcataaccatattaatgggagtgtggtgatgtctccacatagttttaatttgtatttgcccaatgactgatgatggtgaacatcatttcgtgtgcttgtcttgcttggtgaaatgtctattcaagccttttgcccatttaaaaaaataacagttttattgagatataattcacataccttacgattcactcagtgatttttgtatattcataaggttgtgtaaccatcaccacatcagtttaagaaccctttcattacccattggcagtcatgcaccatttgtccgcagtcccccagccctgggcacccactcttctcctttctgtctttagcttgcccattctgggcatcttgtgtgaatggaatcagacaagtgtgtggtctttcgtggctggcctctcatgtggcttcatgttttcgggctcatccatgtcgtagcctgaatcaatacctcatttctctttcttgctgaataagattccattgtgtggatagaccatgttatttatctgtttctcagctgatggacatttgggtggctcctacttttgggctgttgtgagtaatgctgctataaatattcatccacaagtcgccttttttctccctcatagatgagggcataggagatgattctgaaagccactgtgtggtgtaccggtagaccggggtcacattgaattggagtggtgggagcgggcgttcttgccatgttcctgatgctgtgtggggaggcgaggaagcactcagggcagccccttctgtctgccagcatttcctgctgcatctccatcatctctgactggccccactttggtgcctgactgcttgggcctgcccagggtcggctacctccttaccctctgccactccttccactcctcccacccctcccaccctgtagtctccgtttcttacccggactctttctgcactctcccaggtcgcctccgtccccagcacctgcaggttcccttccacacttcgtggtcctcagcagcatcttctaaatcacattccttctgattttgaaccctgatgaaaacttctagtgacatccaccacccccactgccgcctccgggatgagtccagcccctcaccctgtcctggctgccttgggctgggctggcttctgtccagctccacaccctcaccttggggggccttgctgtctcccggcctcactcttgcccctgctgcccctccctcggccgttcaggctcctcgctgtgcacgtgttcatttactcacaaatgttcacagaacatctggtcacggcactggcccactgctgggggatgctgggccaccagtccctgctcttgtggtgctcagagcctggggagggagacggagacaagccccggtaagtcctgagataaagcgtccagtgggggttgacaggatgccactctggaagccccgtctggcacgtttatttctgggctccctccatgacccccttccttgcttttttctatcacatggggtcagccccactttgtctgcttccctcttctgctctgctctcctgagcacgggactcatgtctggttgtaatctttacagcctccagggcaggtacagagcaccttgctgccttgcttgtttgttgactgagggagggagggactgatgagggagggagggaatgagtgagtgactgagtgagggagggagagggagggagtgagggagtgacttgagtgactgagtggcctgttgcttccgtgttcctgttaacactcctggaccgagccctactgacacctgggccctgcttctcgcccattcaccaggtctctctcctcctgggcgagccgttcttcactaccagcctgctgccgtggcacaacctctacttctggtacgtgcggaccgctgtggaccagcacctggggccaggtgccatggtgatgccccaggcagcctcgctgcacgctgtggttgtggagttcagggtaggccacccaggggatgttggagaaaaaagcagaggaggcgggtggggaaccttgttttcttgcaggaaccttgggtgcctgtagagcggctcaggccttgatgatttgagcttgtgttttctttctgtgtcagcacactgtggggttgaatagaagatgcttgccttttaaaaaatgcgataatttgacatacgaaatggaaatggctgagtgttgtcattttacaattgtggcttatcagaataatttaaaaatataaattaagcgtttcagaagccatgccgtgtggcctgctctgctctcattaatagccgaggcttcgattgttaaaggcattttgagatgggagagtcagctgctttgtgcaagaaaaaatggaaaagcttccttttaattttctcatcaaagcagaaccatagtcacaaagtcattttgggaagggcatttttattaaaaggatttgaaaagctttaccctggatggagagtgtatctcatttgatgagagtggttttctctcctagcttagtggctccatcactgaaagtctgggcatttctcctgtgttacttgtttacctaatcagatttccacatgaattctggttttcatggccaaagaggggatgtcacgatccatgcgtgcgtgtgaccaggaggaagggagggaaggctgtgtggcctgagtgtcctctgggttcctcttggcagggcctttttctctccccagcatcctcatgaactggagatgatgctggggagagaattggcttacagatttcttcccaaagaaatgatgttcaggatggcccggataggagtgtgcagcccccagcctaggagctctggccgactgtcccttataggagaggactcaggtgtcacgtcagagcttgcaggttcccgcccagcccagtctgttacagaaaccgttgtggatctttgttctctctgagccccttcatacttgggggtctctttcaggtgtgcagggaacagcaagatgtgcctcttgttcttgctgccacgcttccctgtgtcctggcgggcgggtgtggacggggctgctccttcctcacaggacctgtggcggatccggagcccctgtggtgactgcgaaggcttcgacgtgcacatcatggacgacatgattaaggtaggcagggccacactctgcatagtacccccgacctgctcctgtatcgcaggcctctcacagggtcccagcttgggcagcacaggctcttctgttgggggcagtgaggtcaggtgctgccattttgtgtggttcaacatgagcattgcttggtaccagccctgttcttggctccgtgctgtcaccctgtgtcagaatctccactgggcctgcacgtcctgtcattgcaactgcccctgccagtgcccacagcttcttttctagtggggctgactttccagaggccatctgggaaccttcttaggcagccatttccatggtgggggctccattcccgggaggggtacctgaggagattcccacaggttatttacatggtaggggttagcaactgggcctacgttctccagaaccatgggctgtcctgacagcgccagtggtccttggattcatgaggactgaagctgagagtcgtgttccatccacatgagaggggcagggtgaggagcatgggccgtgctgtgtattaaggaaatgcacgtggctcctgcttgtcatcccagcactctgggaacctgaggctggtggattgcttgagcccagacgtttgagaccagcttgggcaatatagcaagaccctgtctcgacaaaaaataacaaaaaattagccaggcatggtagtgcacacctgtattcccagctactcaggaggctgaggtgggaggatggctttagcctgggaggtcgaggctgcagtgagctgcgtttgtgccactgcctccaggctgggtgacagagcaagaccttgtctcaaaaaaagaaatctcatggacaccagaggagcgggaagcagcggtggccccgcagcagcagctatgcatcgggaggtggggcttttctgcttctgctcacctttctgctctcattttcccatagtgaacatggattgcctgtgtgtgaacacttttttaagtaaattaaaccttgtggatattttcagtttgtatcttatctgcccctcacagcagaccattgactgttcgatgcttttagaaatctccttcgtgctgagccctgcgtgctctggacccatgcgctctacgcctcctctgggcccctgctcatggcctgcccaccctggctgtccctgtcccctcttgctgatacggttctgctactctggtcctgggccagtgtctgtctctcgtgtgctaaggcagatggccgagagtggtgggtatcccacagtggggtgccaggcatttttacttctatgctttccaaatccacctgcccttccccacccttagcctggcccttccagtgccctgtcttagacctggcgccacttcacacgaccagccaggcccagggccccgggcatcctccctggcaagtcctcccatcccctgccattggtcttcgtgctcctggtgagcctccgacccaggctgtcccctgactgctgccgtcctggtttgagcccctcctgctctggccgtcctccacacggagcccacatgaacttgtagatctgagtctggccacatccccactgcaggaatgccctagctggctccccacaccacacctgcagagtggcccggctggcctgggtgccctggcctgctctcctgacttagctctatcctcaaggccccctctggcccttctcctgccggctcccatttgaccgtcacctcccctcctccaggtagctttctgcatccctcctggatgcaggtgcccccagcctgccgccaggcaccggggctgtactgtcacgcatttatccctccctgtggcccggggcccacctgtcggggccacacagctgtggtggtcaccaagtttctaggtgctgggtgttctcaccagtgatgtagatatgtggtcctcagaaggcttgagacaggcagcaccaccccatcttaaaaatccggagagcgaggctcagagccagcggtgcctggggagccactgatgagagagaagtggcagagagggggcgccgctggtctgctgggcgctcggcatctttatgggagaacgcacaccccttgtgactgcagtcagtgggagccaagccggggagcggtacctctgtctagctgccggcctgtctctgcagcccccaggcccccttctgttcgcagcgtgccctggacttcagggagagcagggaagctgagccccacccgctgtgggagtacccatgccgcagcctctccgagccctggcagatcctgacctttgacttccagcagccggtgcccctgcagcccctgtgtgccgagggcaccgtggagctcagaaggtgggtgcagagagggctggggggcagggaggggctgctgcttgcccttggagttctcacccccgtggtgagcacagctggcctgggagacgctgacacgtggagggggtattcgtcctccccacaaccttgcccttccctgtcagagtggccctgcgcgtgtggtggttcccacggtcctgtgtgtgccactggtggaggagccaggaagggctctgctccccctctacagctgaggctcccttgttggatcacagctcaggaagatgggagcttacttcctgtggtcaccgatgcaccattttcctgaaccctcctgggagctgaagcaggtcagggtcagcaagtgctgcttgcgtccagggacgggcagccctgtcctgctccggccctcaccccaccctcgcccgaggagtgacttctcctggaagcacctcccaactcggggcaggcagccaggcagggcgggcgccatcacctgagctcccagggttgctgtctggggcatcagaggggccttccggccttcagtgccaggctgtgcctcaagctcccccagaccctgcagccacaccggccctgccccatgtgtggcccggctgcagggctcgggttggctcaggtgggggcttggctgcggctcttctggctggggtttttctgaggaacgtttatgtaactgcagcactaggaactcccggcagggcaggaaggaagtggggaagaccacaggtttctggaaagccgcaggagctgcagctgttcccccgctgcctcttgtgtgactacttctgctgggcccccctctccttgacaggcccgggcagagccacgcagcggtgctatggatggagtaccacctgaccccggagtgcacgctcagcactggcctcctggagcctgcagaccccgaggtagtgcctgcgcaccgggcccagtgtgcgtgcagaccctgagagcaggcgccgcctggggaggcctccctgcccccatgctctgggtgtttctgtcacaagttcttcgggccagatgatgacccctcagtggtcctgggccatctggcccctgagcagcttctctctgctgcgagctgcctgggctggaggctggctaggaaggaggctcaggtgccagggagccctcaccatcttcctgctcttcttcctacaggggggctgctgctggaacccccactgcaagcaggccgtctacttcttcagccctgccccagatcccagagcactgctgggtggcccacggactgtcagctatgcagtggagtttcaccccgacacaggcgacatcatcatggagttcaggcatgcagataccccagactgaccactcttgagcaataaagtggcctgagggctggggttctgagtggctcatggctttctagcggggaaggctgaaggccctcctctcctctctgggagctgctcggcctcagggatgggaaagactgcgccgtgttgcatcttgttgcatctttgcactgctggcctctggctccagctgtggcaggaagcatgagagggtgactgaatttggagccctggaggggctgggaagacccccctgcttgtgcttctgaggtgctgagaatgctccaacacagagacatctctccccagctgggaagggagtggaagcacagggagcttgtggggctggccggtggggttgtccacgccgcccttggcgagcagtccccgtggcgggagcctgtcctgtctgtctcactctcgaggatctccgggtccctgctcttctggcttctgctaggagggtggagatgctgagttgtggctgggtctctggggcttgaagaccctggctgggcccgggctgagaggcctgggttctggccctttcacctgacaggtaacttcaagccacatccataggtgtctggcctcagtgctgcaccagctggtggcctgccaggacctgagactggacacaaggcagctgtcccagagcagttcctgagatgcaggcccaggaaagtggctgtcaggggagctgggaggcagccctgttccctgcacctccctcagattggaaagcccctcctgcaggtggggtatggcagggagcagcccctgcccagcgccgcttcaccaggaaggtcagtaggtgccgtggccttgcttctctcacacactaacccccctttggttatgtcccagctctcagaggtaacagcagacaccacgtgagagaacccagtggcctctggctcgcagcttagaaggtgaggcttgtgccaggccagccgagccgcctgtatgagcagagttccggtgtcctcggattcagggcagacttgggcagtgcctgtcctgcagttgggggcaggaactccctcccctgcccccaggcgtgcccctgaggcctggccccagcttgtcgctgaaataagtggagaacaccagccttgagcctcacagttttattttctcctcgttatccatccttcctttcagcaccagtaaggaaaaagaacacctctcttcgcaaaatattttatcaggtgtaaagacttgtttttcttctagggaagaaccgtctggatatatatttgataatgtttttaccaaaaccataggtgtgcttaccatagaaaacccctaatgtcccatgaagatacaatacagaaaaaaa

SEQ ID NO: 15749 - DNA, 41370 bp, Homo sapiens
gatttctgacagtcagacttgtccacaagaactcaactggcaaggctgcttttctgtgctaaaactggggagctagtgggcaccatgaagatcttctgcagtcgggccaatccgaccacggggtctgtggagtggctggaggaggatgaacactatgattaccaccaggagattgcaaggtactgggttggtttacagcaggctgcagctgggtggggcacttgatctcaaagcagatgccttgggctccagtctgagcgtgggctaggctgtcacccagtgcttatgatgagggctggtgttggtcctgagcaggtctgctcagccaggtaggtatatgtagcagttaggcaaaatcatgcctgtttggagagtcagacattatgtagcagccttagcagagcctcagcatctgtttaacggagcaaagaaaacccaagcctcagtagtgttgatgaagttgaatcatttacttgccttactgaaatggtgacatgttcatcatatggttaaattcttttgaatgaaaaaaatgaaaatggttttttttttcccttagaagaaatatttaaaagtatgtgagttgttggccaggcgcagtggctcacgcctctaatcctagcactttgggaggccgaggtggccagatcacctgaggtcaggagttcgagaccagcctgaccaacatggagaaaccccgtttctactaaaaatacaaaattagctgggcatggtggctcatgcctgtaatcccagcttacttgagaggctgaggcaggagaatcacttgagcctgggaggcagaggttgtgttgagccgagatcgagccattgcactccagcctgggcaacaagagcgaaactctgtctcaaaaaaaaagtatgtgagttgttatgtagcaatcattaagtgcattcagtgtgccagcattgtgctaaggctgtggataccagatgaagaagatcctgttctcatcttcaaggaccatgcagttttgtggaagagacaggcacatacaaaattacagcacaaaagccaggcacggtggctcatgcccgtaatcccagcactttgggaggcaaagggcgggcgggcgggcggtggagggggtggtggcggctgatcacttgagggtcaggagttcgagaccagcctggccaacacggtgaaaccccgtctctataaaaaaaaattagctgggagtggtggtgggcgcctgtaatcccaggtactcgggaggctgaggcaggaaaatcacttgaactcgggaggtggaggttgcagtgagccaaggttgtgccactgcactccagcctgggtaacagagtgagactctgtctcaaaaaaaaaaaaaaaaaaattacagcacagtgagataaaggcacaagaggtcatggaagcagcaagaaccagctgaacttggggtgggaggtaatgtttgaataatttctcagttctaaaggaagagaaggtgaagtttgagcagcagggattacaggtaagctttcagatgagccagattgtggctgggtgcagtggcctacacctgtagtcccagctacttgggaggccaaggcaggaggattgcttatgcccacgagttcaacatagtaaaacactgtctcacaaacaaacaaagaccaaaaacaggctgggcacagtggctcatgcctgtaatcccagcactttgggagaccaaggcgggcggatcacctgaggtcgggagttcgagaccagcctgaccaacatggagaaaccctgtctctactaaaaatacaaaattagccaggtgtggtggcgcatgcatgcctgtaatcccagctgctcgggaggctgaggcaggagaatcacttgaacctgggaggcggaggttgccatgagccgagatcgtgccattgcattccagcctgggcaacaagagctaaactctgtctcaaaaaaaaaaaaagaaaaaaaaccacacacacacagatgggctattctggggagcagctagcagtttagtgcagctggagtgtggtacaaaagtactatggtaagagaggctgccgaaagcatacgcggggtcattttgtaaagggtggtagcaaaatgcaggaagaggaacatgagtttaagtccaagctttgccacttctttactctcttggccaagttacttctctgagccttaatataaaataatatatacttcaatatagtaatacattatctcacagtataatacaattatcttagaattgtttgatgattaaatgtaatacagtatctggtgcagaattagggcttaaaatatttacttttttttctttttttttttttgagacagagtctcgctctgtttcccaggctaaagtgcagtggcacgatctctgctcactgcaagctccgcctcctgggttcacgccattctcccgcctcagcctcttgagtagctgggactacaggtgcccgctgccacgcccggctaattttttgtatttttaatagagacggggtttcaccgtgttagccaggatgatcttgatctcctgaccttgtgatccgcccgcctcggcctcccaaagagctgggattacaggcgtgagccactgcacctgcccaggtcttaaaatatttctaaacattttggacattattttcttgttttattgttcagatggagtcttactctgttgccttggctggagtgcagtggcgcagtctcggctcactgcaatctctgcctcccaggttcaagggattctcttgcctcagcctcttaggtaactgggattacaggcatctgccaccacacctggctaatatttgtgtttttagtagagacttggtttcacctgttggccaggctggtcttgaacttctgacctcaggtgatccacctgcctctgcctcccaaagtgctgggattacaggtgtgagccacagtgtcaggcctggacgttattttctgagtgatatattaaacaggagagaaagaggattggattgcattttggaacactcactgagagcggtgtggagaggagagcatttggggatattgtagtcccagagctgcatagtcccagaggagacagctcgggggaacttgagtttggtaactcactggatatgatggagggagagagaagattcaagaagcaccaagacttctggttagaatgacaaagtggatggggcctgcaagggaggaatgggtggtgtggggaggggaacacgatggagattaggcgtttaggtttggacatccacatagagatgccaatggcagatagaattttgggtctggagacagaatttgtagttgttggaactgaaactgggagaggttgcagtctctcaagggggtgtggaatgtgaaaggtagagggctgaagaaggaatcccggaatagctgaggaggcaaagaagggcaagggagatagccagcatggaaaggaagaaagagggagtgtgtctagcaaggtcagaggcactgggaagtcccagatactgatgactgacatcagctgcaggagtgagctggtggtggttaccgagagtgatgtcagtggagtggtgggcagtaagtgtgaagaggccaggaaggtggtgagtgagatgccttttaaatagtgagcagaggtagaaaggactacatttcagctaagcatccatagctggcttcagatataaaaccttgatgtgccattaaaaaaaaaaaaaaaagaacccccttctttcagtgcaccgctcttcaaagtgtggaatgtggaccacctgtggcacaattgcctggagcacattagcccagccttctcaataagagtgagagtgtgtgtgtgtgtgtgtgtgtgtgtgtgttctgggactctgcatttcaggtaagctttctagtgattctagtgttgacccaaggctggagggcctctgttttaatgtgagctccttagctgtccccttgaattcccagaaagcgtggcagggcctgcctagttctgggtgctcatcccgaccccgcctgagggttttcagtgtgtgaattactgcagtaggaaatatggagaagtgattctcctccctttactacggtattggtgaactctttagttttccctgatgatgttaagtgaacgtgcccagtggggtacctgtcacatatacagtgggtgtatgtgagtgcttctctttccccggctgctctccctaataccgcatcagtggttatctccaggcagagatgtaggccaggttaggtcaagtattaggcagattgagtctgagtttttcctgaggaggaaaatgtgtagtgtatagcaagatcaagatgctagtggctgtggaattactgtgacagggctaactgccgagaccagctcggtcgtggagaccctaacccagtggcgctagaggaattaaagacacacacacagaaatatagagtgcagagtgggaattggggggctgacagccttcagagctgacagccacgaacagaactttacctacatatttattgacagcaagccagtgataagcattgttcctatagattatagattaaaacgggaaacaaagggatgggctctggctagttatttgcagcaggaacatgtccttaaggcacagatcactcatgctattgtttgtggttcaggaacgccttaagcgaaagccgccctgggtgggccaggtattccttgccctcattccagtaaacccacgaccttcagtgtgggcatcatagccatcaacgagcatgtcacagtgctgcagagatttgtttatgaccagttttggggcctgtttttggccagatttgggggcctgttcccagcagctaactactggagcatttttaggtctgagaacatctttctctgagacttttttctgcagcactagagaataacagcttgaaactctattaaaataaagtggccaggtgcagcgacggatgcttgtattgtagttctgctgaggcaagaggatctcttgagctaaggagttcaaggctgcagtgcccaatgattgaggctgttcatagccactgcactacagcctgggtgacataacgagaccctgtttctaaaaataaacaaaaaaataggccaggcgcagtagctcacacctgtaatcccagcactttaggaggccaaggtgggcggatcagttgaggtcaggagttcgagaacagcctggccaacatagtgaaaccccatctctaatgtaaatacaaaaattagccaggcgtggtggtgagcacctgtaatcccagctacctgggaggctgaggcatgagaatcacttgaacttgggaggcagaggttgcagtgagctgagattgcaccactgtactccagcctgggtgatggggtgagaccctgtctcaaaaaaaaaaaaataaataaagataaaagacaaccaaaaaatagtttaaaatagatgacacgtttgttctatctgtttagcaatgtgtttatatatgtgaatactcttgtgtgttgatgtgtatcatgcaaaggttactgacttttttgttttttaggtcatcttatgcagatatgctacatgacaaagacagagtaagtgtaaaaggaaactattatcttgatgtggggtgttttgaagtcttggattacaagaaggttaagaatccctgggggtcatgatgttaaatgatactgagaggcgtatggtgtagaagtcaggaaatcagttgggagactgggtcctacttctggctctatttttgttgtttaatctcccagctttatcaagatagaactgacaaataaaaatggtctatgtttatggtaatacaatgtgatgaatatatgtgtatggtgtaaaatgattgaatcaagctaattaacaaatctaccgcctcatacttttttgtgtgtggtgagaacatttaagatctactcgcttagtaatttttaagtgtacattattaactatagctcacaatgccgtacagcagatctccacaacttattcatcctatctgactgaaacatcagatcctctcccttagcaggtaccattctctgggcttctgagttcaacatttttttttttttttgagacagaatctcgctctgtcactcaggctagagtacaggggcgagatctcggctcactgcagcctcagtctcccgagttcaagcgattctcctgcctcaacctgcctaagtgttgggattgtacctagtattgggataatactattattatactattatacctagtattgggattataacttgggattacaggtgcgtgccatgacacctggccttcactgtagttttaatttccatttttaattttaattttatttttttgagactgggtctctgttgcccagtgcagtggtgtgatctcggctgcactgcagcctagacttcttgggcttaagcgatcccccaacctcagccttcccagtagctgggactacaggcatgccaccatgcctggctaatttttgtatgttttgtagaggcagagtttcgctgtattgcccaggctggtcttgatcccctgaggtcaagtgatccacccgccttggtctcccaaagtgctgggattatgggcatgagctactgcgcccggccatcgtgtgcttgtttaccatgtgtatatctttgttctagtctagggttatgaacataggtgtgattcttgatagacactgccacattgccttcaaaaagggttccagattcactgtaatatcttcaaaactgggtcattaaaaagtgacagctaatttaatggcatcgttaaagtgaaggctgtgccatccctggtttacaattgaggacgctgttcatcaattttttttaacttaaaaaataaataaaacaaggccaggcacggtggctcatgcctgtaatcccagcactttgggaagccgaggcaggcagatcacggggtcaggagatcgagaccatcctggctaacatggtgaaaccccgtccctactaaaaatacaaaaaaaagccgagcgtggtggcgggcagggcctgtaatcccagctactcaggaggctgatgcgggagaatggcgtgaatctgggaggcggagcttgcagtgagccgagattgcaccactgcactccagcctgggcgacagggagactccgtctcaaaaaaaaaaattgtggtaaaaacacataacataaacggtcatactgattgtatctaagacataaatgcacttactttgacaatgaaatagttctatatttctgtgaaaaattatttcacccagactaaacatttttgtgctttacctcagaggcaacgtcatttcttttttttcttttttctttctttctttttttttttttaacaagaatgagtctccctctgttgccaggctttagtgcagtggtgtgatcttagctcactgcaacctccacctcccgagttcaagtgattctcctgccttagcctcccaagtagctggggttacaggcatgcgccaccatgcctggctaattttttgtatctttagtagagatggggtttcaccatgttggccaggttggtctccaactcctgacctcaagtgatccacccgcctcagcctcccaaagtgctgggattacagatgtgagtcactgcacccggcctggtaattctaaagaatattcagttctagatattttctaattccagtctgatttagtcttttgcctatcagtttagaagtgtgtttcttaatgtatgaaaaattttttttcttcagttgtgtttctgatattaagatttttgacttgttttgcattgtggtcagaggatatcacccttttgatgccagttctgtattagctgtctaatgttatttaacaaattaccttaaattttaatagcctcttaatatttcttactaacttggcaggtcatcagtctatttaaaagatttgcacatattttttccatcatctttagttattttcaacagaagggtcactgtgcctattgagtcagaccgttatagatgaaagatgtatgtgtttactaaagacagaagtaaaaatcttcaagatgcaaagaagttattttctgatggggaaaatactttttagtgaagctctctgagttagagtcggtaaaggaaaacaagccatacatattgcagcagagcggctttaacacaaggagctggctacccagctgtgggagggctagaaagcaaatgggaacgctgagtaacctaacagtagagattgcagggagcagttaccttgcctagggctgagaaactaaacgagaagattaggatttccagaagccacaagcattgaggagagatcctgtggaccactgtccaagtacggctgcagctctgaggggcccaaggagctggttatgggatcattgggaaaagttggagtctgcaatcaactgcccctaccgagaggaccctgatgagaacagcagcatgcagaaaggagcaagcctgctctgtcctcctaccttccagtcgccctcttggtcccccttttggctgtacctaacagttggaaaaaggagaacatggtttgcagggctctggcatcacttagtagaggatagaagagtgagtgtggagcagggacagtcgcttaataaagggcaaggggctgactcacaagacctgcccaactcagccagagctgttctgccaggggccagaaaggccatagggccctgacttgcactgccactgccagctgtgactctagaactttgcaaagcacctttccacttacttataataactggtagtaagtgacggccatgtcttccttagaatgtaaaatactaccaaggtatccgggctgccgtgagcagggtgaaggacagaggacagaaggccttggttctcgacattggcactggcacgggactcttgtcaatgatggcggtcacagcaggtgccgacttctgctatgccatcgaggtaagccattcccttcaggtgtgtgtcctgcatcttgcatgggaaatcccctatgctcttgcactttccccgtctgttccttcacaaacattcatggagtgctcactctgtgccaagcacagagccaggctctgagcgtatagagatgagtcagacacagttccttcctccaggagctaattttctcctctgtcagcctaggctgcacatcagaatcactaggagctttagaaaatacttacaggctgggcacagtggctcacgcctgtaatcccagcacttcgggagggtgaggcaagacaattgcttgagcccaggagtttgagaccagcctgggcaacatagtgagatcccatctctacagaaaaacttttaaatattagctgggcatggtggcatgtgcctgtgttccagctattcttgaggctgagatgggaagatctcttgagcccggaaagtcaaggctgcagtgagccatgatttggacttcatgtaagaaagcaaaaaattacttctaccttgtttaagccagttattgtgggactttgttgtttccaactaatcagtatatgaactcagttttgtaggggaaagtatttaaatacatgcccccacaccaccacactccagcctgggtgacagagtgagactttatctcaaaaaaatcaaaacgaaacaaaggctgggcacagtgtctcacccctgtaatcccagcactttgggaggccgaggcttggatcatgaggtcaggagttcaagaccagcctgaccaacatggtgaaactccatctttactaaaaatacaaaaattagccgggtgtggtgatgcgcgcctgtaatcccagctactcaggaggctgaggcgagagaatcgcttgaacccaggaggcagaggttacagtgagccgagattgcgccactgcactccagcctgggcgacagagtgagactccatctcaaaacaaaacaaaacaaaaaaaccttatgcctagtccccagccctaacagattttgatttaacttttctggggtgaggcctgagccttgggacttgggaatgtgcggcaaggttgagaaccactaccttaaatgtccctatggagtcagctctcttatgtttaccaatttgtcatttctttaataaaacattaaacagcttgagcccacagagcaagaaaaattaaaaaccaaacaaaattaaaaattaaacatgttatttttctcataaaacaaataatgcatattattataggaaatttggtaaataccaaataaaaatagtatgttgacccaaagttaagtactgttaacattttggtgtatattcttccaagttttgggggcaggcagggagcatgtatataaatactttccctacaaaattgggttcatgtagtgattgagttggaaataacaaagcctcaaaatcactgtggtttaaggtagagtagttttttgctatctttttcgtggcgtgatctctattcaccgcaacctccgcctcctgggttcaagcaattctcttttctcagcctcccaaatagctgggattacaggtatgtaccactgcacctggctaatttttatatttttagtagagatagggtttcgccatgttggccaggctggtcttgaattcctgatctcaggggatccccccacctcagcctcccaaagtgttgggattacaggtgtgaatcactgcgccctgccttgttcctcttttttaaaagtaagaataactttcccaggaatttctattatagcaaacctctccttgggtaccatcggctagaatgaggttaaatctcatttcttatctctggcaagagggattcagttactcttagctcagacaagtgcaccactgcaaaggtcagttccccacgctgcaccctcacctgatttcaggggagaggaggacacagaatggatgtcgggaggtcatcttcagtgtccactcctggtagtgttttgggtgagatcttgagcttcttgatgggctgaggagaaggaggtgtgaaggtaccagcttgcaggttcagggagaggtgactgatgagtcagaaggcagcaggggtgagggacgacactggctttggatattgtcagggtggaggcaaagtgattggtgagaactagggtttaaggccctcaaaccacatctaaaaacatcaaggcaaatcctagaaataatttgaaatagatgatgaagatttttctaggagaacatgtgtgtgtattccatgtaaatactgcgcgctaatcaattgcacaactggagctgctcacgtaagtactctttacgaaaggatacagcatttgtcccttgattatagtaaaaaatatagtattcatggtagaaaatgtgggaaatacagaaaaggatttagaaaaaaggaaaatcttatcaggaacagtctcggtatcattttgtggtttccacttcgtgtgtagggccacacgtgagtctgtttgttttacatgctagagctcttggggctgtggaatctagactggataagttgaaaacaaagagttggaggtgcttatttatgttcagggaaactcgaagagttcagggaagacttctggatgggggattcatgctgccctgggaagtggggtttgatttggcaggtggggccaggatagggaaggctcagtgatcatgagatcattgtggctggagtgttggttgttgggggaatgggggaggaagactgggaaggtaagggagggcctccaaagcagtagtttccccttatctatggtttcacttttcgtgatttcagttacctgtggtcaactgaggtccaaaaatactaaatggagccaggtgcggtggctcacgcctgtaatcccagcactttgggtggctgagacaggtggaaaccttgagtcccagagttggagaccagcctgggcaacatggcaaaaccccgcctctacaaaaagtagctgggcatggtgatctacgcctgtagtcccagctacttgggagattgaggtgggaaattgcttgagcctgggaggtggaagctgcagtgatcatgccactggactccagcctggacaatagagtgagacccttctcaaaaaaaaaaaaaagaaaaattaaatggaaaattccagaaattatttataagttgtaagttgtgtaccattctgagtattattacataattgttctatttttagttattgttaatttataaattattatttatatttattattgtgcctaatttataaattaaacctggtcataggtaagcttggaggctgaagcagctccactgtgaatgctaatcctccacgctgacttctgaccaaccccagcttcaggaatgcctctaaaatttccgctctcatgcactttgatgtaaatcctgccctcaggtcagaacaactttgatgttatcataaatacatacttaccgtaaatcctgcccttcgtcaaattccctgtggtatgtaagccctgcgtctgagccataacagtgtgggggcccagtttctcactgcccgagacaaggcttctgtttgtatgtctctataaagtgtgtctttctgagaagctggatttgccagtctttcctcagcctctcagctcccgtggcctgttggggtaggtttgcatagagctgcccaccatggaacagtatgtatgtatagcaaaaaaaaaaaaaaaaaaaaaatggtatacataagggtcagtactgtctgaggtttcaagcatccaccaagggtcttaaaatgtatcccccatggacaagaggcactgctgcaccataagaaaatagaggctgtgttctgccaacagtggggatttgggacaattttgagcccagaggatgacctacttactcacacctacagtctgctctcctctggagggcacagcacgcctcccaggttcgtgaggcaagtccctttcctggctttttggcgtcctcttgtgcggtactgacacctactgctcttactaagtagtgcagcctcctcaggatccccggcatccccgctgtgcctggcacggaatgagagtccctaatcacaagttaaagccagctgaatctcagccctttttcatgatgcacatttggagaataaagtatttaagttacatatcttaggaccagaatcaaggaatagcttgctcaccttaaaggtcagactactgtttaatttattgctcatttttccttgggtttcggctctattttctaggttttcaagcctatggctgatgctgctgtgaagattgtggagaaaaatggctttagtgataagattaaggttatcaacaagcattccaccgaggtgactgtaggtccaggtgagatttacacaccctgtgttgaaagctttgcttgctcttgtgtgagagaggaaaagggttattccagttacctggaacaaatccaggtcatagcatagaagtgggacctctctgtgtggagctctgacagtaaggacttggtttctcttgatgtttattttcctgctagttaaaactagtcaacaaggagtagactagagctagtcaggtccagcaatggagacgcaaacaaaacctacatttgctttaagcaaattggaattcttatggggctcaactcttgagtttcaactaccaataattacgccttggataaacctcattggctacgatactgccactgctcaaagctcaactctgagtttcatcaggcagaaagtacttagttcttttatttatttatttttttgagagagagtctcactctgtcgcccaggctggagtgcagtggcgctatcttgcctcactgcaagctctgcctcctgggttcacccatcctggctaacacggtgaaactctatctctactaaaaatacaaaaaattagccaggcatggtggtgggcacctgtagtcccagctactggagaggctgaggcaggagaatggcgagagtagttctgacattctgcttctgcatacaacatgaacaattttcctgtatagcattgtctcttaaggtttccagaatatgtatatgtacacacacacacacacacacacatattttttttttgagacggaatctcactgtgtcacccaggctgcattgcagtggtgcaatcttggctcactgcatcctccacctcctgggtacaagtgattctcctgcctcagcctcccaagtagcggtgattacaggtgcctgccaccacacctggctgctttttgtatttttagcagagacggggtttcaccatgttggccaggctggtcttgaacccctgacctcaggtgatccgcctgcctcagcctcccaaagtgctaggattataagcgtgagccaccatgcctggcctccagaatattttttatagtctagaactttgtttcagtctttgaaaatttcacatgccactgacacttagagaacatagttgaaagatttgcaaaggaaaaactgtggtgaagttatggataacaccatgggttttttctaattttttgtggagatagggtcttactatgttgcccaggctggactcaaactcttatgctaaagtgatcctcccatctcagcgacccaagtacctgggactacaggtgtgcactactgcacctggctttttcaccacggttttggagaatgcagtatcattctgaattgaagcttctacctaaggtcaacattattctcccatttaacaatttttttttaatggagaatctgaaacatgtacaaaagaagtgggtactatcttatttatttatttatttgagacagagtctcactctgttgcccaggctggagtgcaatggcaggatctcagctcactgcaacctctgcctcccatgttcaagcgattctcctgcttcagcctcatgagtagctgggattacaggcgtgcaccaccatgcctggctaatttttgtatttttagtggagacggggtttcaccgtgttggccaggctagtcccgaactcctgacctcaggtgaccagcctgcctcggcctccgaaagtgctgggattacaggtgtgagccaccgcgcccggcctatcttttttatttttaaaatatacaatagagtgctcaaatcattccatttacaatcaacgttattgaagtatgatttacattaaatgaatatccattttcattatggatatttgacaaatataaacacacttgtaaccaccatcaccataatgaagataatagaacatctccatcatgcccaaagagattcctcataaccctttctatcagtccccccatatcctggtcctaggcacccactcatagacttcattatagattagatttgcctgtctaggatttcaaggaagtggaatcaaagaagtgtggactcttctgtgtgtgtgctctcttttttatagcgtgatgctggtaagattcttccacactgttcatgtcttgggggtccgttcttttgtgttactgagcagcactctattagatagatgtaccataacttgtttatctctctacctgttgatggacagggatttcttggataggtctttagattcactgatcttttcttttgcagcatctaatatgctgttaagtatatttagtaaacttttcatttctctttctttgttgttcttttttttttttttttgagacaggatcttgacctgtcccccaggctggagtgcaggggtgtgagcatggcttattgcagctttgacctcctgggctcaagcagtcctcctgcttcagcctcctgtgtagctgggaccacaggctcatgccaccatgcctggctaacttaaaaaaaatttttttttgtagagatgggatctcagtttgttgcttaggctggtctcaaactcctgggctcaagcgattctcccacctcagcatcccaaagtcctaggattacaggcgtgggccgctgtgcctggcctcatttttgatattgtattttttaatctctgaaagttccacttgattctttttcataacttccatttttctcatgttcatagttttctataagcacatttattttagctttttgaacatccttatcttctgttcccaccatctttgttttttctgggtttgttctcttgactcatttttatccttattctgggtcacattttccttcttcacatgtctaaccatttttgtttggatgctgtggctatttggaattccccattgttgagtgctagacttcgttggttttgctttttaaactttggcatgcagttgggttacttgcagttcagattgatcctttcagggcttgtttaagctttctttggagtggggttagagtagctttaagtcaggccttctcaacagtagtgctgtgacgttttggcattctccaactatgtgacattttgataattctttgttgtggaccctgtcctttgcattgtaggatgtttagcagtgtccctggcctcttcccagtggatgtcagtagcactcccctcctcccaccattcttgccaactaaaaatgtctccagactgccacgtcttccttggtctcgagtgtgtaaaattgccacctgttgagaaccactgctctaaggctgtttagccagacagttactgtaacctttctggagtgtctgctgagagctctaggtgctcagcagggtttcccttgtctggctgatcagaacttgaatgtttcccaggcctctgagagctccggagattgttatcactcatgcaacctttgctcggcttcacagagtattaccctgtgtgtgtgtgaatgtattaacacagaccctagaggaaccctgtgcagcattctgaaggctttttttctgtgtaatttcctctctgattctctgcctggcaagttccagctgcttccacttccctgaactcgtttcctgtctgtttaactcagcaagactgccgtgctctgtgtcacctcttaccctatactgtggtctggaaagggtctcctggctgatagccagagcagggtaagggttacttggtttgtttcccttcttagggagcaaactgtgttgcctcttgctcaacatctgaaaacacttgtttcatatattttgcccagttttctagttgataacagccggagggtaagcctgatcccacttattccactatggccagagtggagattgattcatttatttatttttttttgagacagtctcactctgttgcctaggctggagtacagtgatgcgaacacagctcactgcagcctcgacttctgggctcaagtgatcctcctgcctcagcctcctgagtagctgggaccacaggcaggcgccaccatacccaactaatttttttgtttttttaaatttttattagaaactaagtcttgcggctgggtgcagtggcttatgcctgtaatcctagcactttgggaggccgaggctggcggatcacctgaggttgggagtagcaaccagcctgaccaacttggagaaacctgtctctactaaaaatacaaaattagtcaggtgtggtggtgcatgcctgtaatcccagctactgaggagattgaggcaggagaattgcttgaacctgggaggcaaaggttgcggtgagccgagattgcgctattgcacttcagcctgggcaacaagagcaaaattctggctcaaaaaaaaaaaaaaagaaaagaaaagaaactaggtctcgctttgtttcacaggctggtcttgaacgccaggcctcacacagtccttctgcctcagcctcccaaagtgctgggatcacagatgggagccactgtacctggcgagatcatttattcttgaaaatttatccattttgacggcagggagactgatctgcagggcagccttggccatgaagtatgctgactctgcctccaggcagcattgttcacacacacctcagcttaggccaggcccctcatatgatttcttattaaaaaaaaaaattttttttagatagagtggctctgtcgcccaggctggagtgcagtggcatgacctcggctcactgcaacctccacctcccggattcaagtgatccttccacgtcagcctcctaagtagctgatattacaggcatgcaccaccacctggctaatttttgtatttttagtagagatggggtttcactatgttggccaagctggtcttgaactcatgacctcaagcgatctgcctgccttggcctcccaaaatgctgggattacaggcatgaaccaccacgcctggccaatttcgtaatacttttcttcatagcgcttaccactgcaatcattaaatcattatgtagttatgtatttaatgtctgtatccccacccagctgaggcatcctgaggtcatgcactgcgtgggttgtattaactattccattccgttatttgctccgggcctgtcatgtaaaggagttaggtaatttttgtaaagtgagtagattgtcagttgtgcttcatccataatcccttgtaaatgtgactttgtttccgatcctcagcctgacaagtggcttcctcattgccaagttgggtggtctttcctctgcttttcctctctaaccactgccgctttggtacttctgccattccttccttcttgaaactctccctggaccttagtgacatctcttcatcttggttctcctgtgttgctttctttctgctccagatgtatactttccaaggttctgctctcagccctttttaaaagtggcatctgaagttgcctgttccccagagctgggttacatgctgaggcttgtggagagccaacccagggagcagcgtgtgttcatccgtccattttgttcatttggaaagggcttaggaagctcctggggtggctacctgcttcagactcccccaccccgtgcccttatacattagcagtcacactcaaaataccaggccctcaagaagtacttgttaaaatgcactggaccataaagcttgaattttttttttttaatttttattattttttgagacagtctcactgtatcacccaagatggagtatggtggggcaatttcagctcactacaacatctgcctcccgggttcaggcaattctcatgcctcagcctcctgagtagctgggactacaggcgcgtgctactacacccggctaatttttgtatttttagtagagacaaggtttcaccacattggccaggctggtatcgaactcctggcctcaagtgatcagcccagcttggcctctcaaagtgctggaattacaggtgtgagtcactgtgcctggctcttgatttttattttaatgaagcaatttggactataaagcattttaagttatataattggtttaaacattcaggagatagaattggcagagtgggtgatcagtgggttgtagggtgacagaaatcaataatttatctaatgtgtgttgactgttacggggcactagaccttgtgggtgctggggtacagtagtggacaggcagtcagcggtcctgctgtcctggaactagtaaatgatgcccagattcctggactatgtgactcattgattgattgaggcagaaaccctggagggaggagcaggcgtgttagctggggtgggtgggatgagttttggacagtgtattccagttggagtttgatgtgacatcagagaggatgggcagggcttctcgggagggtggtctctgtggcagaagacagaagtttcttcttaagctcctccacgtgatactgtcatggagcacaggtgagcttcataggaagtgtgcttttttttttttatcttcatcatcccgaccaccaccacatgagacagagcccattcacccgttttactgatgaggcaactgatggtcagaacggagggctcagggataggaagtgagatccaggccaggctccagcctcgagctcgaggttcacgctgtctctgttgtgctcttctatcagctgctctctttcttttttttttttttttgaaatggagtctcactctggcccagattagagtgcagtggcgtgatctcggctcactgcaacctctgcctcccaggtttaagtgattctcctgcctcagcctctcaagtagctgggattacaggcacccatcaccacgcctggctaatttttgtattcttagtagagacagggtttcaccacgttggccaggttggtttcaaacttctgacctcaggtgatctgcccatctcagcctcccaaagtgctgggattacaggcgggagccaccgcgcccggcccctgtcagctgctttcatgcttctcttttccttgtgtcatctgtgagacttgtgctctgtgtaggggaaatgagtgggctttgtcagattataattcatgaggcattaaaagtgtttacagttaattctccctgatgaatagccccttccaaagtctattttggctcttggctcattaaaaattataattgtagaagtagcagtacattactgaggtttagaaaacagttaacagaagatccctcccaaatcctactcttctctaaaatcctactgtcctaaaacaactgttatttaagagattgtttggtgacaaggcgctttcattaagggaatttgccatagtgatctggggattctaagtcatggatctcaattttggctgccagagcctaactcacagtagctggaagatcatcagagaaccttgttgtcttgctttggctttccctccctctccctgcaacctagaagtatttgacataccagcattctgtttttgcttttcaaataatttttctaatttagtggttaatagtttaattgttaatttatatctctctaattgctaatagggatgaaaaagttttcataagtttgatttctgttttgaattttctgtttatatttttacctggtttctttttgggtgtgtgttttttttgtttgtttgagacagagtctcactctgtcgcgcaggctggatcactctgtcgcgcaggctggagtacagtggcacaatttcggctcactgcaacctctgcctcccaggttcaagtgattctcatgcctcagcctcctgggtagctggggttacaggcgtgtgccatcacacctggctaatttttgtatttttagtagagatggggtttcgccatgatggccaggctggtcttgaactcctggcttcaagtgatcctcctgccttggcctcccaaagtgctaggattacaggcgtgagccaccatgcctggctaatttttgtattttttgtggaaatggggttttgtcatgtttcccaggctgatctcaaactcctgaactcaatccattgggtatttatagttttcttatcattttttgcagtctccctcccaatattaagcatacagaatagctgtaagagcagtacagtaaacacttatgatcccttaccctagatttatcaattagcgttttgtcatacatttacatatggattttttttttttcctgaaccattggcaagtcagttgcagacatcctgacacttctgaatacctcagcatgtatatgtgcttttagcgtgatggccccttaaccacttatctttcccatatttgctgtaaatatttttcctagtctgttgcttatgtccaactctgttttcttgtgtttttcagagggtgacatgccatgccgtgccaacatcctggtcacagagttgtttgacacagagctgatcggggagggggcgctgccctcctatgagcacgcacacaggcatctcgtggaggtagtagacggagggctccctcagacgtgtctgtggtctcagccagctcacatagcactcactcatgcaccgtgtcccacacagcccaagccctcagcacctctgatacacctgggacacccctccattcctgggggggctctggttctcctcacttaaaactttcatgtcccttgaatgccaaatcttaataggttagagttgaaaagcaagaaactatattcaaattcagttaagttcagcaaatattctcaggaaggcgatgcttgagctgtcagtcttgagaagtgatcaggtgttggcctggcagatggaatatttctggtagaggagagcagcacgtgctagacgtgagactgaatcggtgcggtggctccggagcctgctttggattttgtgctgtgtgggaggcaggagagatgggcttagcaactgaggctagagagctgggcaggggctagatggagtggggtttgggggccatgcccagagggtagctgtcattagaaggtggggtggcatcacaggagggtttgaagcagaggattgacagcagacttatgcaggcagatgtgtggagggcagttggggtatagggctggaggttgcgggtgggttaaaaggctgtggaatcgtccagacgctgtggtacagtgggcctcagctaaggctgtagacagaggcctgataggtggtcccaggagttggtggtcccttaggtgtagagatatcgatgctagggtttgggcacctggattggatggtggtgcttcctgttgacggggagtgcaggaagaggggtagccttgggaaggttgggaagtggtgagggcgattcttctggtttacacagagtttgagctctctaaaggtcagccaagcaaagaggcccagagatgcatggatttactcagtgaagagggcatggttgaggtcactgtggagagtgtggagggagacagtccggaccagggagtccccttgtgaggtggggcggaggaagcacagcctggggaaggcagcgggagtgagtccagttagagcagcatttgtctaccagagcaaggttgggagatgcttcgcagggaggccagttattctgctagccttttaccatgcccagagcaacccctacagcagagaatcatttggcccaagaggccagtggtgtcctggtggtgaaagccatgtgggtagcagctgtgagtgtgctcttgccgggtccctattgcctggtgcatggaggacgtggagtggatgcaagaggtaggaggagagccggacaaggagccggagccggagccacagccctaggggctgagtgtgcagcagtgcccagcggcgctagagggctgggcagctgagggggcaccgtggtccacagggctttgccacaaggaggctcttgttttggtgctgggcaggagcggcactgaagggacactgagcccagagccaggatcaccacccagcagcaggacgtgaagcatttaagagtgccaggtagccaggaacttagctgacagaagtcattttaggcacagtgtgtgttctttttgaaatgtagtaccctttttttcccttttccaagggcatagggctgaaaacagttcactattctaatagtataaggtgttgggcattactgaaccaacctaatgttaaggaataaacctcttttgatcaatgggaattactgtgggtctaagcatctgatttttgtttggttttgtttttaatataaacttaggaaaattgtgaggccgtgccccacagagccaccgtctatgcacagctggtggagtccgggaggatgtggtcgtggaacaagctatttcccatccacgtgcagaccagcctcggagagcaggtcatcgtccctcccgttgacgtggagagctgccctggcgcaccctctgtctgtgacattcagctgaaccaggtgtcaccagccgactttacagtcctcagcgatgtgctgcccatgttcaggtaccaaggagccaccataggtgatggcgctttgagacatttgatggaagttgggtattaggaggttctttttgagtgggaaggaaatctagctgctgtcacctgcctcgaaggcaagagtcctttgcagccaaatgtcattgccagtgaagtcactgtaaaagcttaaaaaatggagtgtgtgaggttaaactctgcttacattcttgaatattattcctcagcatagacttcagcaagcaagtcagtagctcagcagcctgccatagcaggcggtttgaacctctgacatctggccgagctcaggtggttctctcgtggtgggacattgaaatggaccctgaggggaagatcaagtgcaccatggcccccttctgggcacactcagacccagaggagatgcaggtaagaggcaggagcctagcatgtgccctgtcaggaaacttgtccactgctgttcatgggaaagtaacagttgagccttggacccaggagaatttagagacaggagggctgtgtcagaatcaaagacaaaagtttttaaaaagcaagcaaaggctagctgtagtaacgtagccttcccagggtgagctcatggtgagcactcatggacacagtgaggaacagagaagttggctttcctctcccgcctcatcatgatgcagccacccttagataccacccctcatcccctgagtaatcccagggggctcccatcagcttggaatagagaactacagcctcaccttctgtggcctcaaaatctcctttctccaccccgatagaaagtaggcagaggacatgaaacacagaaaaggaaatacagatgatggggatagttgcccactgtccctcataataagagaaatgcagttttagctgctcacagcacctatgctcccagcctctcaggagactgaggcaggagggttgcttgaacccaggaagttgaggctgcagtgagtcgggactgcattactgcactcccgcctgggcaataagatgagaacctgtctctaaaaaaaaaaaaaaagagaaatgcaactttaaactgcaatgagatctcattttcacctactagtgaataaagtttaaacagtttgcaagcacactgttggggaagctcagggaaaaagcaggaaagcgagtcatcagaacgtttcaggtagaaagcaatgctgctttcagacatggggctgtggctggatttgcgtctgtgcagaatagatgtgtgcagccctggtttagtagaaaaaggccaacctaaaggccactagcagggatcaagtccattatcctttcagtgggtgaggtagctctctgtgcactgatgtgggacaagcttcagggtggattattacctgacacaaaaataaaggtgcagaatggtgtgttgtgtggcagcactggtgttagtaaaaataggaatatatgtgtttgtgagtggatagtcatgtgtggtgtacatataaggaggtctttggaagaattcccagaaattcgtaaaactgactgcatctgggaatggggactggaggttaggggtggaaaggaaacatattttttactatgcgtccttgtataccttttgaattttctctcatgtgcttgtgttatttacacccccatccaccctctctcactctcacactcaaaggaaaagaaagtgggaaaggtgtgtcggaattgcctgatgggttcttcccacccactgttcagacaaaaccaattcgctgacaccatggcattgcaataaagactttaattgacacgaagccagccacaccacgtgggggagagatttgttactcaaatcagtctccctgaaaattcacaggctacggttttttgtttgtttgttttgagatggagtttcgttcttgttggtcaggctggagtgcaatggcgcgatctcagctcactgcaacctctacctcccgggttcaagcaattctcctgcctcagccccctgagtagctgggattacgggcatgcgccaccatgcctggctaattttgtatttttagtagagatggggtttctccacgttggccaggctggtctcaaattcccgacctcaggtgacctgccccaccggcctcccaaagtgctgggattacaggcgtgagccgctatgcccggctcaggctagggtttttcaaggatagtttggcaggcgagggagtccacttctgggtggagtcatcagacagaaacgtaaaaacccgaaaagacatttcaaagggtcaatcttagtttctgcaaggtggtgttatctgcaggaggaatcagggaaggttgcagatcttgtgacctaacaatggcttcaccttagcagaattcagcctcctctcatcctcctaacctgatgatctttcattcagtttaagtttaattttggggaaggacggttatcatttaaagtattaaccagctgggtgtggtggctcacgcctgtaatcccaacactttgggagccccaggtgggtggatcatttgaggtcaggagttcgagaccagcctggccaacatggagaaaccccacttctactaaaaatacaaaaattacccggatgtggtggtgcgtgcctgtaattccagctactcgggaggctgaggcaggagaattgcttgaacccaggaggtggaaattgaagtgagctgaggtcacaccactgcactcaaacctgggtggcagagcgagactctgtctcaaaaaataataagaacaaaaaataaactgttaaccaaatgtctcccaaagttagcttggcccggacccaggaatgattaagggcagtttggacattaaagcaaaatgggggttggttagatgagatctctttcactgtcataattttctcactttttcgcaaaggcagttttggtttcaggaccaagaaatagaacctgtctctacccaggagcgcctcaggcaccatcctttgtccatggtccagcctgcctggccttaacccctggctttgtgttgaatgctcacctgctggttctaggtgtccacaacattatggaaggccttagcagcttcacctaccccattcccagagttactgtttaggccgaagggttgtgactgctggggaattgctgtcaatcagcgtacccataccgacagcagcatgtgagactaagaagtatgtgagcttcctagtctcccctccaccttccaggtgcctggccccgggtgtgtgtgtgtccagccagggcctgccagcatccctctgcaggctgtgtgtgtgtcactctgaattcacccacagagttgagattggcaccgcgtcacattcttcctaagactgtgttgcagaattagcataagaatagcattaaaatgttagtacttttggccggtggctcactcctataatcccagcacttgggaggccaaggcaggtggatcacctgaggtcaggagttcaagaccagcctggctaacatgttgaaaccctgtctctactaaaaatacaaagaaaattagccgggcatggtggcaggcgcctgtaatcccagctacagggctgaggcaggagaatcacttcaacctgggaggtggaggttgcagtaagctgagactgcaccattgccctccagcctgggcaacaagagcgaaactccgtctcaaaaaaaaaaaaagttagtacttttaatttgcatatcttcggagcgctactatgtattttttctccttgaatcctcttagtagacaaacaaggtaaccacaaccatagccaacccgggactcagcaggctccagggattggagcggggccttgtgtccaggagcagtagagtgggtcctgcccctggtctcttgactgtgggtcttgtgttgtttctctaccagcgttgacttttggattggaaatttgaaagctgctaatgaatctccctcatgaattcatgtaactgctttgatcctaagtatatttagtctgtcccaccttggcacagtgggttctgtcaccagctcctcaacgttaggacccaggaggtccctgtggtaggtagtatgggaaggacatgatgacagggcagtgccatgggagcctaggaggggtcgggaaagggttctcctgtcttcttcacatgcatttgcatagtgtgggaatgaataaaaggtttaaaagaacctgtgttattcctgttactatttatttttccagaacatatctggtcagattttcattttctagtttttatgttcaagtaagcgtcttaagcgtgtgggaatgtcattctcctgcctttttgttaaattaaagaccaggtgggtgggcacattccttacctgtgctcttggagtcccacagggccaagtttttcttagttcctgaaggtgacagaatgagcaggcagtcgtctcatcagagttgagccaggcatctcctgtttttgtttgttagagacagggtcttgctttattgctcaggttggattgtggtggcacctcttagctcactgcaactgtgaactcctgggcacaagcgatcctcccacctcagcctcctgagtagctgggactacaggcacttgccactatgcatggctaatcttgtgttttttgtagaaatgggtgtcactggtatgttacccaggctggtcccgtacacctggcctcaaacgatttgccagcctcggcctcccaaattgttgggattacaggcatgagccaccgtgtccagctggcatctactttttagggcagttcttcctttttcaaaaagaggcttaacaattatgagcgaaataaacctcattatataaaataaaaatatcactcatggtcctccctttcactcaaaatagctccctttgtttggtctctctccaaacgcgtgggtgtcatcggtgctcatctctgttccgggccccgtggccttcagcagcagcgtttaagatgtctgtccgtattctgcacgagggtttatatcccgttctgagtgctggccatttgggtgggttccagtttttgctggtataaataattctgtgatttgcatttttatgtgaatataacttttttttttcttttggggttttcttaggatagaaacctgtatgtggggtttgtagtaaggactagcacagcttattaaaaattgaccgtggatcattgtcaaccatgtttcacaatttagaatattcagttatttaaatacttcaatttaattcaaagaataagccaaaacctttttgtattttcccacctttttattttgaaaaattatatatccacagaataagtgaaaatgaacactgatggtcgctttattaatttaaatttaccagttgttaacgtttgccacatctgctttatctttgtctttctgcctcccttcctgcatctctacacacacacacacacacacacacgggcatgcacattttttttttttattgctaaatcatttgaaagtaagttgcagacatctgacactttacttttaaatacttcaacacttatctcccaagaatgaaaacagtctgcaacataaatgaaacacatgatcacacctaagaaaaacagtggttccatagtatcgtctaacatatggttcaaaataaaatttgtctccagaagtccttgatagcttttgtttcctcagtctacgatccagttaggtttagtgcattgagtctgactgttttgtaaattccgagtacgttaaagcctttggaatgcgtgccatggactgttctgaaaaggttccccttaaaccactaggtttaaaccaatttttttccttcaaaggaaacattcagcacagctctacgtgttgaagagagagctttggtgctactctgatggggtggggactggagcctgcacttgtcccctcccctgagccactctggcagattgctgctcttggccacattgtgtcttcctaaagccagcagggttcccgcaaacttttgggccactggcctctgagtttagagtttatttatctccttggccacaatagccagctgtagtctacattgtggacgtcctgaaaactggcagttctctggcatttggctcctggattagaagcattgctcatactgcagctcgttgacagctgactctgttctccgtttcagtggcgggaccactggatgcagtgtgtgtacttcctgccacaagaggagcctgtggtgcagggctcagcgctctatctggtagcccaccacgatgactactgcgtatggtacagcctgcagaggaccaggtacgtcgagcctcgtgggggtggaggatgagcctctgagacttgtatgtaaattccccatttacagatcctctggaggtgccagtgggttgatttgtgtctggacagaataacataagaacaaagatttgtgaccagtgtgtcagtgcccattcgtgtgtacccaggagaggctgtcatgggttgctggaatctgtttagagcagatgcgtaggaaaagtctggaattagcgggtgctctaagccctcatgcctactggagaccagtgtccagattcatgccctctggagacctgtggaggcgctcacagcccacgtctgtttgttcatctcctggcctagccctgaaaagaatgagagagtccgccagatgcgccccgtgtgtgactgccaggctcacctgctctggaaccggcctcggtttggagagatcaatgaccaggacagaactgatcgatacgtccaggctctgaggaccgtaagtgtccagccccttggcttgttgtggggaaaagggagaaagaagtttgtcccatgaaccccagcactttgcttatgatttgctgtttctttcctgtgtcctcttgtctatgagtggcttcagcgagcgcctcctgggtgggcactggagcagaaagcgggagagcctggggctggacttcctgagggcttgctctctgctctactgggagagcctctggctgggctcctgctggacacctttgccttgtcagacacagtcattgctgtgggtggtcacggtggattaggccaccccctcttttcatgtgttgtcacctttctaaaattttctaagatgtaaatctgatcatgtcgctctcctgcctgaaaacctttgctccctgctacctgtagcaggggactcggcttggggattacagatggggcttagagggagggtctcttgaggcccttgggggtgtgtacagaaataggtgtgaatgtgtgcattttgggggatggggggaggatccaagccatcctgagtttctctcagaggggtctgtcacccagaaaggcatccttgcctttgggcagtcaattgtgaacactcaagccttggaggctctcagctgtctgtgctctaaccagacagggaagaagcctgttgtcatggactggaaggtggcctgcaggtggtgcaggccttcagcggggcctctaggctgggttgaggggtgtctttcctgacactggggacaggtggggagatgtgagcaaggcgggcatgtttgtggctgggggtggttactgcatgaggacgcagggggatggtctgaggtctgggcaagtggagtgagaagggaagtatttctgacagcttgccagcaggaatcttctggcaaactggaggaagccctgtgctgagcttgcctgttccccgcaggtgctgaagccagacagcgtgtgcctgtgtgtcagcgatggcagcctgctctccgtgctggcccatcacctgggggtggagcaggtactgacatgcacccttgtcagcctcctgatgtgggcttgtgagttagagcattgcgtggtccgggtgcacaattctgtgatcaaggctctttgcaaaggccactgttgtgggcacagcatgctcgggtcaggggctggggggtttattgcctgtgcgtgcaggcaggcgtcaggcctcagagctggtgttcaggctgccccagggagggaatgagggcagggagggttgttcaggtgtgtcctctgtcttaggatggtcttgtcgcattttaatctttaatttcttctctgttaagtgaatatcttacaactaatagcgtggtgttccctctaggtgtttacagtcgagagttcagcagcttctcacaaactgttgagaaaagtaagtgagaattgttgttgctgaaatagtgagaggacctgtggggtctgggttgatggctttgaagtggcattggccccaggggaacaaaggagtggtggctcgcttgcacccctgtgttgtcttggttgctgcctggagagcagccagaggccttgggagctgtcactgaaatagaggcaggcatttgcactctgctttgtttttttgtgtctgaagaagtttaggcttttttcctcacttcacataagctactgttgcggtagaattaaatgtaggatgtgtttctgggacatcagtgctgagggagccagtgctcacagcctgatgggagatggcatttctctccctggccagtaactggtttgatttcctctccaaaggggaactcccttcaccagaactgcaggctcgcactgagtcctggtgtgcacatgcgggagaaatttcttttgcttttatcacattgtgctcctgatctcatccgtggtctataggatgccccccaaggagaggatttttccacaaagcagataaaagtggtgttccagaaccatttgccggaaaattcaaagcggagaatgcaactttgagagatttttttttcctgacaaacacaatactttagtatgaatacagtaattttacggttttctttctaagatcttcaaggctaaccacttggaagataaaattaacatcatagagaaacggccggaattattaacaaatgaggacctacagggcagaaaggtgagtagcgggagccttttggccacgctgggctgtgttagggtggtcagcacggcactgaagtagcccaggccccaccctgtccctggagtctcacagtgggtcctccacatgcaaccttacctcctacgagctcccaccatcaagggtgtggtgaagctttcatggagctgcccggtgagcagatggttgcactgctcttttttttttttttttttttttttttttgaaaatggggtctcgcgctgtcgtccaggctggagtgcagtggcacgatcttggcttactgcagcctcgaccttccagcctcaagcgatcctcccacctctcccgagtagctgggactgtaggcatgtgccattatgcctggctaatttttgtattttttgtagagtcagcgtttcatcatgtggcccaggctggtcttgaactcctgggctcatgcgatctgccagtctcagcctcccaaagtgtcggggttacaggcatgagccaccacacctggctgtactgctcttagctcagcctcatctctgctccttcaggtcaggacagagcagctctcttggggttcctaggagcagagcatgtcctttcctctccaccgcactcctgtcttcattccccgtccacggcttcctgctgcagtcaggcttccgggccctgaaactgcttctgccagcaacctcgtcgttactcccacggtctccctgcaggcttcatctgctctacccgcttgtccttgtgacccgggacttctgcctgtgctggggaggtcgctttcccctcaccttcctggctgctccttaccttgcactgctccgtggcactctccccgtgtcccccgcttcccctactgcatcctctctggtaatcacgttccttctcatgtgtgaatcagtgaccatcagagccggccttcactctttactattttggattcaaatctcatgtccagctgccatcctgtcacctttccttgaatatgccacaaactggactcacccaacgcggagctatcatctttcatctttcctgccagtctttttttaaataacagctttattgagatgtagttgacataccacaaaattaatgcatttcaattgtacagttgagtgatttttttaagtaaatatatggagttagccgtcacccagtctcatttagaacatttccaggcccgacatggtggcacatgtctgtaatcccagaacttcggaaggccaaggtgggaggatcgcttggacccaggagttcaagaccaatctgagtaacatagggagaccctgtctctataaaaacaaaaaaaattaaccgagtgtggtggcacgtgcctgtagtcccaggaggctgaggtgggtgaggtgggaggatcgcctgagcccaggagttggaggctgcagggagccgtgcttgtggcagagcactacagcatggctgacagagtgataccttgtctctaaaaaaaatgggaatgaaaagagaacatttctgttacctcccaaattcctgggagcctgttgatagtctgcatccccatgccccaggcctggcagccactggtctggtttgtgtctccagtatgtgcctcttctggcatatctcaaaagtgaggtacgcagtgtgtggtcttgtgagtctggctcctttcgctgagcataatgtctttgagattcacccatttcgttcttttgaaggctgtgtagcattccacggtgtggctatccattcatgtgcttatggacgtttggattgtgtccagtttttggccactttgaataaggcttctgtgaacatggattcactggtcttagagaggatgtatgtcctcagtctcttatgcagatgccttggtgtggattgctgggtcatgtggtagttacgatcgactttttaagaagctgctgaactgttggttgaagtggctgtccttttgacatccccatcggtaacatctgagggtccaggttctcggatcctcaccagcacctggcattggctttttttttttagcataaccatattaatgggagtgtggtgatgtctccacatagttttaatttgtatttgcccaatgactgatgatggtgaacatcatttcgtgtgcttgtcttgcttggtgaaatgtctattcaagccttttgcccatttaaaaaaataacagttttattgagatataattcacataccttacgattcactcagtgatttttgtatattcataaggttgtgtaaccatcaccacatcagtttaagaaccctttcattacccattggcagtcatgcaccatttgtccgcagtcccccagccctgggcacccactcttctcctttctgtctttagcttgcccattctgggcatcttgtgtgaatggaatcagacaagtgtgtggtctttcgtggctggcctctcatgtggcttcatgttttcgggctcatccatgtcgtagcctgaatcaatacctcatttctctttcttgctgaataagattccattgtgtggatagaccatgttatttatctgtttctcagctgatggacatttgggtggctcctacttttgggctgttgtgagtaatgctgctataaatattcatccacaagtcgccttttttctccctcatagatgagggcataggagatgattctgaaagccactgtgtggtgtaccggtagaccggggtcacattgaattggagtggtgggagcgggcgttcttgccatgttcctgatgctgtgtggggaggcgaggaagcactcagggcagccccttctgtctgccagcatttcctgctgcatctccatcatctctgactggccccactttggtgcctgactgcttgggcctgcccagggtcggctacctccttaccctctgccactccttccactcctcccacccctcccaccctgtagtctccgtttcttacccggactctttctgcactctcccaggtcgcctccgtccccagcacctgcaggttcccttccacacttcgtggtcctcagcagcatcttctaaatcacattccttctgattttgaaccctgatgaaaacttctagtgacatccaccacccccactgccgcctccgggatgagtccagcccctcaccctgtcctggctgccttgggctgggctggcttctgtccagctccacaccctcaccttggggggccttgctgtctcccggcctcactcttgcccctgctgcccctccctcggccgttcaggctcctcgctgtgcacgtgttcatttactcacaaatgttcacagaacatctggtcacggcactggcccactgctgggggatgctgggccaccagtccctgctcttgtggtgctcagagcctggggagggagacggagacaagccccggtaagtcctgagataaagcgtccagtgggggttgacaggatgccactctggaagccccgtctggcacgtttatttctgggctccctccatgacccccttccttgcttttttctatcacatggggtcagccccactttgtctgcttccctcttctgctctgctctcctgagcacgggactcatgtctggttgtaatctttacagcctccagggcaggtacagagcaccttgctgccttgcttgtttgttgactgagggagggagggactgatgagggagggagggaatgagtgagtgactgagtgagggagggagagggagggagtgagggagtgacttgagtgactgagtggcctgttgcttccgtgttcctgttaacactcctggaccgagccctactgacacctgggccctgcttctcgcccattcaccaggtctctctcctcctgggcgagccgttcttcactaccagcctgctgccgtggcacaacctctacttctggtacgtgcggaccgctgtggaccagcacctggggccaggtgccatggtgatgccccaggcagcctcgctgcacgctgtggttgtggagttcagggtaggccacccaggggatgttggagaaaaaagcagaggaggcgggtggggaaccttgttttcttgcaggaaccttgggtgcctgtagagcggctcaggccttgatgatttgagcttgtgttttctttctgtgtcagcacactgtggggttgaatagaagatgcttgccttttaaaaaatgcgataatttgacatacgaaatggaaatggctgagtgttgtcattttacaattgtggcttatcagaataatttaaaaatataaattaagcgtttcagaagccatgccgtgtggcctgctctgctctcattaatagccgaggcttcgattgttaaaggcattttgagatgggagagtcagctgctttgtgcaagaaaaaatggaaaagcttccttttaattttctcatcaaagcagaaccatagtcacaaagtcattttgggaagggcatttttattaaaaggatttgaaaagctttaccctggatggagagtgtatctcatttgatgagagtggttttctctcctagcttagtggctccatcactgaaagtctgggcatttctcctgtgttacttgtttacctaatcagatttccacatgaattctggttttcatggccaaagaggggatgtcacgatccatgcgtgcgtgtgaccaggaggaagggagggaaggctgtgtggcctgagtgtcctctgggttcctcttggcagggcctttttctctccccagcatcctcatgaactggagatgatgctggggagagaattggcttacagatttcttcccaaagaaatgatgttcaggatggcccggataggagtgtgcagcccccagcctaggagctctggccgactgtcccttataggagaggactcaggtgtcacgtcagagcttgcaggttcccgcccagcccagtctgttacagaaaccgttgtggatctttgttctctctgagccccttcatacttgggggtctctttcaggtgtgcagggaacagcaagatgtgcctcttgttcttgctgccacgcttccctgtgtcctggcgggcgggtgtggacggggctgctccttcctcacaggacctgtggcggatccggagcccctgtggtgactgcgaaggcttcgacgtgcacatcatggacgacatgattaaggtaggcagggccacactctgcatagtacccccgacctgctcctgtatcgcaggcctctcacagggtcccagcttgggcagcacaggctcttctgttgggggcagtgaggtcaggtgctgccattttgtgtggttcaacatgagcattgcttggtaccagccctgttcttggctccgtgctgtcaccctgtgtcagaatctccactgggcctgcacgtcctgtcattgcaactgcccctgccagtgcccacagcttcttttctagtggggctgactttccagaggccatctgggaaccttcttaggcagccatttccatggtgggggctccattcccgggaggggtacctgaggagattcccacaggttatttacatggtaggggttagcaactgggcctacgttctccagaaccatgggctgtcctgacagcgccagtggtccttggattcatgaggactgaagctgagagtcgtgttccatccacatgagaggggcagggtgaggagcatgggccgtgctgtgtattaaggaaatgcacgtggctcctgcttgtcatcccagcactctgggaacctgaggctggtggattgcttgagcccagacgtttgagaccagcttgggcaatatagcaagaccctgtctcgacaaaaaataacaaaaaattagccaggcatggtagtgcacacctgtattcccagctactcaggaggctgaggtgggaggatggctttagcctgggaggtcgaggctgcagtgagctgcgtttgtgccactgcctccaggctgggtgacagagcaagaccttgtctcaaaaaaagaaatctcatggacaccagaggagcgggaagcagcggtggccccgcagcagcagctatgcatcgggaggtggggcttttctgcttctgctcacctttctgctctcattttcccatagtgaacatggattgcctgtgtgtgaacacttttttaagtaaattaaaccttgtggatattttcagtttgtatcttatctgcccctcacagcagaccattgactgttcgatgcttttagaaatctccttcgtgctgagccctgcgtgctctggacccatgcgctctacgcctcctctgggcccctgctcatggcctgcccaccctggctgtccctgtcccctcttgctgatacggttctgctactctggtcctgggccagtgtctgtctctcgtgtgctaaggcagatggccgagagtggtgggtatcccacagtggggtgccaggcatttttacttctatgctttccaaatccacctgcccttccccacccttagcctggcccttccagtgccctgtcttagacctggcgccacttcacacgaccagccaggcccagggccccgggcatcctccctggcaagtcctcccatcccctgccattggtcttcgtgctcctggtgagcctccgacccaggctgtcccctgactgctgccgtcctggtttgagcccctcctgctctggccgtcctccacacggagcccacatgaacttgtagatctgagtctggccacatccccactgcaggaatgccctagctggctccccacaccacacctgcagagtggcccggctggcctgggtgccctggcctgctctcctgacttagctctatcctcaaggccccctctggcccttctcctgccggctcccatttgaccgtcacctcccctcctccaggtagctttctgcatccctcctggatgcaggtgcccccagcctgccgccaggcaccggggctgtactgtcacgcatttatccctccctgtggcccggggcccacctgtcggggccacacagctgtggtggtcaccaagtttctaggtgctgggtgttctcaccagtgatgtagatatgtggtcctcagaaggcttgagacaggcagcaccaccccatcttaaaaatccggagagcgaggctcagagccagcggtgcctggggagccactgatgagagagaagtggcagagagggggcgccgctggtctgctgggcgctcggcatctttatgggagaacgcacaccccttgtgactgcagtcagtgggagccaagccggggagcggtacctctgtctagctgccggcctgtctctgcagcccccaggcccccttctgttcgcagcgtgccctggacttcagggagagcagggaagctgagccccacccgctgtgggagtacccatgccgcagcctctccgagccctggcagatcctgacctttgacttccagcagccggtgcccctgcagcccctgtgtgccgagggcaccgtggagctcagaaggtgggtgcagagagggctggggggcagggaggggctgctgcttgcccttggagttctcacccccgtggtgagcacagctggcctgggagacgctgacacgtggagggggtattcgtcctccccacaaccttgcccttccctgtcagagtggccctgcgcgtgtggtggttcccacggtcctgtgtgtgccactggtggaggagccaggaagggctctgctccccctctacagctgaggctcccttgttggatcacagctcaggaagatgggagcttacttcctgtggtcaccgatgcaccattttcctgaaccctcctgggagctgaagcaggtcagggtcagcaagtgctgcttgcgtccagggacgggcagccctgtcctgctccggccctcaccccaccctcgcccgaggagtgacttctcctggaagcacctcccaactcggggcaggcagccaggcagggcgggcgccatcacctgagctcccagggttgctgtctggggcatcagaggggccttccggccttcagtgccaggctgtgcctcaagctcccccagaccctgcagccacaccggccctgccccatgtgtggcccggctgcagggctcgggttggctcaggtgggggcttggctgcggctcttctggctggggtttttctgaggaacgtttatgtaactgcagcactaggaactcccggcagggcaggaaggaagtggggaagaccacaggtttctggaaagccgcaggagctgcagctgttcccccgctgcctcttgtgtgactacttctgctgggcccccctctccttgacaggcccgggcagagccacgcagcggtgctatggatggagtaccacctgaccccggagtgcacgctcagcactggcctcctggagcctgcagaccccgaggtagtgcctgcgcaccgggcccagtgtgcgtgcagaccctgagagcaggcgccgcctggggaggcctccctgcccccatgctctgggtgtttctgtcacaagttcttcgggccagatgatgacccctcagtggtcctgggccatctggcccctgagcagcttctctctgctgcgagctgcctgggctggaggctggctaggaaggaggctcaggtgccagggagccctcaccatcttcctgctcttcttcctacaggggggctgctgctggaacccccactgcaagcaggccgtctacttcttcagccctgccccagatcccagagcactgctgggtggcccacggactgtcagctatgcagtggagtttcaccccgacacaggcgacatcatcatggagttcaggcatgcagataccccagactgaccactcttgagcaataaagtggcctgagggctggggttctg

SEQ ID NO: 15750 - DNA, 46204 bp, Homo sapiens
aaaagtggtagcagcggaggcgagcggagggtttcccgcggcgggtgaggcgctgggtatgctgggaaggtggggtcgctttggggttctgtgtgcagcgagcatggtgtccttggcaccagggtttcggcagaggagcctagcgtgggcctacttggactcctccgcgtggggcagctcgggacacccgggcctgcaggagagcggggttctaggctggccccggctctgcagtgcagccgggtgcctgccactcgcggggctctgtcgcagtactcgtgcctggcgcctcccctcagccacagagaccgcagtagctccaaccatcgcacccctaactgggccacgagttctctgattgccagacctgttgtctttgccactcactgttctgagtaattggagagtcgtgtattcactacacgccaaccagagtggtcctgtaaaagcgtaagcctagtgtagatacgcttctgcttaaaactcttgagtggctcccagtgcttttagaacaaaatccaaacgcctttccgaagtcgacaaggcccagcttgattgagcagaagatgtgataggagatgaggagcggggggcttctgcaaaagtgcttcggtcgctcaggcttttggcacattttgcttatgcaacctagttctttctaccttagggccttttcttgggaaagttggggtaaggattcctgacctgtaaaaactcttccccaacttttatcccggtctgtcttgtagatctcaaatgctagtttcctcagagtccttctgtaaccttggttttctctttctacaacgctctgtgtatttcttgcattcatgtagtctgtaatttgtattactctctcattagagtctaagctcttggagggcaagggtcttctctagcttgtggtggtggctccagtccctaatatagtgcctggcacatagaaggtatttaataaattttgttattttattttttcgagacagagtctcactctgctgcctaggctgagtgcagtggtgtgatcgaggcgcactgcagccttgacctcctgggctcaagcgatcctcacctcggcctaccgagtagctgggactacaggcacgcgccactacactcgggtaatttttaattttaatatatgtatatttatatatatatatatatatatatatttttttttttaagacagggtctcactctgtcacccaggctggagttcagtggcgccatctctgctcactgcaacctctgcctcccgggctcaagtgattcccctacctcagcctcccgagtagctgggagtaactgggactacaggcacaggccaccgcgcccggctaatttttttaaaaattttttgtagagaacggggtctcactatgttgcgcaggctggtctggaactcccagactcgatatccttgcgtctcggcccctcacagtgctgggatcacaggtgtgagccaccaccgcctagcaaatacattttgaatgaatgtagtggaccatctgctctgcagtctgacggctaatacaattagggcttggcatggtggtttctatttcctccttgtaaatggccatgcaagtttacaactcttggagaatgaggaggggttcagagaatatctcctgaatctgtagtgtagactgcttctgggagagaacaaataataatggatgagggcattcagccagagaaggtgtgtagtgcccaccagaagaggttcatgccttcataaaattgttaacacaagacatagttccaggtttgtttgtttgtttgagatacagtcttgctctgttgcccaggctggagtgcagtggcgcgatcttggctcactgcaacctctgcctcccaggttcaagcaattctcctgcctcagcctcccaagtagcagggattacaggcacctgccaccatgctggctaattttttgtatttttagtagagacggggtttcgccatgttggccaggctggtctcgaactcctgacctcaggtgatccacctgctttggtctcccaaagtgctgggattataggcgtgagtcaccgtgcctgggctgttccaggttttgaaaagacactgtggtcctggttttagactcagcaacatcacagacaagaaaggaatcctatggattaaagttcttcactataagttttttttttcctccagttcaaatgggtaacgtgccaatgtagtaaaggtttgagggaggcacgtctgacacaggcacatgaacacccagtcatcacgcttatgaactacaaaacgatgactcttaaccttgaagtgacttcagaattgattccacatggaccacaggattagtatttcaggactctaccatatggatcctattgatatgtttgacacctggtccagttttacttcactaaactgattgatataatgtgcatgattgtctaagcctttctaattggatgaaatgccttctccgtccacaaccccctccttctcctcctgcctcagctgaatccaccttttaagccttccttgaacattcagtcagatatggccatttctttctctactccaacatttgttggacacagttttctaatgcacattacagattctgacagttctagatattctgtctgtaaaataaatgttagtacatgagataaagtggattatagcaatgttgttaaactgctggttgcaacccattgatgggtcctgaccagcaagtaaaagtgcagctgggtgccgtggtgcatgccggtagtctagctacttgggaggctgacgtaggaggatcgcttgagtccaggagtttaaggctgtagagtgtaatgatcatgcctgtgaatagccactgtgatccaacctggacagcagggagatcccatctcttaaaaacaataaaaatgaaatagagcatatcagagggccttgttcgtaggaagtcagtattgttttgtggaacatttagttgtatgcgtacatgcaggtatgtgtattgagtctcattttaaagtatatttcttactggggttatcagaaagtttgaaaatcattagactaggggataggtatgctgagattttagtagtagagttttacctggacaaattgtctactttgaacctgactgccggcctgagtttgttcagggaagattgtttctaatctatttgctttttgtttgtttgttttggtgacggagtcttactctgttgcccaggctggagtgcagtggtgcggtctcagctcactgcaacctccgcctcctggattcaagtgattctcctgcctcagcctcctgagtagctgggaatacagacgtgcgccaccatgtctggctaatttttgtatttttagtagagacgagggtttcgccatgttggcaaggctggtcttgaactcctgacctcaggtgatccgcctgccttggcctcccaaagtgctgggattacaggtgtgagccaccgtgcccagcctgtttctcatctatttgtgtaagaattccatgtttacttactctagataacttcaaaagaaaaaaaactctggccaataaaatgccataggaatgtttagggatatgtggagtaggcattctttctaagttttcctgaagatgcaccaatgtttaacaagaaaggaagggcagtgtagaacacctattgctttctgcatggtaagagggatgggtattgggagagcccacacctgctgaggagtgcctttagactttgagcggtggtgtttctctccctcccagaaatagatctctttggggagacaggccatacaagacgtgaatctggtgacattttacttgtttgaagcaaaatttttttagatgatggagggtttttaaaaattgcttttaaaattaaaatttgaatagataagaagtaatcactataaaaaataatgaagcataaggaatgctagtattagctgggtgtggggcactcacttgtagtcccaactactggagaggctgaggcaggaagaatgcttgagcccaggagtttgagtccagcctgggcaacataacgagaccccatcttttaaaaaaaaaaaaaaagaaaaagaatgctaatatcgtgaacatttatgttcccaccacccaatttaagaaaaagaacaatacttttgaagtccactgcgtacccctccttgatcccatctctttcccttctcttttaggagttaactatcctgattccttgctatgctttttagtgtgatccctgaagaacgtatcactccattttgcatagctataaatttcatagaaatggaatcgtattgcatgtgttgtgtgatttgctgtttttgctcatcattatattcctgggattatccatttttaggtttatgtgtgactgtaatttattgtttagatgaaagttttcctggtttgacttgctctatcttcatatttttccttaagctaagggttcagcatacgaaggcagtattggtggcacttctttaacagtaccccatctcttctcctagccttgagggctgcacctagatgaacttgtgaggctcatttgaaccttttggaagcaccgaagcctgctgaagtttccagacatctgtatgaatctgttgtagttttttaatgttatatgctgaatataaaaccaagtaactcctgctggaaacatttacaatatcgattaacaaatactatcagtggctttgacatttttgtcagtttcttgatttttttccccgcttttgtctccccttcccccctccacattttggggcattgtgctgttaatagattttttttctgttcgtttgtttatatacctcctgtttccttctgatgttaatagatttctgacagtcagacttgtccacaagaactcaactggcaaggctgcttttctgtgctaaaactggggagctagtgggcaccatgaagatcttctgcagtcgggccaatccgaccacggggtctgtggagtggctggaggaggatgaacactatgattaccaccaggagattgcaaggtactgggttggtttacagcaggctgcagctgggtggggcacttgatctcaaagcagatgccttgggctccagtctgagcgtgggctaggctgtcacccagtgcttatgatgagggctggtgttggtcctgagcaggtctgctcagccaggtaggtatatgtagcagttaggcaaaatcatgcctgtttggagagtcagacattatgtagcagccttagcagagcctcagcatctgtttaacggagcaaagaaaacccaagcctcagtagtgttgatgaagttgaatcatttacttgccttactgaaatggtgacatgttcatcatatggttaaattcttttgaatgaaaaaaatgaaaatggttttttttttcccttagaagaaatatttaaaagtatgtgagttgttggccaggcgcagtggctcacgcctctaatcctagcactttgggaggccgaggtggccagatcacctgaggtcaggagttcgagaccagcctgaccaacatggagaaaccccgtttctactaaaaatacaaaattagctgggcatggtggctcatgcctgtaatcccagcttacttgagaggctgaggcaggagaatcacttgagcctgggaggcagaggttgtgttgagccgagatcgagccattgcactccagcctgggcaacaagagcgaaactctgtctcaaaaaaaaagtatgtgagttgttatgtagcaatcattaagtgcattcagtgtgccagcattgtgctaaggctgtggataccagatgaagaagatcctgttctcatcttcaaggaccatgcagttttgtggaagagacaggcacatacaaaattacagcacaaaagccaggcacggtggctcatgcccgtaatcccagcactttgggaggcaaagggcgggcgggcgggcggtggagggggtggtggcggctgatcacttgagggtcaggagttcgagaccagcctggccaacacggtgaaaccccgtctctataaaaaaaaattagctgggagtggtggtgggcgcctgtaatcccaggtactcgggaggctgaggcaggaaaatcacttgaactcgggaggtggaggttgcagtgagccaaggttgtgccactgcactccagcctgggtaacagagtgagactctgtctcaaaaaaaaaaaaaaaaaaattacagcacagtgagataaaggcacaagaggtcatggaagcagcaagaaccagctgaacttggggtgggaggtaatgtttgaataatttctcagttctaaaggaagagaaggtgaagtttgagcagcagggattacaggtaagctttcagatgagccagattgtggctgggtgcagtggcctacacctgtagtcccagctacttgggaggccaaggcaggaggattgcttatgcccacgagttcaacatagtaaaacactgtctcacaaacaaacaaagaccaaaaacaggctgggcacagtggctcatgcctgtaatcccagcactttgggagaccaaggcgggcggatcacctgaggtcgggagttcgagaccagcctgaccaacatggagaaaccctgtctctactaaaaatacaaaattagccaggtgtggtggcgcatgcatgcctgtaatcccagctgctcgggaggctgaggcaggagaatcacttgaacctgggaggcggaggttgccatgagccgagatcgtgccattgcattccagcctgggcaacaagagctaaactctgtctcaaaaaaaaaaaaagaaaaaaaaccacacacacacagatgggctattctggggagcagctagcagtttagtgcagctggagtgtggtacaaaagtactatggtaagagaggctgccgaaagcatacgcggggtcattttgtaaagggtggtagcaaaatgcaggaagaggaacatgagtttaagtccaagctttgccacttctttactctcttggccaagttacttctctgagccttaatataaaataatatatacttcaatatagtaatacattatctcacagtataatacaattatcttagaattgtttgatgattaaatgtaatacagtatctggtgcagaattagggcttaaaatatttacttttttttctttttttttttttgagacagagtctcgctctgtttcccaggctaaagtgcagtggcacgatctctgctcactgcaagctccgcctcctgggttcacgccattctcccgcctcagcctcttgagtagctgggactacaggtgcccgctgccacgcccggctaattttttgtatttttaatagagacggggtttcaccgtgttagccaggatgatcttgatctcctgaccttgtgatccgcccgcctcggcctcccaaagagctgggattacaggcgtgagccactgcacctgcccaggtcttaaaatatttctaaacattttggacattattttcttgttttattgttcagatggagtcttactctgttgccttggctggagtgcagtggcgcagtctcggctcactgcaatctctgcctcccaggttcaagggattctcttgcctcagcctcttaggtaactgggattacaggcatctgccaccacacctggctaatatttgtgtttttagtagagacttggtttcacctgttggccaggctggtcttgaacttctgacctcaggtgatccacctgcctctgcctcccaaagtgctgggattacaggtgtgagccacagtgtcaggcctggacgttattttctgagtgatatattaaacaggagagaaagaggattggattgcattttggaacactcactgagagcggtgtggagaggagagcatttggggatattgtagtcccagagctgcatagtcccagaggagacagctcgggggaacttgagtttggtaactcactggatatgatggagggagagagaagattcaagaagcaccaagacttctggttagaatgacaaagtggatggggcctgcaagggaggaatgggtggtgtggggaggggaacacgatggagattaggcgtttaggtttggacatccacatagagatgccaatggcagatagaattttgggtctggagacagaatttgtagttgttggaactgaaactgggagaggttgcagtctctcaagggggtgtggaatgtgaaaggtagagggctgaagaaggaatcccggaatagctgaggaggcaaagaagggcaagggagatagccagcatggaaaggaagaaagagggagtgtgtctagcaaggtcagaggcactgggaagtcccagatactgatgactgacatcagctgcaggagtgagctggtggtggttaccgagagtgatgtcagtggagtggtgggcagtaagtgtgaagaggccaggaaggtggtgagtgagatgccttttaaatagtgagcagaggtagaaaggactacatttcagctaagcatccatagctggcttcagatataaaaccttgatgtgccattaaaaaaaaaaaaaaaagaacccccttctttcagtgcaccgctcttcaaagtgtggaatgtggaccacctgtggcacaattgcctggagcacattagcccagccttctcaataagagtgagagtgtgtgtgtgtgtgtgtgtgtgtgtgtgttctgggactctgcatttcaggtaagctttctagtgattctagtgttgacccaaggctggagggcctctgttttaatgtgagctccttagctgtccccttgaattcccagaaagcgtggcagggcctgcctagttctgggtgctcatcccgaccccgcctgagggttttcagtgtgtgaattactgcagtaggaaatatggagaagtgattctcctccctttactacggtattggtgaactctttagttttccctgatgatgttaagtgaacgtgcccagtggggtacctgtcacatatacagtgggtgtatgtgagtgcttctctttccccggctgctctccctaataccgcatcagtggttatctccaggcagagatgtaggccaggttaggtcaagtattaggcagattgagtctgagtttttcctgaggaggaaaatgtgtagtgtatagcaagatcaagatgctagtggctgtggaattactgtgacagggctaactgccgagaccagctcggtcgtggagaccctaacccagtggcgctagaggaattaaagacacacacacagaaatatagagtgcagagtgggaattggggggctgacagccttcagagctgacagccacgaacagaactttacctacatatttattgacagcaagccagtgataagcattgttcctatagattatagattaaaacgggaaacaaagggatgggctctggctagttatttgcagcaggaacatgtccttaaggcacagatcactcatgctattgtttgtggttcaggaacgccttaagcgaaagccgccctgggtgggccaggtattccttgccctcattccagtaaacccacgaccttcagtgtgggcatcatagccatcaacgagcatgtcacagtgctgcagagatttgtttatgaccagttttggggcctgtttttggccagatttgggggcctgttcccagcagctaactactggagcatttttaggtctgagaacatctttctctgagacttttttctgcagcactagagaataacagcttgaaactctattaaaataaagtggccaggtgcagcgacggatgcttgtattgtagttctgctgaggcaagaggatctcttgagctaaggagttcaaggctgcagtgcccaatgattgaggctgttcatagccactgcactacagcctgggtgacataacgagaccctgtttctaaaaataaacaaaaaaataggccaggcgcagtagctcacacctgtaatcccagcactttaggaggccaaggtgggcggatcagttgaggtcaggagttcgagaacagcctggccaacatagtgaaaccccatctctaatgtaaatacaaaaattagccaggcgtggtggtgagcacctgtaatcccagctacctgggaggctgaggcatgagaatcacttgaacttgggaggcagaggttgcagtgagctgagattgcaccactgtactccagcctgggtgatggggtgagaccctgtctcaaaaaaaaaaaaataaataaagataaaagacaaccaaaaaatagtttaaaatagatgacacgtttgttctatctgtttagcaatgtgtttatatatgtgaatactcttgtgtgttgatgtgtatcatgcaaaggttactgacttttttgttttttaggtcatcttatgcagatatgctacatgacaaagacagagtaagtgtaaaaggaaactattatcttgatgtggggtgttttgaagtcttggattacaagaaggttaagaatccctgggggtcatgatgttaaatgatactgagaggcgtatggtgtagaagtcaggaaatcagttgggagactgggtcctacttctggctctatttttgttgtttaatctcccagctttatcaagatagaactgacaaataaaaatggtctatgtttatggtaatacaatgtgatgaatatatgtgtatggtgtaaaatgattgaatcaagctaattaacaaatctaccgcctcatacttttttgtgtgtggtgagaacatttaagatctactcgcttagtaatttttaagtgtacattattaactatagctcacaatgccgtacagcagatctccacaacttattcatcctatctgactgaaacatcagatcctctcccttagcaggtaccattctctgggcttctgagttcaacatttttttttttttttgagacagaatctcgctctgtcactcaggctagagtacaggggcgagatctcggctcactgcagcctcagtctcccgagttcaagcgattctcctgcctcaacctgcctaagtgttgggattgtacctagtattgggataatactattattatactattatacctagtattgggattataacttgggattacaggtgcgtgccatgacacctggccttcactgtagttttaatttccatttttaattttaattttatttttttgagactgggtctctgttgcccagtgcagtggtgtgatctcggctgcactgcagcctagacttcttgggcttaagcgatcccccaacctcagccttcccagtagctgggactacaggcatgccaccatgcctggctaatttttgtatgttttgtagaggcagagtttcgctgtattgcccaggctggtcttgatcccctgaggtcaagtgatccacccgccttggtctcccaaagtgctgggattatgggcatgagctactgcgcccggccatcgtgtgcttgtttaccatgtgtatatctttgttctagtctagggttatgaacataggtgtgattcttgatagacactgccacattgccttcaaaaagggttccagattcactgtaatatcttcaaaactgggtcattaaaaagtgacagctaatttaatggcatcgttaaagtgaaggctgtgccatccctggtttacaattgaggacgctgttcatcaattttttttaacttaaaaaataaataaaacaaggccaggcacggtggctcatgcctgtaatcccagcactttgggaagccgaggcaggcagatcacggggtcaggagatcgagaccatcctggctaacatggtgaaaccccgtccctactaaaaatacaaaaaaaagccgagcgtggtggcgggcagggcctgtaatcccagctactcaggaggctgatgcgggagaatggcgtgaatctgggaggcggagcttgcagtgagccgagattgcaccactgcactccagcctgggcgacagggagactccgtctcaaaaaaaaaaattgtggtaaaaacacataacataaacggtcatactgattgtatctaagacataaatgcacttactttgacaatgaaatagttctatatttctgtgaaaaattatttcacccagactaaacatttttgtgctttacctcagaggcaacgtcatttcttttttttcttttttctttctttctttttttttttttaacaagaatgagtctccctctgttgccaggctttagtgcagtggtgtgatcttagctcactgcaacctccacctcccgagttcaagtgattctcctgccttagcctcccaagtagctggggttacaggcatgcgccaccatgcctggctaattttttgtatctttagtagagatggggtttcaccatgttggccaggttggtctccaactcctgacctcaagtgatccacccgcctcagcctcccaaagtgctgggattacagatgtgagtcactgcacccggcctggtaattctaaagaatattcagttctagatattttctaattccagtctgatttagtcttttgcctatcagtttagaagtgtgtttcttaatgtatgaaaaattttttttcttcagttgtgtttctgatattaagatttttgacttgttttgcattgtggtcagaggatatcacccttttgatgccagttctgtattagctgtctaatgttatttaacaaattaccttaaattttaatagcctcttaatatttcttactaacttggcaggtcatcagtctatttaaaagatttgcacatattttttccatcatctttagttattttcaacagaagggtcactgtgcctattgagtcagaccgttatagatgaaagatgtatgtgtttactaaagacagaagtaaaaatcttcaagatgcaaagaagttattttctgatggggaaaatactttttagtgaagctctctgagttagagtcggtaaaggaaaacaagccatacatattgcagcagagcggctttaacacaaggagctggctacccagctgtgggagggctagaaagcaaatgggaacgctgagtaacctaacagtagagattgcagggagcagttaccttgcctagggctgagaaactaaacgagaagattaggatttccagaagccacaagcattgaggagagatcctgtggaccactgtccaagtacggctgcagctctgaggggcccaaggagctggttatgggatcattgggaaaagttggagtctgcaatcaactgcccctaccgagaggaccctgatgagaacagcagcatgcagaaaggagcaagcctgctctgtcctcctaccttccagtcgccctcttggtcccccttttggctgtacctaacagttggaaaaaggagaacatggtttgcagggctctggcatcacttagtagaggatagaagagtgagtgtggagcagggacagtcgcttaataaagggcaaggggctgactcacaagacctgcccaactcagccagagctgttctgccaggggccagaaaggccatagggccctgacttgcactgccactgccagctgtgactctagaactttgcaaagcacctttccacttacttataataactggtagtaagtgacggccatgtcttccttagaatgtaaaatactaccaaggtatccgggctgccgtgagcagggtgaaggacagaggacagaaggccttggttctcgacattggcactggcacgggactcttgtcaatgatggcggtcacagcaggtgccgacttctgctatgccatcgaggtaagccattcccttcaggtgtgtgtcctgcatcttgcatgggaaatcccctatgctcttgcactttccccgtctgttccttcacaaacattcatggagtgctcactctgtgccaagcacagagccaggctctgagcgtatagagatgagtcagacacagttccttcctccaggagctaattttctcctctgtcagcctaggctgcacatcagaatcactaggagctttagaaaatacttacaggctgggcacagtggctcacgcctgtaatcccagcacttcgggagggtgaggcaagacaattgcttgagcccaggagtttgagaccagcctgggcaacatagtgagatcccatctctacagaaaaacttttaaatattagctgggcatggtggcatgtgcctgtgttccagctattcttgaggctgagatgggaagatctcttgagcccggaaagtcaaggctgcagtgagccatgatttggacttcatgtaagaaagcaaaaaattacttctaccttgtttaagccagttattgtgggactttgttgtttccaactaatcagtatatgaactcagttttgtaggggaaagtatttaaatacatgcccccacaccaccacactccagcctgggtgacagagtgagactttatctcaaaaaaatcaaaacgaaacaaaggctgggcacagtgtctcacccctgtaatcccagcactttgggaggccgaggcttggatcatgaggtcaggagttcaagaccagcctgaccaacatggtgaaactccatctttactaaaaatacaaaaattagccgggtgtggtgatgcgcgcctgtaatcccagctactcaggaggctgaggcgagagaatcgcttgaacccaggaggcagaggttacagtgagccgagattgcgccactgcactccagcctgggcgacagagtgagactccatctcaaaacaaaacaaaacaaaaaaaccttatgcctagtccccagccctaacagattttgatttaacttttctggggtgaggcctgagccttgggacttgggaatgtgcggcaaggttgagaaccactaccttaaatgtccctatggagtcagctctcttatgtttaccaatttgtcatttctttaataaaacattaaacagcttgagcccacagagcaagaaaaattaaaaaccaaacaaaattaaaaattaaacatgttatttttctcataaaacaaataatgcatattattataggaaatttggtaaataccaaataaaaatagtatgttgacccaaagttaagtactgttaacattttggtgtatattcttccaagttttgggggcaggcagggagcatgtatataaatactttccctacaaaattgggttcatgtagtgattgagttggaaataacaaagcctcaaaatcactgtggtttaaggtagagtagttttttgctatctttttcgtggcgtgatctctattcaccgcaacctccgcctcctgggttcaagcaattctcttttctcagcctcccaaatagctgggattacaggtatgtaccactgcacctggctaatttttatatttttagtagagatagggtttcgccatgttggccaggctggtcttgaattcctgatctcaggggatccccccacctcagcctcccaaagtgttgggattacaggtgtgaatcactgcgccctgccttgttcctcttttttaaaagtaagaataactttcccaggaatttctattatagcaaacctctccttgggtaccatcggctagaatgaggttaaatctcatttcttatctctggcaagagggattcagttactcttagctcagacaagtgcaccactgcaaaggtcagttccccacgctgcaccctcacctgatttcaggggagaggaggacacagaatggatgtcgggaggtcatcttcagtgtccactcctggtagtgttttgggtgagatcttgagcttcttgatgggctgaggagaaggaggtgtgaaggtaccagcttgcaggttcagggagaggtgactgatgagtcagaaggcagcaggggtgagggacgacactggctttggatattgtcagggtggaggcaaagtgattggtgagaactagggtttaaggccctcaaaccacatctaaaaacatcaaggcaaatcctagaaataatttgaaatagatgatgaagatttttctaggagaacatgtgtgtgtattccatgtaaatactgcgcgctaatcaattgcacaactggagctgctcacgtaagtactctttacgaaaggatacagcatttgtcccttgattatagtaaaaaatatagtattcatggtagaaaatgtgggaaatacagaaaaggatttagaaaaaaggaaaatcttatcaggaacagtctcggtatcattttgtggtttccacttcgtgtgtagggccacacgtgagtctgtttgttttacatgctagagctcttggggctgtggaatctagactggataagttgaaaacaaagagttggaggtgcttatttatgttcagggaaactcgaagagttcagggaagacttctggatgggggattcatgctgccctgggaagtggggtttgatttggcaggtggggccaggatagggaaggctcagtgatcatgagatcattgtggctggagtgttggttgttgggggaatgggggaggaagactgggaaggtaagggagggcctccaaagcagtagtttccccttatctatggtttcacttttcgtgatttcagttacctgtggtcaactgaggtccaaaaatactaaatggagccaggtgcggtggctcacgcctgtaatcccagcactttgggtggctgagacaggtggaaaccttgagtcccagagttggagaccagcctgggcaacatggcaaaaccccgcctctacaaaaagtagctgggcatggtgatctacgcctgtagtcccagctacttgggagattgaggtgggaaattgcttgagcctgggaggtggaagctgcagtgatcatgccactggactccagcctggacaatagagtgagacccttctcaaaaaaaaaaaaaagaaaaattaaatggaaaattccagaaattatttataagttgtaagttgtgtaccattctgagtattattacataattgttctatttttagttattgttaatttataaattattatttatatttattattgtgcctaatttataaattaaacctggtcataggtaagcttggaggctgaagcagctccactgtgaatgctaatcctccacgctgacttctgaccaaccccagcttcaggaatgcctctaaaatttccgctctcatgcactttgatgtaaatcctgccctcaggtcagaacaactttgatgttatcataaatacatacttaccgtaaatcctgcccttcgtcaaattccctgtggtatgtaagccctgcgtctgagccataacagtgtgggggcccagtttctcactgcccgagacaaggcttctgtttgtatgtctctataaagtgtgtctttctgagaagctggatttgccagtctttcctcagcctctcagctcccgtggcctgttggggtaggtttgcatagagctgcccaccatggaacagtatgtatgtatagcaaaaaaaaaaaaaaaaaaaaaatggtatacataagggtcagtactgtctgaggtttcaagcatccaccaagggtcttaaaatgtatcccccatggacaagaggcactgctgcaccataagaaaatagaggctgtgttctgccaacagtggggatttgggacaattttgagcccagaggatgacctacttactcacacctacagtctgctctcctctggagggcacagcacgcctcccaggttcgtgaggcaagtccctttcctggctttttggcgtcctcttgtgcggtactgacacctactgctcttactaagtagtgcagcctcctcaggatccccggcatccccgctgtgcctggcacggaatgagagtccctaatcacaagttaaagccagctgaatctcagccctttttcatgatgcacatttggagaataaagtatttaagttacatatcttaggaccagaatcaaggaatagcttgctcaccttaaaggtcagactactgtttaatttattgctcatttttccttgggtttcggctctattttctaggttttcaagcctatggctgatgctgctgtgaagattgtggagaaaaatggctttagtgataagattaaggttatcaacaagcattccaccgaggtgactgtaggtccaggtgagatttacacaccctgtgttgaaagctttgcttgctcttgtgtgagagaggaaaagggttattccagttacctggaacaaatccaggtcatagcatagaagtgggacctctctgtgtggagctctgacagtaaggacttggtttctcttgatgtttattttcctgctagttaaaactagtcaacaaggagtagactagagctagtcaggtccagcaatggagacgcaaacaaaacctacatttgctttaagcaaattggaattcttatggggctcaactcttgagtttcaactaccaataattacgccttggataaacctcattggctacgatactgccactgctcaaagctcaactctgagtttcatcaggcagaaagtacttagttcttttatttatttatttttttgagagagagtctcactctgtcgcccaggctggagtgcagtggcgctatcttgcctcactgcaagctctgcctcctgggttcacccatcctggctaacacggtgaaactctatctctactaaaaatacaaaaaattagccaggcatggtggtgggcacctgtagtcccagctactggagaggctgaggcaggagaatggcgagagtagttctgacattctgcttctgcatacaacatgaacaattttcctgtatagcattgtctcttaaggtttccagaatatgtatatgtacacacacacacacacacacacatattttttttttgagacggaatctcactgtgtcacccaggctgcattgcagtggtgcaatcttggctcactgcatcctccacctcctgggtacaagtgattctcctgcctcagcctcccaagtagcggtgattacaggtgcctgccaccacacctggctgctttttgtatttttagcagagacggggtttcaccatgttggccaggctggtcttgaacccctgacctcaggtgatccgcctgcctcagcctcccaaagtgctaggattataagcgtgagccaccatgcctggcctccagaatattttttatagtctagaactttgtttcagtctttgaaaatttcacatgccactgacacttagagaacatagttgaaagatttgcaaaggaaaaactgtggtgaagttatggataacaccatgggttttttctaattttttgtggagatagggtcttactatgttgcccaggctggactcaaactcttatgctaaagtgatcctcccatctcagcgacccaagtacctgggactacaggtgtgcactactgcacctggctttttcaccacggttttggagaatgcagtatcattctgaattgaagcttctacctaaggtcaacattattctcccatttaacaatttttttttaatggagaatctgaaacatgtacaaaagaagtgggtactatcttatttatttatttatttgagacagagtctcactctgttgcccaggctggagtgcaatggcaggatctcagctcactgcaacctctgcctcccatgttcaagcgattctcctgcttcagcctcatgagtagctgggattacaggcgtgcaccaccatgcctggctaatttttgtatttttagtggagacggggtttcaccgtgttggccaggctagtcccgaactcctgacctcaggtgaccagcctgcctcggcctccgaaagtgctgggattacaggtgtgagccaccgcgcccggcctatcttttttatttttaaaatatacaatagagtgctcaaatcattccatttacaatcaacgttattgaagtatgatttacattaaatgaatatccattttcattatggatatttgacaaatataaacacacttgtaaccaccatcaccataatgaagataatagaacatctccatcatgcccaaagagattcctcataaccctttctatcagtccccccatatcctggtcctaggcacccactcatagacttcattatagattagatttgcctgtctaggatttcaaggaagtggaatcaaagaagtgtggactcttctgtgtgtgtgctctcttttttatagcgtgatgctggtaagattcttccacactgttcatgtcttgggggtccgttcttttgtgttactgagcagcactctattagatagatgtaccataacttgtttatctctctacctgttgatggacagggatttcttggataggtctttagattcactgatcttttcttttgcagcatctaatatgctgttaagtatatttagtaaacttttcatttctctttctttgttgttcttttttttttttttttgagacaggatcttgacctgtcccccaggctggagtgcaggggtgtgagcatggcttattgcagctttgacctcctgggctcaagcagtcctcctgcttcagcctcctgtgtagctgggaccacaggctcatgccaccatgcctggctaacttaaaaaaaatttttttttgtagagatgggatctcagtttgttgcttaggctggtctcaaactcctgggctcaagcgattctcccacctcagcatcccaaagtcctaggattacaggcgtgggccgctgtgcctggcctcatttttgatattgtattttttaatctctgaaagttccacttgattctttttcataacttccatttttctcatgttcatagttttctataagcacatttattttagctttttgaacatccttatcttctgttcccaccatctttgttttttctgggtttgttctcttgactcatttttatccttattctgggtcacattttccttcttcacatgtctaaccatttttgtttggatgctgtggctatttggaattccccattgttgagtgctagacttcgttggttttgctttttaaactttggcatgcagttgggttacttgcagttcagattgatcctttcagggcttgtttaagctttctttggagtggggttagagtagctttaagtcaggccttctcaacagtagtgctgtgacgttttggcattctccaactatgtgacattttgataattctttgttgtggaccctgtcctttgcattgtaggatgtttagcagtgtccctggcctcttcccagtggatgtcagtagcactcccctcctcccaccattcttgccaactaaaaatgtctccagactgccacgtcttccttggtctcgagtgtgtaaaattgccacctgttgagaaccactgctctaaggctgtttagccagacagttactgtaacctttctggagtgtctgctgagagctctaggtgctcagcagggtttcccttgtctggctgatcagaacttgaatgtttcccaggcctctgagagctccggagattgttatcactcatgcaacctttgctcggcttcacagagtattaccctgtgtgtgtgtgaatgtattaacacagaccctagaggaaccctgtgcagcattctgaaggctttttttctgtgtaatttcctctctgattctctgcctggcaagttccagctgcttccacttccctgaactcgtttcctgtctgtttaactcagcaagactgccgtgctctgtgtcacctcttaccctatactgtggtctggaaagggtctcctggctgatagccagagcagggtaagggttacttggtttgtttcccttcttagggagcaaactgtgttgcctcttgctcaacatctgaaaacacttgtttcatatattttgcccagttttctagttgataacagccggagggtaagcctgatcccacttattccactatggccagagtggagattgattcatttatttatttttttttgagacagtctcactctgttgcctaggctggagtacagtgatgcgaacacagctcactgcagcctcgacttctgggctcaagtgatcctcctgcctcagcctcctgagtagctgggaccacaggcaggcgccaccatacccaactaatttttttgtttttttaaatttttattagaaactaagtcttgcggctgggtgcagtggcttatgcctgtaatcctagcactttgggaggccgaggctggcggatcacctgaggttgggagtagcaaccagcctgaccaacttggagaaacctgtctctactaaaaatacaaaattagtcaggtgtggtggtgcatgcctgtaatcccagctactgaggagattgaggcaggagaattgcttgaacctgggaggcaaaggttgcggtgagccgagattgcgctattgcacttcagcctgggcaacaagagcaaaattctggctcaaaaaaaaaaaaaaagaaaagaaaagaaactaggtctcgctttgtttcacaggctggtcttgaacgccaggcctcacacagtccttctgcctcagcctcccaaagtgctgggatcacagatgggagccactgtacctggcgagatcatttattcttgaaaatttatccattttgacggcagggagactgatctgcagggcagccttggccatgaagtatgctgactctgcctccaggcagcattgttcacacacacctcagcttaggccaggcccctcatatgatttcttattaaaaaaaaaaattttttttagatagagtggctctgtcgcccaggctggagtgcagtggcatgacctcggctcactgcaacctccacctcccggattcaagtgatccttccacgtcagcctcctaagtagctgatattacaggcatgcaccaccacctggctaatttttgtatttttagtagagatggggtttcactatgttggccaagctggtcttgaactcatgacctcaagcgatctgcctgccttggcctcccaaaatgctgggattacaggcatgaaccaccacgcctggccaatttcgtaatacttttcttcatagcgcttaccactgcaatcattaaatcattatgtagttatgtatttaatgtctgtatccccacccagctgaggcatcctgaggtcatgcactgcgtgggttgtattaactattccattccgttatttgctccgggcctgtcatgtaaaggagttaggtaatttttgtaaagtgagtagattgtcagttgtgcttcatccataatcccttgtaaatgtgactttgtttccgatcctcagcctgacaagtggcttcctcattgccaagttgggtggtctttcctctgcttttcctctctaaccactgccgctttggtacttctgccattccttccttcttgaaactctccctggaccttagtgacatctcttcatcttggttctcctgtgttgctttctttctgctccagatgtatactttccaaggttctgctctcagccctttttaaaagtggcatctgaagttgcctgttccccagagctgggttacatgctgaggcttgtggagagccaacccagggagcagcgtgtgttcatccgtccattttgttcatttggaaagggcttaggaagctcctggggtggctacctgcttcagactcccccaccccgtgcccttatacattagcagtcacactcaaaataccaggccctcaagaagtacttgttaaaatgcactggaccataaagcttgaattttttttttttaatttttattattttttgagacagtctcactgtatcacccaagatggagtatggtggggcaatttcagctcactacaacatctgcctcccgggttcaggcaattctcatgcctcagcctcctgagtagctgggactacaggcgcgtgctactacacccggctaatttttgtatttttagtagagacaaggtttcaccacattggccaggctggtatcgaactcctggcctcaagtgatcagcccagcttggcctctcaaagtgctggaattacaggtgtgagtcactgtgcctggctcttgatttttattttaatgaagcaatttggactataaagcattttaagttatataattggtttaaacattcaggagatagaattggcagagtgggtgatcagtgggttgtagggtgacagaaatcaataatttatctaatgtgtgttgactgttacggggcactagaccttgtgggtgctggggtacagtagtggacaggcagtcagcggtcctgctgtcctggaactagtaaatgatgcccagattcctggactatgtgactcattgattgattgaggcagaaaccctggagggaggagcaggcgtgttagctggggtgggtgggatgagttttggacagtgtattccagttggagtttgatgtgacatcagagaggatgggcagggcttctcgggagggtggtctctgtggcagaagacagaagtttcttcttaagctcctccacgtgatactgtcatggagcacaggtgagcttcataggaagtgtgcttttttttttttatcttcatcatcccgaccaccaccacatgagacagagcccattcacccgttttactgatgaggcaactgatggtcagaacggagggctcagggataggaagtgagatccaggccaggctccagcctcgagctcgaggttcacgctgtctctgttgtgctcttctatcagctgctctctttcttttttttttttttttgaaatggagtctcactctggcccagattagagtgcagtggcgtgatctcggctcactgcaacctctgcctcccaggtttaagtgattctcctgcctcagcctctcaagtagctgggattacaggcacccatcaccacgcctggctaatttttgtattcttagtagagacagggtttcaccacgttggccaggttggtttcaaacttctgacctcaggtgatctgcccatctcagcctcccaaagtgctgggattacaggcgggagccaccgcgcccggcccctgtcagctgctttcatgcttctcttttccttgtgtcatctgtgagacttgtgctctgtgtaggggaaatgagtgggctttgtcagattataattcatgaggcattaaaagtgtttacagttaattctccctgatgaatagccccttccaaagtctattttggctcttggctcattaaaaattataattgtagaagtagcagtacattactgaggtttagaaaacagttaacagaagatccctcccaaatcctactcttctctaaaatcctactgtcctaaaacaactgttatttaagagattgtttggtgacaaggcgctttcattaagggaatttgccatagtgatctggggattctaagtcatggatctcaattttggctgccagagcctaactcacagtagctggaagatcatcagagaaccttgttgtcttgctttggctttccctccctctccctgcaacctagaagtatttgacataccagcattctgtttttgcttttcaaataatttttctaatttagtggttaatagtttaattgttaatttatatctctctaattgctaatagggatgaaaaagttttcataagtttgatttctgttttgaattttctgtttatatttttacctggtttctttttgggtgtgtgttttttttgtttgtttgagacagagtctcactctgtcgcgcaggctggatcactctgtcgcgcaggctggagtacagtggcacaatttcggctcactgcaacctctgcctcccaggttcaagtgattctcatgcctcagcctcctgggtagctggggttacaggcgtgtgccatcacacctggctaatttttgtatttttagtagagatggggtttcgccatgatggccaggctggtcttgaactcctggcttcaagtgatcctcctgccttggcctcccaaagtgctaggattacaggcgtgagccaccatgcctggctaatttttgtattttttgtggaaatggggttttgtcatgtttcccaggctgatctcaaactcctgaactcaatccattgggtatttatagttttcttatcattttttgcagtctccctcccaatattaagcatacagaatagctgtaagagcagtacagtaaacacttatgatcccttaccctagatttatcaattagcgttttgtcatacatttacatatggattttttttttttcctgaaccattggcaagtcagttgcagacatcctgacacttctgaatacctcagcatgtatatgtgcttttagcgtgatggccccttaaccacttatctttcccatatttgctgtaaatatttttcctagtctgttgcttatgtccaactctgttttcttgtgtttttcagagggtgacatgccatgccgtgccaacatcctggtcacagagttgtttgacacagagctgatcggggagggggcgctgccctcctatgagcacgcacacaggcatctcgtggaggtagtagacggagggctccctcagacgtgtctgtggtctcagccagctcacatagcactcactcatgcaccgtgtcccacacagcccaagccctcagcacctctgatacacctgggacacccctccattcctgggggggctctggttctcctcacttaaaactttcatgtcccttgaatgccaaatcttaataggttagagttgaaaagcaagaaactatattcaaattcagttaagttcagcaaatattctcaggaaggcgatgcttgagctgtcagtcttgagaagtgatcaggtgttggcctggcagatggaatatttctggtagaggagagcagcacgtgctagacgtgagactgaatcggtgcggtggctccggagcctgctttggattttgtgctgtgtgggaggcaggagagatgggcttagcaactgaggctagagagctgggcaggggctagatggagtggggtttgggggccatgcccagagggtagctgtcattagaaggtggggtggcatcacaggagggtttgaagcagaggattgacagcagacttatgcaggcagatgtgtggagggcagttggggtatagggctggaggttgcgggtgggttaaaaggctgtggaatcgtccagacgctgtggtacagtgggcctcagctaaggctgtagacagaggcctgataggtggtcccaggagttggtggtcccttaggtgtagagatatcgatgctagggtttgggcacctggattggatggtggtgcttcctgttgacggggagtgcaggaagaggggtagccttgggaaggttgggaagtggtgagggcgattcttctggtttacacagagtttgagctctctaaaggtcagccaagcaaagaggcccagagatgcatggatttactcagtgaagagggcatggttgaggtcactgtggagagtgtggagggagacagtccggaccagggagtccccttgtgaggtggggcggaggaagcacagcctggggaaggcagcgggagtgagtccagttagagcagcatttgtctaccagagcaaggttgggagatgcttcgcagggaggccagttattctgctagccttttaccatgcccagagcaacccctacagcagagaatcatttggcccaagaggccagtggtgtcctggtggtgaaagccatgtgggtagcagctgtgagtgtgctcttgccgggtccctattgcctggtgcatggaggacgtggagtggatgcaagaggtaggaggagagccggacaaggagccggagccggagccacagccctaggggctgagtgtgcagcagtgcccagcggcgctagagggctgggcagctgagggggcaccgtggtccacagggctttgccacaaggaggctcttgttttggtgctgggcaggagcggcactgaagggacactgagcccagagccaggatcaccacccagcagcaggacgtgaagcatttaagagtgccaggtagccaggaacttagctgacagaagtcattttaggcacagtgtgtgttctttttgaaatgtagtaccctttttttcccttttccaagggcatagggctgaaaacagttcactattctaatagtataaggtgttgggcattactgaaccaacctaatgttaaggaataaacctcttttgatcaatgggaattactgtgggtctaagcatctgatttttgtttggttttgtttttaatataaacttaggaaaattgtgaggccgtgccccacagagccaccgtctatgcacagctggtggagtccgggaggatgtggtcgtggaacaagctatttcccatccacgtgcagaccagcctcggagagcaggtcatcgtccctcccgttgacgtggagagctgccctggcgcaccctctgtctgtgacattcagctgaaccaggtgtcaccagccgactttacagtcctcagcgatgtgctgcccatgttcaggtaccaaggagccaccataggtgatggcgctttgagacatttgatggaagttgggtattaggaggttctttttgagtgggaaggaaatctagctgctgtcacctgcctcgaaggcaagagtcctttgcagccaaatgtcattgccagtgaagtcactgtaaaagcttaaaaaatggagtgtgtgaggttaaactctgcttacattcttgaatattattcctcagcatagacttcagcaagcaagtcagtagctcagcagcctgccatagcaggcggtttgaacctctgacatctggccgagctcaggtggttctctcgtggtgggacattgaaatggaccctgaggggaagatcaagtgcaccatggcccccttctgggcacactcagacccagaggagatgcaggtaagaggcaggagcctagcatgtgccctgtcaggaaacttgtccactgctgttcatgggaaagtaacagttgagccttggacccaggagaatttagagacaggagggctgtgtcagaatcaaagacaaaagtttttaaaaagcaagcaaaggctagctgtagtaacgtagccttcccagggtgagctcatggtgagcactcatggacacagtgaggaacagagaagttggctttcctctcccgcctcatcatgatgcagccacccttagataccacccctcatcccctgagtaatcccagggggctcccatcagcttggaatagagaactacagcctcaccttctgtggcctcaaaatctcctttctccaccccgatagaaagtaggcagaggacatgaaacacagaaaaggaaatacagatgatggggatagttgcccactgtccctcataataagagaaatgcagttttagctgctcacagcacctatgctcccagcctctcaggagactgaggcaggagggttgcttgaacccaggaagttgaggctgcagtgagtcgggactgcattactgcactcccgcctgggcaataagatgagaacctgtctctaaaaaaaaaaaaaaagagaaatgcaactttaaactgcaatgagatctcattttcacctactagtgaataaagtttaaacagtttgcaagcacactgttggggaagctcagggaaaaagcaggaaagcgagtcatcagaacgtttcaggtagaaagcaatgctgctttcagacatggggctgtggctggatttgcgtctgtgcagaatagatgtgtgcagccctggtttagtagaaaaaggccaacctaaaggccactagcagggatcaagtccattatcctttcagtgggtgaggtagctctctgtgcactgatgtgggacaagcttcagggtggattattacctgacacaaaaataaaggtgcagaatggtgtgttgtgtggcagcactggtgttagtaaaaataggaatatatgtgtttgtgagtggatagtcatgtgtggtgtacatataaggaggtctttggaagaattcccagaaattcgtaaaactgactgcatctgggaatggggactggaggttaggggtggaaaggaaacatattttttactatgcgtccttgtataccttttgaattttctctcatgtgcttgtgttatttacacccccatccaccctctctcactctcacactcaaaggaaaagaaagtgggaaaggtgtgtcggaattgcctgatgggttcttcccacccactgttcagacaaaaccaattcgctgacaccatggcattgcaataaagactttaattgacacgaagccagccacaccacgtgggggagagatttgttactcaaatcagtctccctgaaaattcacaggctacggttttttgtttgtttgttttgagatggagtttcgttcttgttggtcaggctggagtgcaatggcgcgatctcagctcactgcaacctctacctcccgggttcaagcaattctcctgcctcagccccctgagtagctgggattacgggcatgcgccaccatgcctggctaattttgtatttttagtagagatggggtttctccacgttggccaggctggtctcaaattcccgacctcaggtgacctgccccaccggcctcccaaagtgctgggattacaggcgtgagccgctatgcccggctcaggctagggtttttcaaggatagtttggcaggcgagggagtccacttctgggtggagtcatcagacagaaacgtaaaaacccgaaaagacatttcaaagggtcaatcttagtttctgcaaggtggtgttatctgcaggaggaatcagggaaggttgcagatcttgtgacctaacaatggcttcaccttagcagaattcagcctcctctcatcctcctaacctgatgatctttcattcagtttaagtttaattttggggaaggacggttatcatttaaagtattaaccagctgggtgtggtggctcacgcctgtaatcccaacactttgggagccccaggtgggtggatcatttgaggtcaggagttcgagaccagcctggccaacatggagaaaccccacttctactaaaaatacaaaaattacccggatgtggtggtgcgtgcctgtaattccagctactcgggaggctgaggcaggagaattgcttgaacccaggaggtggaaattgaagtgagctgaggtcacaccactgcactcaaacctgggtggcagagcgagactctgtctcaaaaaataataagaacaaaaaataaactgttaaccaaatgtctcccaaagttagcttggcccggacccaggaatgattaagggcagtttggacattaaagcaaaatgggggttggttagatgagatctctttcactgtcataattttctcactttttcgcaaaggcagttttggtttcaggaccaagaaatagaacctgtctctacccaggagcgcctcaggcaccatcctttgtccatggtccagcctgcctggccttaacccctggctttgtgttgaatgctcacctgctggttctaggtgtccacaacattatggaaggccttagcagcttcacctaccccattcccagagttactgtttaggccgaagggttgtgactgctggggaattgctgtcaatcagcgtacccataccgacagcagcatgtgagactaagaagtatgtgagcttcctagtctcccctccaccttccaggtgcctggccccgggtgtgtgtgtgtccagccagggcctgccagcatccctctgcaggctgtgtgtgtgtcactctgaattcacccacagagttgagattggcaccgcgtcacattcttcctaagactgtgttgcagaattagcataagaatagcattaaaatgttagtacttttggccggtggctcactcctataatcccagcacttgggaggccaaggcaggtggatcacctgaggtcaggagttcaagaccagcctggctaacatgttgaaaccctgtctctactaaaaatacaaagaaaattagccgggcatggtggcaggcgcctgtaatcccagctacagggctgaggcaggagaatcacttcaacctgggaggtggaggttgcagtaagctgagactgcaccattgccctccagcctgggcaacaagagcgaaactccgtctcaaaaaaaaaaaaagttagtacttttaatttgcatatcttcggagcgctactatgtattttttctccttgaatcctcttagtagacaaacaaggtaaccacaaccatagccaacccgggactcagcaggctccagggattggagcggggccttgtgtccaggagcagtagagtgggtcctgcccctggtctcttgactgtgggtcttgtgttgtttctctaccagcgttgacttttggattggaaatttgaaagctgctaatgaatctccctcatgaattcatgtaactgctttgatcctaagtatatttagtctgtcccaccttggcacagtgggttctgtcaccagctcctcaacgttaggacccaggaggtccctgtggtaggtagtatgggaaggacatgatgacagggcagtgccatgggagcctaggaggggtcgggaaagggttctcctgtcttcttcacatgcatttgcatagtgtgggaatgaataaaaggtttaaaagaacctgtgttattcctgttactatttatttttccagaacatatctggtcagattttcattttctagtttttatgttcaagtaagcgtcttaagcgtgtgggaatgtcattctcctgcctttttgttaaattaaagaccaggtgggtgggcacattccttacctgtgctcttggagtcccacagggccaagtttttcttagttcctgaaggtgacagaatgagcaggcagtcgtctcatcagagttgagccaggcatctcctgtttttgtttgttagagacagggtcttgctttattgctcaggttggattgtggtggcacctcttagctcactgcaactgtgaactcctgggcacaagcgatcctcccacctcagcctcctgagtagctgggactacaggcacttgccactatgcatggctaatcttgtgttttttgtagaaatgggtgtcactggtatgttacccaggctggtcccgtacacctggcctcaaacgatttgccagcctcggcctcccaaattgttgggattacaggcatgagccaccgtgtccagctggcatctactttttagggcagttcttcctttttcaaaaagaggcttaacaattatgagcgaaataaacctcattatataaaataaaaatatcactcatggtcctccctttcactcaaaatagctccctttgtttggtctctctccaaacgcgtgggtgtcatcggtgctcatctctgttccgggccccgtggccttcagcagcagcgtttaagatgtctgtccgtattctgcacgagggtttatatcccgttctgagtgctggccatttgggtgggttccagtttttgctggtataaataattctgtgatttgcatttttatgtgaatataacttttttttttcttttggggttttcttaggatagaaacctgtatgtggggtttgtagtaaggactagcacagcttattaaaaattgaccgtggatcattgtcaaccatgtttcacaatttagaatattcagttatttaaatacttcaatttaattcaaagaataagccaaaacctttttgtattttcccacctttttattttgaaaaattatatatccacagaataagtgaaaatgaacactgatggtcgctttattaatttaaatttaccagttgttaacgtttgccacatctgctttatctttgtctttctgcctcccttcctgcatctctacacacacacacacacacacacacgggcatgcacattttttttttttattgctaaatcatttgaaagtaagttgcagacatctgacactttacttttaaatacttcaacacttatctcccaagaatgaaaacagtctgcaacataaatgaaacacatgatcacacctaagaaaaacagtggttccatagtatcgtctaacatatggttcaaaataaaatttgtctccagaagtccttgatagcttttgtttcctcagtctacgatccagttaggtttagtgcattgagtctgactgttttgtaaattccgagtacgttaaagcctttggaatgcgtgccatggactgttctgaaaaggttccccttaaaccactaggtttaaaccaatttttttccttcaaaggaaacattcagcacagctctacgtgttgaagagagagctttggtgctactctgatggggtggggactggagcctgcacttgtcccctcccctgagccactctggcagattgctgctcttggccacattgtgtcttcctaaagccagcagggttcccgcaaacttttgggccactggcctctgagtttagagtttatttatctccttggccacaatagccagctgtagtctacattgtggacgtcctgaaaactggcagttctctggcatttggctcctggattagaagcattgctcatactgcagctcgttgacagctgactctgttctccgtttcagtggcgggaccactggatgcagtgtgtgtacttcctgccacaagaggagcctgtggtgcagggctcagcgctctatctggtagcccaccacgatgactactgcgtatggtacagcctgcagaggaccaggtacgtcgagcctcgtgggggtggaggatgagcctctgagacttgtatgtaaattccccatttacagatcctctggaggtgccagtgggttgatttgtgtctggacagaataacataagaacaaagatttgtgaccagtgtgtcagtgcccattcgtgtgtacccaggagaggctgtcatgggttgctggaatctgtttagagcagatgcgtaggaaaagtctggaattagcgggtgctctaagccctcatgcctactggagaccagtgtccagattcatgccctctggagacctgtggaggcgctcacagcccacgtctgtttgttcatctcctggcctagccctgaaaagaatgagagagtccgccagatgcgccccgtgtgtgactgccaggctcacctgctctggaaccggcctcggtttggagagatcaatgaccaggacagaactgatcgatacgtccaggctctgaggaccgtaagtgtccagccccttggcttgttgtggggaaaagggagaaagaagtttgtcccatgaaccccagcactttgcttatgatttgctgtttctttcctgtgtcctcttgtctatgagtggcttcagcgagcgcctcctgggtgggcactggagcagaaagcgggagagcctggggctggacttcctgagggcttgctctctgctctactgggagagcctctggctgggctcctgctggacacctttgccttgtcagacacagtcattgctgtgggtggtcacggtggattaggccaccccctcttttcatgtgttgtcacctttctaaaattttctaagatgtaaatctgatcatgtcgctctcctgcctgaaaacctttgctccctgctacctgtagcaggggactcggcttggggattacagatggggcttagagggagggtctcttgaggcccttgggggtgtgtacagaaataggtgtgaatgtgtgcattttgggggatggggggaggatccaagccatcctgagtttctctcagaggggtctgtcacccagaaaggcatccttgcctttgggcagtcaattgtgaacactcaagccttggaggctctcagctgtctgtgctctaaccagacagggaagaagcctgttgtcatggactggaaggtggcctgcaggtggtgcaggccttcagcggggcctctaggctgggttgaggggtgtctttcctgacactggggacaggtggggagatgtgagcaaggcgggcatgtttgtggctgggggtggttactgcatgaggacgcagggggatggtctgaggtctgggcaagtggagtgagaagggaagtatttctgacagcttgccagcaggaatcttctggcaaactggaggaagccctgtgctgagcttgcctgttccccgcaggtgctgaagccagacagcgtgtgcctgtgtgtcagcgatggcagcctgctctccgtgctggcccatcacctgggggtggagcaggtactgacatgcacccttgtcagcctcctgatgtgggcttgtgagttagagcattgcgtggtccgggtgcacaattctgtgatcaaggctctttgcaaaggccactgttgtgggcacagcatgctcgggtcaggggctggggggtttattgcctgtgcgtgcaggcaggcgtcaggcctcagagctggtgttcaggctgccccagggagggaatgagggcagggagggttgttcaggtgtgtcctctgtcttaggatggtcttgtcgcattttaatctttaatttcttctctgttaagtgaatatcttacaactaatagcgtggtgttccctctaggtgtttacagtcgagagttcagcagcttctcacaaactgttgagaaaagtaagtgagaattgttgttgctgaaatagtgagaggacctgtggggtctgggttgatggctttgaagtggcattggccccaggggaacaaaggagtggtggctcgcttgcacccctgtgttgtcttggttgctgcctggagagcagccagaggccttgggagctgtcactgaaatagaggcaggcatttgcactctgctttgtttttttgtgtctgaagaagtttaggcttttttcctcacttcacataagctactgttgcggtagaattaaatgtaggatgtgtttctgggacatcagtgctgagggagccagtgctcacagcctgatgggagatggcatttctctccctggccagtaactggtttgatttcctctccaaaggggaactcccttcaccagaactgcaggctcgcactgagtcctggtgtgcacatgcgggagaaatttcttttgcttttatcacattgtgctcctgatctcatccgtggtctataggatgccccccaaggagaggatttttccacaaagcagataaaagtggtgttccagaaccatttgccggaaaattcaaagcggagaatgcaactttgagagatttttttttcctgacaaacacaatactttagtatgaatacagtaattttacggttttctttctaagatcttcaaggctaaccacttggaagataaaattaacatcatagagaaacggccggaattattaacaaatgaggacctacagggcagaaaggtgagtagcgggagccttttggccacgctgggctgtgttagggtggtcagcacggcactgaagtagcccaggccccaccctgtccctggagtctcacagtgggtcctccacatgcaaccttacctcctacgagctcccaccatcaagggtgtggtgaagctttcatggagctgcccggtgagcagatggttgcactgctcttttttttttttttttttttttttttttgaaaatggggtctcgcgctgtcgtccaggctggagtgcagtggcacgatcttggcttactgcagcctcgaccttccagcctcaagcgatcctcccacctctcccgagtagctgggactgtaggcatgtgccattatgcctggctaatttttgtattttttgtagagtcagcgtttcatcatgtggcccaggctggtcttgaactcctgggctcatgcgatctgccagtctcagcctcccaaagtgtcggggttacaggcatgagccaccacacctggctgtactgctcttagctcagcctcatctctgctccttcaggtcaggacagagcagctctcttggggttcctaggagcagagcatgtcctttcctctccaccgcactcctgtcttcattccccgtccacggcttcctgctgcagtcaggcttccgggccctgaaactgcttctgccagcaacctcgtcgttactcccacggtctccctgcaggcttcatctgctctacccgcttgtccttgtgacccgggacttctgcctgtgctggggaggtcgctttcccctcaccttcctggctgctccttaccttgcactgctccgtggcactctccccgtgtcccccgcttcccctactgcatcctctctggtaatcacgttccttctcatgtgtgaatcagtgaccatcagagccggccttcactctttactattttggattcaaatctcatgtccagctgccatcctgtcacctttccttgaatatgccacaaactggactcacccaacgcggagctatcatctttcatctttcctgccagtctttttttaaataacagctttattgagatgtagttgacataccacaaaattaatgcatttcaattgtacagttgagtgatttttttaagtaaatatatggagttagccgtcacccagtctcatttagaacatttccaggcccgacatggtggcacatgtctgtaatcccagaacttcggaaggccaaggtgggaggatcgcttggacccaggagttcaagaccaatctgagtaacatagggagaccctgtctctataaaaacaaaaaaaattaaccgagtgtggtggcacgtgcctgtagtcccaggaggctgaggtgggtgaggtgggaggatcgcctgagcccaggagttggaggctgcagggagccgtgcttgtggcagagcactacagcatggctgacagagtgataccttgtctctaaaaaaaatgggaatgaaaagagaacatttctgttacctcccaaattcctgggagcctgttgatagtctgcatccccatgccccaggcctggcagccactggtctggtttgtgtctccagtatgtgcctcttctggcatatctcaaaagtgaggtacgcagtgtgtggtcttgtgagtctggctcctttcgctgagcataatgtctttgagattcacccatttcgttcttttgaaggctgtgtagcattccacggtgtggctatccattcatgtgcttatggacgtttggattgtgtccagtttttggccactttgaataaggcttctgtgaacatggattcactggtcttagagaggatgtatgtcctcagtctcttatgcagatgccttggtgtggattgctgggtcatgtggtagttacgatcgactttttaagaagctgctgaactgttggttgaagtggctgtccttttgacatccccatcggtaacatctgagggtccaggttctcggatcctcaccagcacctggcattggctttttttttttagcataaccatattaatgggagtgtggtgatgtctccacatagttttaatttgtatttgcccaatgactgatgatggtgaacatcatttcgtgtgcttgtcttgcttggtgaaatgtctattcaagccttttgcccatttaaaaaaataacagttttattgagatataattcacataccttacgattcactcagtgatttttgtatattcataaggttgtgtaaccatcaccacatcagtttaagaaccctttcattacccattggcagtcatgcaccatttgtccgcagtcccccagccctgggcacccactcttctcctttctgtctttagcttgcccattctgggcatcttgtgtgaatggaatcagacaagtgtgtggtctttcgtggctggcctctcatgtggcttcatgttttcgggctcatccatgtcgtagcctgaatcaatacctcatttctctttcttgctgaataagattccattgtgtggatagaccatgttatttatctgtttctcagctgatggacatttgggtggctcctacttttgggctgttgtgagtaatgctgctataaatattcatccacaagtcgccttttttctccctcatagatgagggcataggagatgattctgaaagccactgtgtggtgtaccggtagaccggggtcacattgaattggagtggtgggagcgggcgttcttgccatgttcctgatgctgtgtggggaggcgaggaagcactcagggcagccccttctgtctgccagcatttcctgctgcatctccatcatctctgactggccccactttggtgcctgactgcttgggcctgcccagggtcggctacctccttaccctctgccactccttccactcctcccacccctcccaccctgtagtctccgtttcttacccggactctttctgcactctcccaggtcgcctccgtccccagcacctgcaggttcccttccacacttcgtggtcctcagcagcatcttctaaatcacattccttctgattttgaaccctgatgaaaacttctagtgacatccaccacccccactgccgcctccgggatgagtccagcccctcaccctgtcctggctgccttgggctgggctggcttctgtccagctccacaccctcaccttggggggccttgctgtctcccggcctcactcttgcccctgctgcccctccctcggccgttcaggctcctcgctgtgcacgtgttcatttactcacaaatgttcacagaacatctggtcacggcactggcccactgctgggggatgctgggccaccagtccctgctcttgtggtgctcagagcctggggagggagacggagacaagccccggtaagtcctgagataaagcgtccagtgggggttgacaggatgccactctggaagccccgtctggcacgtttatttctgggctccctccatgacccccttccttgcttttttctatcacatggggtcagccccactttgtctgcttccctcttctgctctgctctcctgagcacgggactcatgtctggttgtaatctttacagcctccagggcaggtacagagcaccttgctgccttgcttgtttgttgactgagggagggagggactgatgagggagggagggaatgagtgagtgactgagtgagggagggagagggagggagtgagggagtgacttgagtgactgagtggcctgttgcttccgtgttcctgttaacactcctggaccgagccctactgacacctgggccctgcttctcgcccattcaccaggtctctctcctcctgggcgagccgttcttcactaccagcctgctgccgtggcacaacctctacttctggtacgtgcggaccgctgtggaccagcacctggggccaggtgccatggtgatgccccaggcagcctcgctgcacgctgtggttgtggagttcagggtaggccacccaggggatgttggagaaaaaagcagaggaggcgggtggggaaccttgttttcttgcaggaaccttgggtgcctgtagagcggctcaggccttgatgatttgagcttgtgttttctttctgtgtcagcacactgtggggttgaatagaagatgcttgccttttaaaaaatgcgataatttgacatacgaaatggaaatggctgagtgttgtcattttacaattgtggcttatcagaataatttaaaaatataaattaagcgtttcagaagccatgccgtgtggcctgctctgctctcattaatagccgaggcttcgattgttaaaggcattttgagatgggagagtcagctgctttgtgcaagaaaaaatggaaaagcttccttttaattttctcatcaaagcagaaccatagtcacaaagtcattttgggaagggcatttttattaaaaggatttgaaaagctttaccctggatggagagtgtatctcatttgatgagagtggttttctctcctagcttagtggctccatcactgaaagtctgggcatttctcctgtgttacttgtttacctaatcagatttccacatgaattctggttttcatggccaaagaggggatgtcacgatccatgcgtgcgtgtgaccaggaggaagggagggaaggctgtgtggcctgagtgtcctctgggttcctcttggcagggcctttttctctccccagcatcctcatgaactggagatgatgctggggagagaattggcttacagatttcttcccaaagaaatgatgttcaggatggcccggataggagtgtgcagcccccagcctaggagctctggccgactgtcccttataggagaggactcaggtgtcacgtcagagcttgcaggttcccgcccagcccagtctgttacagaaaccgttgtggatctttgttctctctgagccccttcatacttgggggtctctttcaggtgtgcagggaacagcaagatgtgcctcttgttcttgctgccacgcttccctgtgtcctggcgggcgggtgtggacggggctgctccttcctcacaggacctgtggcggatccggagcccctgtggtgactgcgaaggcttcgacgtgcacatcatggacgacatgattaaggtaggcagggccacactctgcatagtacccccgacctgctcctgtatcgcaggcctctcacagggtcccagcttgggcagcacaggctcttctgttgggggcagtgaggtcaggtgctgccattttgtgtggttcaacatgagcattgcttggtaccagccctgttcttggctccgtgctgtcaccctgtgtcagaatctccactgggcctgcacgtcctgtcattgcaactgcccctgccagtgcccacagcttcttttctagtggggctgactttccagaggccatctgggaaccttcttaggcagccatttccatggtgggggctccattcccgggaggggtacctgaggagattcccacaggttatttacatggtaggggttagcaactgggcctacgttctccagaaccatgggctgtcctgacagcgccagtggtccttggattcatgaggactgaagctgagagtcgtgttccatccacatgagaggggcagggtgaggagcatgggccgtgctgtgtattaaggaaatgcacgtggctcctgcttgtcatcccagcactctgggaacctgaggctggtggattgcttgagcccagacgtttgagaccagcttgggcaatatagcaagaccctgtctcgacaaaaaataacaaaaaattagccaggcatggtagtgcacacctgtattcccagctactcaggaggctgaggtgggaggatggctttagcctgggaggtcgaggctgcagtgagctgcgtttgtgccactgcctccaggctgggtgacagagcaagaccttgtctcaaaaaaagaaatctcatggacaccagaggagcgggaagcagcggtggccccgcagcagcagctatgcatcgggaggtggggcttttctgcttctgctcacctttctgctctcattttcccatagtgaacatggattgcctgtgtgtgaacacttttttaagtaaattaaaccttgtggatattttcagtttgtatcttatctgcccctcacagcagaccattgactgttcgatgcttttagaaatctccttcgtgctgagccctgcgtgctctggacccatgcgctctacgcctcctctgggcccctgctcatggcctgcccaccctggctgtccctgtcccctcttgctgatacggttctgctactctggtcctgggccagtgtctgtctctcgtgtgctaaggcagatggccgagagtggtgggtatcccacagtggggtgccaggcatttttacttctatgctttccaaatccacctgcccttccccacccttagcctggcccttccagtgccctgtcttagacctggcgccacttcacacgaccagccaggcccagggccccgggcatcctccctggcaagtcctcccatcccctgccattggtcttcgtgctcctggtgagcctccgacccaggctgtcccctgactgctgccgtcctggtttgagcccctcctgctctggccgtcctccacacggagcccacatgaacttgtagatctgagtctggccacatccccactgcaggaatgccctagctggctccccacaccacacctgcagagtggcccggctggcctgggtgccctggcctgctctcctgacttagctctatcctcaaggccccctctggcccttctcctgccggctcccatttgaccgtcacctcccctcctccaggtagctttctgcatccctcctggatgcaggtgcccccagcctgccgccaggcaccggggctgtactgtcacgcatttatccctccctgtggcccggggcccacctgtcggggccacacagctgtggtggtcaccaagtttctaggtgctgggtgttctcaccagtgatgtagatatgtggtcctcagaaggcttgagacaggcagcaccaccccatcttaaaaatccggagagcgaggctcagagccagcggtgcctggggagccactgatgagagagaagtggcagagagggggcgccgctggtctgctgggcgctcggcatctttatgggagaacgcacaccccttgtgactgcagtcagtgggagccaagccggggagcggtacctctgtctagctgccggcctgtctctgcagcccccaggcccccttctgttcgcagcgtgccctggacttcagggagagcagggaagctgagccccacccgctgtgggagtacccatgccgcagcctctccgagccctggcagatcctgacctttgacttccagcagccggtgcccctgcagcccctgtgtgccgagggcaccgtggagctcagaaggtgggtgcagagagggctggggggcagggaggggctgctgcttgcccttggagttctcacccccgtggtgagcacagctggcctgggagacgctgacacgtggagggggtattcgtcctccccacaaccttgcccttccctgtcagagtggccctgcgcgtgtggtggttcccacggtcctgtgtgtgccactggtggaggagccaggaagggctctgctccccctctacagctgaggctcccttgttggatcacagctcaggaagatgggagcttacttcctgtggtcaccgatgcaccattttcctgaaccctcctgggagctgaagcaggtcagggtcagcaagtgctgcttgcgtccagggacgggcagccctgtcctgctccggccctcaccccaccctcgcccgaggagtgacttctcctggaagcacctcccaactcggggcaggcagccaggcagggcgggcgccatcacctgagctcccagggttgctgtctggggcatcagaggggccttccggccttcagtgccaggctgtgcctcaagctcccccagaccctgcagccacaccggccctgccccatgtgtggcccggctgcagggctcgggttggctcaggtgggggcttggctgcggctcttctggctggggtttttctgaggaacgtttatgtaactgcagcactaggaactcccggcagggcaggaaggaagtggggaagaccacaggtttctggaaagccgcaggagctgcagctgttcccccgctgcctcttgtgtgactacttctgctgggcccccctctccttgacaggcccgggcagagccacgcagcggtgctatggatggagtaccacctgaccccggagtgcacgctcagcactggcctcctggagcctgcagaccccgaggtagtgcctgcgcaccgggcccagtgtgcgtgcagaccctgagagcaggcgccgcctggggaggcctccctgcccccatgctctgggtgtttctgtcacaagttcttcgggccagatgatgacccctcagtggtcctgggccatctggcccctgagcagcttctctctgctgcgagctgcctgggctggaggctggctaggaaggaggctcaggtgccagggagccctcaccatcttcctgctcttcttcctacaggggggctgctgctggaacccccactgcaagcaggccgtctacttcttcagccctgccccagatcccagagcactgctgggtggcccacggactgtcagctatgcagtggagtttcaccccgacacaggcgacatcatcatggagttcaggcatgcagataccccagactgaccactcttgagcaataaagtggcctgagggctggg

SEQ ID NO: 15751 - DNA, 35227 bp, Homo sapiens
gtaaaagtggtagcagcggaggcgagcggagggtttcccgcggcgggtgaggcgctgggtatgctgggaaggtggggtcgctttggggttctgtgtgcagcgagcatggtgtccttggcaccagggtttcggcagaggagcctagcgtgggcctacttggactcctccgcgtggggcagctcgggacacccgggcctgcaggagagcggggttctaggctggccccggctctgcagtgcagccgggtgcctgccactcgcggggctctgtcgcagtactcgtgcctggcgcctcccctcagccacagagaccgcagtagctccaaccatcgcacccctaactgggccacgagttctctgattgccagacctgttgtctttgccactcactgttctgagtaattggagagtcgtgtattcactacacgccaaccagagtggtcctgtaaaagcgtaagcctagtgtagatacgcttctgcttaaaactcttgagtggctcccagtgcttttagaacaaaatccaaacgcctttccgaagtcgacaaggcccagcttgattgagcagaagatgtgataggagatgaggagcggggggcttctgcaaaagtgcttcggtcgctcaggcttttggcacattttgcttatgcaacctagttctttctaccttagggccttttcttgggaaagttggggtaaggattcctgacctgtaaaaactcttccccaacttttatcccggtctgtcttgtagatctcaaatgctagtttcctcagagtccttctgtaaccttggttttctctttctacaacgctctgtgtatttcttgcattcatgtagtctgtaatttgtattactctctcattagagtctaagctcttggagggcaagggtcttctctagcttgtggtggtggctccagtccctaatatagtgcctggcacatagaaggtatttaataaattttgttattttattttttcgagacagagtctcactctgctgcctaggctgagtgcagtggtgtgatcgaggcgcactgcagccttgacctcctgggctcaagcgatcctcacctcggcctaccgagtagctgggactacaggcacgcgccactacactcgggtaatttttaattttaatatatgtatatttatatatatatatatatatatatatttttttttttaagacagggtctcactctgtcacccaggctggagttcagtggcgccatctctgctcactgcaacctctgcctcccgggctcaagtgattcccctacctcagcctcccgagtagctgggagtaactgggactacaggcacaggccaccgcgcccggctaatttttttaaaaattttttgtagagaacggggtctcactatgttgcgcaggctggtctggaactcccagactcgatatccttgcgtctcggcccctcacagtgctgggatcacaggtgtgagccaccaccgcctagcaaatacattttgaatgaatgtagtggaccatctgctctgcagtctgacggctaatacaattagggcttggcatggtggtttctatttcctccttgtaaatggccatgcaagtttacaactcttggagaatgaggaggggttcagagaatatctcctgaatctgtagtgtagactgcttctgggagagaacaaataataatggatgagggcattcagccagagaaggtgtgtagtgcccaccagaagaggttcatgccttcataaaattgttaacacaagacatagttccaggtttgtttgtttgtttgagatacagtcttgctctgttgcccaggctggagtgcagtggcgcgatcttggctcactgcaacctctgcctcccaggttcaagcaattctcctgcctcagcctcccaagtagcagggattacaggcacctgccaccatgctggctaattttttgtatttttagtagagacggggtttcgccatgttggccaggctggtctcgaactcctgacctcaggtgatccacctgctttggtctcccaaagtgctgggattataggcgtgagtcaccgtgcctgggctgttccaggttttgaaaagacactgtggtcctggttttagactcagcaacatcacagacaagaaaggaatcctatggattaaagttcttcactataagttttttttttcctccagttcaaatgggtaacgtgccaatgtagtaaaggtttgagggaggcacgtctgacacaggcacatgaacacccagtcatcacgcttatgaactacaaaacgatgactcttaaccttgaagtgacttcagaattgattccacatggaccacaggattagtatttcaggactctaccatatggatcctattgatatgtttgacacctggtccagttttacttcactaaactgattgatataatgtgcatgattgtctaagcctttctaattggatgaaatgccttctccgtccacaaccccctccttctcctcctgcctcagctgaatccaccttttaagccttccttgaacattcagtcagatatggccatttctttctctactccaacatttgttggacacagttttctaatgcacattacagattctgacagttctagatattctgtctgtaaaataaatgttagtacatgagataaagtggattatagcaatgttgttaaactgctggttgcaacccattgatgggtcctgaccagcaagtaaaagtgcagctgggtgccgtggtgcatgccggtagtctagctacttgggaggctgacgtaggaggatcgcttgagtccaggagtttaaggctgtagagtgtaatgatcatgcctgtgaatagccactgtgatccaacctggacagcagggagatcccatctcttaaaaacaataaaaatgaaatagagcatatcagagggccttgttcgtaggaagtcagtattgttttgtggaacatttagttgtatgcgtacatgcaggtatgtgtattgagtctcattttaaagtatatttcttactggggttatcagaaagtttgaaaatcattagactaggggataggtatgctgagattttagtagtagagttttacctggacaaattgtctactttgaacctgactgccggcctgagtttgttcagggaagattgtttctaatctatttgctttttgtttgtttgttttggtgacggagtcttactctgttgcccaggctggagtgcagtggtgcggtctcagctcactgcaacctccgcctcctggattcaagtgattctcctgcctcagcctcctgagtagctgggaatacagacgtgcgccaccatgtctggctaatttttgtatttttagtagagacgagggtttcgccatgttggcaaggctggtcttgaactcctgacctcaggtgatccgcctgccttggcctcccaaagtgctgggattacaggtgtgagccaccgtgcccagcctgtttctcatctatttgtgtaagaattccatgtttacttactctagataacttcaaaagaaaaaaaactctggccaataaaatgccataggaatgtttagggatatgtggagtaggcattctttctaagttttcctgaagatgcaccaatgtttaacaagaaaggaagggcagtgtagaacacctattgctttctgcatggtaagagggatgggtattgggagagcccacacctgctgaggagtgcctttagactttgagcggtggtgtttctctccctcccagaaatagatctctttggggagacaggccatacaagacgtgaatctggtgacattttacttgtttgaagcaaaatttttttagatgatggagggtttttaaaaattgcttttaaaattaaaatttgaatagataagaagtaatcactataaaaaataatgaagcataaggaatgctagtattagctgggtgtggggcactcacttgtagtcccaactactggagaggctgaggcaggaagaatgcttgagcccaggagtttgagtccagcctgggcaacataacgagaccccatcttttaaaaaaaaaaaaaaagaaaaagaatgctaatatcgtgaacatttatgttcccaccacccaatttaagaaaaagaacaatacttttgaagtccactgcgtacccctccttgatcccatctctttcccttctcttttaggagttaactatcctgattccttgctatgctttttagtgtgatccctgaagaacgtatcactccattttgcatagctataaatttcatagaaatggaatcgtattgcatgtgttgtgtgatttgctgtttttgctcatcattatattcctgggattatccatttttaggtttatgtgtgactgtaatttattgtttagatgaaagttttcctggtttgacttgctctatcttcatatttttccttaagctaagggttcagcatacgaaggcagtattggtggcacttctttaacagtaccccatctcttctcctagccttgagggctgcacctagatgaacttgtgaggctcatttgaaccttttggaagcaccgaagcctgctgaagtttccagacatctgtatgaatctgttgtagttttttaatgttatatgctgaatataaaaccaagtaactcctgctggaaacatttacaatatcgattaacaaatactatcagtggctttgacatttttgtcagtttcttgatttttttccccgcttttgtctccccttcccccctccacattttggggcattgtgctgttaatagattttttttctgttcgtttgtttatatacctcctgtttccttctgatgttaatagatttctgacagtcagacttgtccacaagaactcaactggcaaggctgcttttctgtgctaaaactggggagctagtgggcaccatgaagatcttctgcagtcgggccaatccgaccacggggtctgtggagtggctggaggaggatgaacactatgattaccaccaggagattgcaaggtactgggttggtttacagcaggctgcagctgggtggggcacttgatctcaaagcagatgccttgggctccagtctgagcgtgggctaggctgtcacccagtgcttatgatgagggctggtgttggtcctgagcaggtctgctcagccaggtaggtatatgtagcagttaggcaaaatcatgcctgtttggagagtcagacattatgtagcagccttagcagagcctcagcatctgtttaacggagcaaagaaaacccaagcctcagtagtgttgatgaagttgaatcatttacttgccttactgaaatggtgacatgttcatcatatggttaaattcttttgaatgaaaaaaatgaaaatggttttttttttcccttagaagaaatatttaaaagtatgtgagttgttggccaggcgcagtggctcacgcctctaatcctagcactttgggaggccgaggtggccagatcacctgaggtcaggagttcgagaccagcctgaccaacatggagaaaccccgtttctactaaaaatacaaaattagctgggcatggtggctcatgcctgtaatcccagcttacttgagaggctgaggcaggagaatcacttgagcctgggaggcagaggttgtgttgagccgagatcgagccattgcactccagcctgggcaacaagagcgaaactctgtctcaaaaaaaaagtatgtgagttgttatgtagcaatcattaagtgcattcagtgtgccagcattgtgctaaggctgtggataccagatgaagaagatcctgttctcatcttcaaggaccatgcagttttgtggaagagacaggcacatacaaaattacagcacaaaagccaggcacggtggctcatgcccgtaatcccagcactttgggaggcaaagggcgggcgggcgggcggtggagggggtggtggcggctgatcacttgagggtcaggagttcgagaccagcctggccaacacggtgaaaccccgtctctataaaaaaaaattagctgggagtggtggtgggcgcctgtaatcccaggtactcgggaggctgaggcaggaaaatcacttgaactcgggaggtggaggttgcagtgagccaaggttgtgccactgcactccagcctgggtaacagagtgagactctgtctcaaaaaaaaaaaaaaaaaaattacagcacagtgagataaaggcacaagaggtcatggaagcagcaagaaccagctgaacttggggtgggaggtaatgtttgaataatttctcagttctaaaggaagagaaggtgaagtttgagcagcagggattacaggtaagctttcagatgagccagattgtggctgggtgcagtggcctacacctgtagtcccagctacttgggaggccaaggcaggaggattgcttatgcccacgagttcaacatagtaaaacactgtctcacaaacaaacaaagaccaaaaacaggctgggcacagtggctcatgcctgtaatcccagcactttgggagaccaaggcgggcggatcacctgaggtcgggagttcgagaccagcctgaccaacatggagaaaccctgtctctactaaaaatacaaaattagccaggtgtggtggcgcatgcatgcctgtaatcccagctgctcgggaggctgaggcaggagaatcacttgaacctgggaggcggaggttgccatgagccgagatcgtgccattgcattccagcctgggcaacaagagctaaactctgtctcaaaaaaaaaaaaagaaaaaaaaccacacacacacagatgggctattctggggagcagctagcagtttagtgcagctggagtgtggtacaaaagtactatggtaagagaggctgccgaaagcatacgcggggtcattttgtaaagggtggtagcaaaatgcaggaagaggaacatgagtttaagtccaagctttgccacttctttactctcttggccaagttacttctctgagccttaatataaaataatatatacttcaatatagtaatacattatctcacagtataatacaattatcttagaattgtttgatgattaaatgtaatacagtatctggtgcagaattagggcttaaaatatttacttttttttctttttttttttttgagacagagtctcgctctgtttcccaggctaaagtgcagtggcacgatctctgctcactgcaagctccgcctcctgggttcacgccattctcccgcctcagcctcttgagtagctgggactacaggtgcccgctgccacgcccggctaattttttgtatttttaatagagacggggtttcaccgtgttagccaggatgatcttgatctcctgaccttgtgatccgcccgcctcggcctcccaaagagctgggattacaggcgtgagccactgcacctgcccaggtcttaaaatatttctaaacattttggacattattttcttgttttattgttcagatggagtcttactctgttgccttggctggagtgcagtggcgcagtctcggctcactgcaatctctgcctcccaggttcaagggattctcttgcctcagcctcttaggtaactgggattacaggcatctgccaccacacctggctaatatttgtgtttttagtagagacttggtttcacctgttggccaggctggtcttgaacttctgacctcaggtgatccacctgcctctgcctcccaaagtgctgggattacaggtgtgagccacagtgtcaggcctggacgttattttctgagtgatatattaaacaggagagaaagaggattggattgcattttggaacactcactgagagcggtgtggagaggagagcatttggggatattgtagtcccagagctgcatagtcccagaggagacagctcgggggaacttgagtttggtaactcactggatatgatggagggagagagaagattcaagaagcaccaagacttctggttagaatgacaaagtggatggggcctgcaagggaggaatgggtggtgtggggaggggaacacgatggagattaggcgtttaggtttggacatccacatagagatgccaatggcagatagaattttgggtctggagacagaatttgtagttgttggaactgaaactgggagaggttgcagtctctcaagggggtgtggaatgtgaaaggtagagggctgaagaaggaatcccggaatagctgaggaggcaaagaagggcaagggagatagccagcatggaaaggaagaaagagggagtgtgtctagcaaggtcagaggcactgggaagtcccagatactgatgactgacatcagctgcaggagtgagctggtggtggttaccgagagtgatgtcagtggagtggtgggcagtaagtgtgaagaggccaggaaggtggtgagtgagatgccttttaaatagtgagcagaggtagaaaggactacatttcagctaagcatccatagctggcttcagatataaaaccttgatgtgccattaaaaaaaaaaaaaaaagaacccccttctttcagtgcaccgctcttcaaagtgtggaatgtggaccacctgtggcacaattgcctggagcacattagcccagccttctcaataagagtgagagtgtgtgtgtgtgtgtgtgtgtgtgtgtgttctgggactctgcatttcaggtaagctttctagtgattctagtgttgacccaaggctggagggcctctgttttaatgtgagctccttagctgtccccttgaattcccagaaagcgtggcagggcctgcctagttctgggtgctcatcccgaccccgcctgagggttttcagtgtgtgaattactgcagtaggaaatatggagaagtgattctcctccctttactacggtattggtgaactctttagttttccctgatgatgttaagtgaacgtgcccagtggggtacctgtcacatatacagtgggtgtatgtgagtgcttctctttccccggctgctctccctaataccgcatcagtggttatctccaggcagagatgtaggccaggttaggtcaagtattaggcagattgagtctgagtttttcctgaggaggaaaatgtgtagtgtatagcaagatcaagatgctagtggctgtggaattactgtgacagggctaactgccgagaccagctcggtcgtggagaccctaacccagtggcgctagaggaattaaagacacacacacagaaatatagagtgcagagtgggaattggggggctgacagccttcagagctgacagccacgaacagaactttacctacatatttattgacagcaagccagtgataagcattgttcctatagattatagattaaaacgggaaacaaagggatgggctctggctagttatttgcagcaggaacatgtccttaaggcacagatcactcatgctattgtttgtggttcaggaacgccttaagcgaaagccgccctgggtgggccaggtattccttgccctcattccagtaaacccacgaccttcagtgtgggcatcatagccatcaacgagcatgtcacagtgctgcagagatttgtttatgaccagttttggggcctgtttttggccagatttgggggcctgttcccagcagctaactactggagcatttttaggtctgagaacatctttctctgagacttttttctgcagcactagagaataacagcttgaaactctattaaaataaagtggccaggtgcagcgacggatgcttgtattgtagttctgctgaggcaagaggatctcttgagctaaggagttcaaggctgcagtgcccaatgattgaggctgttcatagccactgcactacagcctgggtgacataacgagaccctgtttctaaaaataaacaaaaaaataggccaggcgcagtagctcacacctgtaatcccagcactttaggaggccaaggtgggcggatcagttgaggtcaggagttcgagaacagcctggccaacatagtgaaaccccatctctaatgtaaatacaaaaattagccaggcgtggtggtgagcacctgtaatcccagctacctgggaggctgaggcatgagaatcacttgaacttgggaggcagaggttgcagtgagctgagattgcaccactgtactccagcctgggtgatggggtgagaccctgtctcaaaaaaaaaaaaataaataaagataaaagacaaccaaaaaatagtttaaaatagatgacacgtttgttctatctgtttagcaatgtgtttatatatgtgaatactcttgtgtgttgatgtgtatcatgcaaaggttactgacttttttgttttttaggtcatcttatgcagatatgctacatgacaaagacagagtaagtgtaaaaggaaactattatcttgatgtggggtgttttgaagtcttggattacaagaaggttaagaatccctgggggtcatgatgttaaatgatactgagaggcgtatggtgtagaagtcaggaaatcagttgggagactgggtcctacttctggctctatttttgttgtttaatctcccagctttatcaagatagaactgacaaataaaaatggtctatgtttatggtaatacaatgtgatgaatatatgtgtatggtgtaaaatgattgaatcaagctaattaacaaatctaccgcctcatacttttttgtgtgtggtgagaacatttaagatctactcgcttagtaatttttaagtgtacattattaactatagctcacaatgccgtacagcagatctccacaacttattcatcctatctgactgaaacatcagatcctctcccttagcaggtaccattctctgggcttctgagttcaacatttttttttttttttgagacagaatctcgctctgtcactcaggctagagtacaggggcgagatctcggctcactgcagcctcagtctcccgagttcaagcgattctcctgcctcaacctgcctaagtgttgggattgtacctagtattgggataatactattattatactattatacctagtattgggattataacttgggattacaggtgcgtgccatgacacctggccttcactgtagttttaatttccatttttaattttaattttatttttttgagactgggtctctgttgcccagtgcagtggtgtgatctcggctgcactgcagcctagacttcttgggcttaagcgatcccccaacctcagccttcccagtagctgggactacaggcatgccaccatgcctggctaatttttgtatgttttgtagaggcagagtttcgctgtattgcccaggctggtcttgatcccctgaggtcaagtgatccacccgccttggtctcccaaagtgctgggattatgggcatgagctactgcgcccggccatcgtgtgcttgtttaccatgtgtatatctttgttctagtctagggttatgaacataggtgtgattcttgatagacactgccacattgccttcaaaaagggttccagattcactgtaatatcttcaaaactgggtcattaaaaagtgacagctaatttaatggcatcgttaaagtgaaggctgtgccatccctggtttacaattgaggacgctgttcatcaattttttttaacttaaaaaataaataaaacaaggccaggcacggtggctcatgcctgtaatcccagcactttgggaagccgaggcaggcagatcacggggtcaggagatcgagaccatcctggctaacatggtgaaaccccgtccctactaaaaatacaaaaaaaagccgagcgtggtggcgggcagggcctgtaatcccagctactcaggaggctgatgcgggagaatggcgtgaatctgggaggcggagcttgcagtgagccgagattgcaccactgcactccagcctgggcgacagggagactccgtctcaaaaaaaaaaattgtggtaaaaacacataacataaacggtcatactgattgtatctaagacataaatgcacttactttgacaatgaaatagttctatatttctgtgaaaaattatttcacccagactaaacatttttgtgctttacctcagaggcaacgtcatttcttttttttcttttttctttctttctttttttttttttaacaagaatgagtctccctctgttgccaggctttagtgcagtggtgtgatcttagctcactgcaacctccacctcccgagttcaagtgattctcctgccttagcctcccaagtagctggggttacaggcatgcgccaccatgcctggctaattttttgtatctttagtagagatggggtttcaccatgttggccaggttggtctccaactcctgacctcaagtgatccacccgcctcagcctcccaaagtgctgggattacagatgtgagtcactgcacccggcctggtaattctaaagaatattcagttctagatattttctaattccagtctgatttagtcttttgcctatcagtttagaagtgtgtttcttaatgtatgaaaaattttttttcttcagttgtgtttctgatattaagatttttgacttgttttgcattgtggtcagaggatatcacccttttgatgccagttctgtattagctgtctaatgttatttaacaaattaccttaaattttaatagcctcttaatatttcttactaacttggcaggtcatcagtctatttaaaagatttgcacatattttttccatcatctttagttattttcaacagaagggtcactgtgcctattgagtcagaccgttatagatgaaagatgtatgtgtttactaaagacagaagtaaaaatcttcaagatgcaaagaagttattttctgatggggaaaatactttttagtgaagctctctgagttagagtcggtaaaggaaaacaagccatacatattgcagcagagcggctttaacacaaggagctggctacccagctgtgggagggctagaaagcaaatgggaacgctgagtaacctaacagtagagattgcagggagcagttaccttgcctagggctgagaaactaaacgagaagattaggatttccagaagccacaagcattgaggagagatcctgtggaccactgtccaagtacggctgcagctctgaggggcccaaggagctggttatgggatcattgggaaaagttggagtctgcaatcaactgcccctaccgagaggaccctgatgagaacagcagcatgcagaaaggagcaagcctgctctgtcctcctaccttccagtcgccctcttggtcccccttttggctgtacctaacagttggaaaaaggagaacatggtttgcagggctctggcatcacttagtagaggatagaagagtgagtgtggagcagggacagtcgcttaataaagggcaaggggctgactcacaagacctgcccaactcagccagagctgttctgccaggggccagaaaggccatagggccctgacttgcactgccactgccagctgtgactctagaactttgcaaagcacctttccacttacttataataactggtagtaagtgacggccatgtcttccttagaatgtaaaatactaccaaggtatccgggctgccgtgagcagggtgaaggacagaggacagaaggccttggttctcgacattggcactggcacgggactcttgtcaatgatggcggtcacagcaggtgccgacttctgctatgccatcgaggtaagccattcccttcaggtgtgtgtcctgcatcttgcatgggaaatcccctatgctcttgcactttccccgtctgttccttcacaaacattcatggagtgctcactctgtgccaagcacagagccaggctctgagcgtatagagatgagtcagacacagttccttcctccaggagctaattttctcctctgtcagcctaggctgcacatcagaatcactaggagctttagaaaatacttacaggctgggcacagtggctcacgcctgtaatcccagcacttcgggagggtgaggcaagacaattgcttgagcccaggagtttgagaccagcctgggcaacatagtgagatcccatctctacagaaaaacttttaaatattagctgggcatggtggcatgtgcctgtgttccagctattcttgaggctgagatgggaagatctcttgagcccggaaagtcaaggctgcagtgagccatgatttggacttcatgtaagaaagcaaaaaattacttctaccttgtttaagccagttattgtgggactttgttgtttccaactaatcagtatatgaactcagttttgtaggggaaagtatttaaatacatgcccccacaccaccacactccagcctgggtgacagagtgagactttatctcaaaaaaatcaaaacgaaacaaaggctgggcacagtgtctcacccctgtaatcccagcactttgggaggccgaggcttggatcatgaggtcaggagttcaagaccagcctgaccaacatggtgaaactccatctttactaaaaatacaaaaattagccgggtgtggtgatgcgcgcctgtaatcccagctactcaggaggctgaggcgagagaatcgcttgaacccaggaggcagaggttacagtgagccgagattgcgccactgcactccagcctgggcgacagagtgagactccatctcaaaacaaaacaaaacaaaaaaaccttatgcctagtccccagccctaacagattttgatttaacttttctggggtgaggcctgagccttgggacttgggaatgtgcggcaaggttgagaaccactaccttaaatgtccctatggagtcagctctcttatgtttaccaatttgtcatttctttaataaaacattaaacagcttgagcccacagagcaagaaaaattaaaaaccaaacaaaattaaaaattaaacatgttatttttctcataaaacaaataatgcatattattataggaaatttggtaaataccaaataaaaatagtatgttgacccaaagttaagtactgttaacattttggtgtatattcttccaagttttgggggcaggcagggagcatgtatataaatactttccctacaaaattgggttcatgtagtgattgagttggaaataacaaagcctcaaaatcactgtggtttaaggtagagtagttttttgctatctttttcgtggcgtgatctctattcaccgcaacctccgcctcctgggttcaagcaattctcttttctcagcctcccaaatagctgggattacaggtatgtaccactgcacctggctaatttttatatttttagtagagatagggtttcgccatgttggccaggctggtcttgaattcctgatctcaggggatccccccacctcagcctcccaaagtgttgggattacaggtgtgaatcactgcgccctgccttgttcctcttttttaaaagtaagaataactttcccaggaatttctattatagcaaacctctccttgggtaccatcggctagaatgaggttaaatctcatttcttatctctggcaagagggattcagttactcttagctcagacaagtgcaccactgcaaaggtcagttccccacgctgcaccctcacctgatttcaggggagaggaggacacagaatggatgtcgggaggtcatcttcagtgtccactcctggtagtgttttgggtgagatcttgagcttcttgatgggctgaggagaaggaggtgtgaaggtaccagcttgcaggttcagggagaggtgactgatgagtcagaaggcagcaggggtgagggacgacactggctttggatattgtcagggtggaggcaaagtgattggtgagaactagggtttaaggccctcaaaccacatctaaaaacatcaaggcaaatcctagaaataatttgaaatagatgatgaagatttttctaggagaacatgtgtgtgtattccatgtaaatactgcgcgctaatcaattgcacaactggagctgctcacgtaagtactctttacgaaaggatacagcatttgtcccttgattatagtaaaaaatatagtattcatggtagaaaatgtgggaaatacagaaaaggatttagaaaaaaggaaaatcttatcaggaacagtctcggtatcattttgtggtttccacttcgtgtgtagggccacacgtgagtctgtttgttttacatgctagagctcttggggctgtggaatctagactggataagttgaaaacaaagagttggaggtgcttatttatgttcagggaaactcgaagagttcagggaagacttctggatgggggattcatgctgccctgggaagtggggtttgatttggcaggtggggccaggatagggaaggctcagtgatcatgagatcattgtggctggagtgttggttgttgggggaatgggggaggaagactgggaaggtaagggagggcctccaaagcagtagtttccccttatctatggtttcacttttcgtgatttcagttacctgtggtcaactgaggtccaaaaatactaaatggagccaggtgcggtggctcacgcctgtaatcccagcactttgggtggctgagacaggtggaaaccttgagtcccagagttggagaccagcctgggcaacatggcaaaaccccgcctctacaaaaagtagctgggcatggtgatctacgcctgtagtcccagctacttgggagattgaggtgggaaattgcttgagcctgggaggtggaagctgcagtgatcatgccactggactccagcctggacaatagagtgagacccttctcaaaaaaaaaaaaaagaaaaattaaatggaaaattccagaaattatttataagttgtaagttgtgtaccattctgagtattattacataattgttctatttttagttattgttaatttataaattattatttatatttattattgtgcctaatttataaattaaacctggtcataggtaagcttggaggctgaagcagctccactgtgaatgctaatcctccacgctgacttctgaccaaccccagcttcaggaatgcctctaaaatttccgctctcatgcactttgatgtaaatcctgccctcaggtcagaacaactttgatgttatcataaatacatacttaccgtaaatcctgcccttcgtcaaattccctgtggtatgtaagccctgcgtctgagccataacagtgtgggggcccagtttctcactgcccgagacaaggcttctgtttgtatgtctctataaagtgtgtctttctgagaagctggatttgccagtctttcctcagcctctcagctcccgtggcctgttggggtaggtttgcatagagctgcccaccatggaacagtatgtatgtatagcaaaaaaaaaaaaaaaaaaaaaatggtatacataagggtcagtactgtctgaggtttcaagcatccaccaagggtcttaaaatgtatcccccatggacaagaggcactgctgcaccataagaaaatagaggctgtgttctgccaacagtggggatttgggacaattttgagcccagaggatgacctacttactcacacctacagtctgctctcctctggagggcacagcacgcctcccaggttcgtgaggcaagtccctttcctggctttttggcgtcctcttgtgcggtactgacacctactgctcttactaagtagtgcagcctcctcaggatccccggcatccccgctgtgcctggcacggaatgagagtccctaatcacaagttaaagccagctgaatctcagccctttttcatgatgcacatttggagaataaagtatttaagttacatatcttaggaccagaatcaaggaatagcttgctcaccttaaaggtcagactactgtttaatttattgctcatttttccttgggtttcggctctattttctaggttttcaagcctatggctgatgctgctgtgaagattgtggagaaaaatggctttagtgataagattaaggttatcaacaagcattccaccgaggtgactgtaggtccaggtgagatttacacaccctgtgttgaaagctttgcttgctcttgtgtgagagaggaaaagggttattccagttacctggaacaaatccaggtcatagcatagaagtgggacctctctgtgtggagctctgacagtaaggacttggtttctcttgatgtttattttcctgctagttaaaactagtcaacaaggagtagactagagctagtcaggtccagcaatggagacgcaaacaaaacctacatttgctttaagcaaattggaattcttatggggctcaactcttgagtttcaactaccaataattacgccttggataaacctcattggctacgatactgccactgctcaaagctcaactctgagtttcatcaggcagaaagtacttagttcttttatttatttatttttttgagagagagtctcactctgtcgcccaggctggagtgcagtggcgctatcttgcctcactgcaagctctgcctcctgggttcacccatcctggctaacacggtgaaactctatctctactaaaaatacaaaaaattagccaggcatggtggtgggcacctgtagtcccagctactggagaggctgaggcaggagaatggcgagagtagttctgacattctgcttctgcatacaacatgaacaattttcctgtatagcattgtctcttaaggtttccagaatatgtatatgtacacacacacacacacacacacatattttttttttgagacggaatctcactgtgtcacccaggctgcattgcagtggtgcaatcttggctcactgcatcctccacctcctgggtacaagtgattctcctgcctcagcctcccaagtagcggtgattacaggtgcctgccaccacacctggctgctttttgtatttttagcagagacggggtttcaccatgttggccaggctggtcttgaacccctgacctcaggtgatccgcctgcctcagcctcccaaagtgctaggattataagcgtgagccaccatgcctggcctccagaatattttttatagtctagaactttgtttcagtctttgaaaatttcacatgccactgacacttagagaacatagttgaaagatttgcaaaggaaaaactgtggtgaagttatggataacaccatgggttttttctaattttttgtggagatagggtcttactatgttgcccaggctggactcaaactcttatgctaaagtgatcctcccatctcagcgacccaagtacctgggactacaggtgtgcactactgcacctggctttttcaccacggttttggagaatgcagtatcattctgaattgaagcttctacctaaggtcaacattattctcccatttaacaatttttttttaatggagaatctgaaacatgtacaaaagaagtgggtactatcttatttatttatttatttgagacagagtctcactctgttgcccaggctggagtgcaatggcaggatctcagctcactgcaacctctgcctcccatgttcaagcgattctcctgcttcagcctcatgagtagctgggattacaggcgtgcaccaccatgcctggctaatttttgtatttttagtggagacggggtttcaccgtgttggccaggctagtcccgaactcctgacctcaggtgaccagcctgcctcggcctccgaaagtgctgggattacaggtgtgagccaccgcgcccggcctatcttttttatttttaaaatatacaatagagtgctcaaatcattccatttacaatcaacgttattgaagtatgatttacattaaatgaatatccattttcattatggatatttgacaaatataaacacacttgtaaccaccatcaccataatgaagataatagaacatctccatcatgcccaaagagattcctcataaccctttctatcagtccccccatatcctggtcctaggcacccactcatagacttcattatagattagatttgcctgtctaggatttcaaggaagtggaatcaaagaagtgtggactcttctgtgtgtgtgctctcttttttatagcgtgatgctggtaagattcttccacactgttcatgtcttgggggtccgttcttttgtgttactgagcagcactctattagatagatgtaccataacttgtttatctctctacctgttgatggacagggatttcttggataggtctttagattcactgatcttttcttttgcagcatctaatatgctgttaagtatatttagtaaacttttcatttctctttctttgttgttcttttttttttttttttgagacaggatcttgacctgtcccccaggctggagtgcaggggtgtgagcatggcttattgcagctttgacctcctgggctcaagcagtcctcctgcttcagcctcctgtgtagctgggaccacaggctcatgccaccatgcctggctaacttaaaaaaaatttttttttgtagagatgggatctcagtttgttgcttaggctggtctcaaactcctgggctcaagcgattctcccacctcagcatcccaaagtcctaggattacaggcgtgggccgctgtgcctggcctcatttttgatattgtattttttaatctctgaaagttccacttgattctttttcataacttccatttttctcatgttcatagttttctataagcacatttattttagctttttgaacatccttatcttctgttcccaccatctttgttttttctgggtttgttctcttgactcatttttatccttattctgggtcacattttccttcttcacatgtctaaccatttttgtttggatgctgtggctatttggaattccccattgttgagtgctagacttcgttggttttgctttttaaactttggcatgcagttgggttacttgcagttcagattgatcctttcagggcttgtttaagctttctttggagtggggttagagtagctttaagtcaggccttctcaacagtagtgctgtgacgttttggcattctccaactatgtgacattttgataattctttgttgtggaccctgtcctttgcattgtaggatgtttagcagtgtccctggcctcttcccagtggatgtcagtagcactcccctcctcccaccattcttgccaactaaaaatgtctccagactgccacgtcttccttggtctcgagtgtgtaaaattgccacctgttgagaaccactgctctaaggctgtttagccagacagttactgtaacctttctggagtgtctgctgagagctctaggtgctcagcagggtttcccttgtctggctgatcagaacttgaatgtttcccaggcctctgagagctccggagattgttatcactcatgcaacctttgctcggcttcacagagtattaccctgtgtgtgtgtgaatgtattaacacagaccctagaggaaccctgtgcagcattctgaaggctttttttctgtgtaatttcctctctgattctctgcctggcaagttccagctgcttccacttccctgaactcgtttcctgtctgtttaactcagcaagactgccgtgctctgtgtcacctcttaccctatactgtggtctggaaagggtctcctggctgatagccagagcagggtaagggttacttggtttgtttcccttcttagggagcaaactgtgttgcctcttgctcaacatctgaaaacacttgtttcatatattttgcccagttttctagttgataacagccggagggtaagcctgatcccacttattccactatggccagagtggagattgattcatttatttatttttttttgagacagtctcactctgttgcctaggctggagtacagtgatgcgaacacagctcactgcagcctcgacttctgggctcaagtgatcctcctgcctcagcctcctgagtagctgggaccacaggcaggcgccaccatacccaactaatttttttgtttttttaaatttttattagaaactaagtcttgcggctgggtgcagtggcttatgcctgtaatcctagcactttgggaggccgaggctggcggatcacctgaggttgggagtagcaaccagcctgaccaacttggagaaacctgtctctactaaaaatacaaaattagtcaggtgtggtggtgcatgcctgtaatcccagctactgaggagattgaggcaggagaattgcttgaacctgggaggcaaaggttgcggtgagccgagattgcgctattgcacttcagcctgggcaacaagagcaaaattctggctcaaaaaaaaaaaaaaagaaaagaaaagaaactaggtctcgctttgtttcacaggctggtcttgaacgccaggcctcacacagtccttctgcctcagcctcccaaagtgctgggatcacagatgggagccactgtacctggcgagatcatttattcttgaaaatttatccattttgacggcagggagactgatctgcagggcagccttggccatgaagtatgctgactctgcctccaggcagcattgttcacacacacctcagcttaggccaggcccctcatatgatttcttattaaaaaaaaaaattttttttagatagagtggctctgtcgcccaggctggagtgcagtggcatgacctcggctcactgcaacctccacctcccggattcaagtgatccttccacgtcagcctcctaagtagctgatattacaggcatgcaccaccacctggctaatttttgtatttttagtagagatggggtttcactatgttggccaagctggtcttgaactcatgacctcaagcgatctgcctgccttggcctcccaaaatgctgggattacaggcatgaaccaccacgcctggccaatttcgtaatacttttcttcatagcgcttaccactgcaatcattaaatcattatgtagttatgtatttaatgtctgtatccccacccagctgaggcatcctgaggtcatgcactgcgtgggttgtattaactattccattccgttatttgctccgggcctgtcatgtaaaggagttaggtaatttttgtaaagtgagtagattgtcagttgtgcttcatccataatcccttgtaaatgtgactttgtttccgatcctcagcctgacaagtggcttcctcattgccaagttgggtggtctttcctctgcttttcctctctaaccactgccgctttggtacttctgccattccttccttcttgaaactctccctggaccttagtgacatctcttcatcttggttctcctgtgttgctttctttctgctccagatgtatactttccaaggttctgctctcagccctttttaaaagtggcatctgaagttgcctgttccccagagctgggttacatgctgaggcttgtggagagccaacccagggagcagcgtgtgttcatccgtccattttgttcatttggaaagggcttaggaagctcctggggtggctacctgcttcagactcccccaccccgtgcccttatacattagcagtcacactcaaaataccaggccctcaagaagtacttgttaaaatgcactggaccataaagcttgaattttttttttttaatttttattattttttgagacagtctcactgtatcacccaagatggagtatggtggggcaatttcagctcactacaacatctgcctcccgggttcaggcaattctcatgcctcagcctcctgagtagctgggactacaggcgcgtgctactacacccggctaatttttgtatttttagtagagacaaggtttcaccacattggccaggctggtatcgaactcctggcctcaagtgatcagcccagcttggcctctcaaagtgctggaattacaggtgtgagtcactgtgcctggctcttgatttttattttaatgaagcaatttggactataaagcattttaagttatataattggtttaaacattcaggagatagaattggcagagtgggtgatcagtgggttgtagggtgacagaaatcaataatttatctaatgtgtgttgactgttacggggcactagaccttgtgggtgctggggtacagtagtggacaggcagtcagcggtcctgctgtcctggaactagtaaatgatgcccagattcctggactatgtgactcattgattgattgaggcagaaaccctggagggaggagcaggcgtgttagctggggtgggtgggatgagttttggacagtgtattccagttggagtttgatgtgacatcagagaggatgggcagggcttctcgggagggtggtctctgtggcagaagacagaagtttcttcttaagctcctccacgtgatactgtcatggagcacaggtgagcttcataggaagtgtgcttttttttttttatcttcatcatcccgaccaccaccacatgagacagagcccattcacccgttttactgatgaggcaactgatggtcagaacggagggctcagggataggaagtgagatccaggccaggctccagcctcgagctcgaggttcacgctgtctctgttgtgctcttctatcagctgctctctttcttttttttttttttttgaaatggagtctcactctggcccagattagagtgcagtggcgtgatctcggctcactgcaacctctgcctcccaggtttaagtgattctcctgcctcagcctctcaagtagctgggattacaggcacccatcaccacgcctggctaatttttgtattcttagtagagacagggtttcaccacgttggccaggttggtttcaaacttctgacctcaggtgatctgcccatctcagcctcccaaagtgctgggattacaggcgggagccaccgcgcccggcccctgtcagctgctttcatgcttctcttttccttgtgtcatctgtgagacttgtgctctgtgtaggggaaatgagtgggctttgtcagattataattcatgaggcattaaaagtgtttacagttaattctccctgatgaatagccccttccaaagtctattttggctcttggctcattaaaaattataattgtagaagtagcagtacattactgaggtttagaaaacagttaacagaagatccctcccaaatcctactcttctctaaaatcctactgtcctaaaacaactgttatttaagagattgtttggtgacaaggcgctttcattaagggaatttgccatagtgatctggggattctaagtcatggatctcaattttggctgccagagcctaactcacagtagctggaagatcatcagagaaccttgttgtcttgctttggctttccctccctctccctgcaacctagaagtatttgacataccagcattctgtttttgcttttcaaataatttttctaatttagtggttaatagtttaattgttaatttatatctctctaattgctaatagggatgaaaaagttttcataagtttgatttctgttttgaattttctgtttatatttttacctggtttctttttgggtgtgtgttttttttgtttgtttgagacagagtctcactctgtcgcgcaggctggatcactctgtcgcgcaggctggagtacagtggcacaatttcggctcactgcaacctctgcctcccaggttcaagtgattctcatgcctcagcctcctgggtagctggggttacaggcgtgtgccatcacacctggctaatttttgtatttttagtagagatggggtttcgccatgatggccaggctggtcttgaactcctggcttcaagtgatcctcctgccttggcctcccaaagtgctaggattacaggcgtgagccaccatgcctggctaatttttgtattttttgtggaaatggggttttgtcatgtttcccaggctgatctcaaactcctgaactcaatccattgggtatttatagttttcttatcattttttgcagtctccctcccaatattaagcatacagaatagctgtaagagcagtacagtaaacacttatgatcccttaccctagatttatcaattagcgttttgtcatacatttacatatggattttttttttttcctgaaccattggcaagtcagttgcagacatcctgacacttctgaatacctcagcatgtatatgtgcttttagcgtgatggccccttaaccacttatctttcccatatttgctgtaaatatttttcctagtctgttgcttatgtccaactctgttttcttgtgtttttcagagggtgacatgccatgccgtgccaacatcctggtcacagagttgtttgacacagagctgatcggggagggggcgctgccctcctatgagcacgcacacaggcatctcgtggaggtagtagacggagggctccctcagacgtgtctgtggtctcagccagctcacatagcactcactcatgcaccgtgtcccacacagcccaagccctcagcacctctgatacacctgggacacccctccattcctgggggggctctggttctcctcacttaaaactttcatgtcccttgaatgccaaatcttaataggttagagttgaaaagcaagaaactatattcaaattcagttaagttcagcaaatattctcaggaaggcgatgcttgagctgtcagtcttgagaagtgatcaggtgttggcctggcagatggaatatttctggtagaggagagcagcacgtgctagacgtgagactgaatcggtgcggtggctccggagcctgctttggattttgtgctgtgtgggaggcaggagagatgggcttagcaactgaggctagagagctgggcaggggctagatggagtggggtttgggggccatgcccagagggtagctgtcattagaaggtggggtggcatcacaggagggtttgaagcagaggattgacagcagacttatgcaggcagatgtgtggagggcagttggggtatagggctggaggttgcgggtgggttaaaaggctgtggaatcgtccagacgctgtggtacagtgggcctcagctaaggctgtagacagaggcctgataggtggtcccaggagttggtggtcccttaggtgtagagatatcgatgctagggtttgggcacctggattggatggtggtgcttcctgttgacggggagtgcaggaagaggggtagccttgggaaggttgggaagtggtgagggcgattcttctggtttacacagagtttgagctctctaaaggtcagccaagcaaagaggcccagagatgcatggatttactcagtgaagagggcatggttgaggtcactgtggagagtgtggagggagacagtccggaccagggagtccccttgtgaggtggggcggaggaagcacagcctggggaaggcagcgggagtgagtccagttagagcagcatttgtctaccagagcaaggttgggagatgcttcgcagggaggccagttattctgctagccttttaccatgcccagagcaacccctacagcagagaatcatttggcccaagaggccagtggtgtcctggtggtgaaagccatgtgggtagcagctgtgagtgtgctcttgccgggtccctattgcctggtgcatggaggacgtggagtggatgcaagaggtaggaggagagccggacaaggagccggagccggagccacagccctaggggctgagtgtgcagcagtgcccagcggcgctagagggctgggcagctgagggggcaccgtggtccacagggctttgccacaaggaggctcttgttttggtgctgggcaggagcggcactgaagggacactgagcccagagccaggatcaccacccagcagcaggacgtgaagcatttaagagtgccaggtagccaggaacttagctgacagaagtcattttaggcacagtgtgtgttctttttgaaatgtagtaccctttttttcccttttccaagggcatagggctgaaaacagttcactattctaatagtataaggtgttgggcattactgaaccaacctaatgttaaggaataaacctcttttgatcaatgggaattactgtgggtctaagcatctgatttttgtttggttttgtttttaatataaacttaggaaaattgtgaggccgtgccccacagagccaccgtctatgcacagctggtggagtccgggaggatgtggtcgtggaacaagctatttcccatccacgtgcagaccagcctcggagagcaggtcatcgtccctcccgttgacgtggagagctgccctggcgcaccctctgtctgtgacattcagctgaaccaggtgtcaccagccgactttacagtcctcagcgatgtgctgcccatgttcaggtaccaaggagccaccataggtgatggcgctttgagacatttgatggaagttgggtattaggaggttctttttgagtgggaaggaaatctagctgctgtcacctgcctcgaaggcaagagtcctttgcagccaaatgtcattgccagtgaagtcactgtaaaagcttaaaaaatggagtgtgtgaggttaaactctgcttacattcttgaatattattcctcagcatagacttcagcaagcaagtcagtagctcagcagcctgccatagcaggcggtttgaacctctgacatctggccgagctcaggtggttctctcgtggtgggacattgaaatggaccctgaggggaagatcaagtgcaccatggcccccttctgggcacactcagacccagaggagatgcaggtaagaggcaggagcctagcatgtgccctgtcaggaaacttgtccactgctgttcatgggaaagtaacagttgagccttggacccaggagaatttagagacaggagggctgtgtcagaatcaaagacaaaagtttttaaaaagcaagcaaaggctagctgtagtaacgtagccttcccagggtgagctcatggtgagcactcatggacacagtgaggaacagagaagttggctttcctctcccgcctcatcatgatgcagccacccttagataccacccctcatcccctgagtaatcccagggggctcccatcagcttggaatagagaactacagcctcaccttctgtggcctcaaaatctcctttctccaccccgatagaaagtaggcagaggacatgaaacacagaaaaggaaatacagatgatggggatagttgcccactgtccctcataataagagaaatgcagttttagctgctcacagcacctatgctcccagcctctcaggagactgaggcaggagggttgcttgaacccaggaagttgaggctgcagtgagtcgggactgcattactgcactcccgcctgggcaataagatgagaacctgtctctaaaaaaaaaaaaaaagagaaatgcaactttaaactgcaatgagatctcattttcacctactagtgaataaagtttaaacagtttgcaagcacactgttggggaagctcagggaaaaagcaggaaagcgagtcatcagaacgtttcaggtagaaagcaatgctgctttcagacatggggctgtggctggatttgcgtctgtgcagaatagatgtgtgcagccctggtttagtagaaaaaggccaacctaaaggccactagcagggatcaagtccattatcctttcagtgggtgaggtagctctctgtgcactgatgtgggacaagcttcagggtggattattacctgacacaaaaataaaggtgcagaatggtgtgttgtgtggcagcactggtgttagtaaaaataggaatatatgtgtttgtgagtggatagtcatgtgtggtgtacatataaggaggtctttggaagaattcccagaaattcgtaaaactgactgcatctgggaatggggactggaggttaggggtggaaaggaaacatattttttactatgcgtccttgtataccttttgaattttctctcatgtgcttgtgttatttacacccccatccaccctctctcactctcacactcaaaggaaaagaaagtgggaaaggtgtgtcggaattgcctgatgggttcttcccacccactgttcagacaaaaccaattcgctgacaccatggcattgcaataaagactttaattgacacgaagccagccacaccacgtgggggagagatttgttactcaaatcagtctccctgaaaattcacaggctacggttttttgtttgtttgttttgagatggagtttcgttcttgttggtcaggctggagtgcaatggcgcgatctcagctcactgcaacctctacctcccgggttcaagcaattctcctgcctcagccccctgagtagctgggattacgggcatgcgccaccatgcctggctaattttgtatttttagtagagatggggtttctccacgttggccaggctggtctcaaattcccgacctcaggtgacctgccccaccggcctcccaaagtgctgggattacaggcgtgagccgctatgcccggctcaggctagggtttttcaaggatagtttggcaggcgagggagtccacttctgggtggagtcatcagacagaaacgtaaaaacccgaaaagacatttcaaagggtcaatcttagtttctgcaaggtggtgttatctgcaggaggaatcagggaaggttgcagatcttgtgacctaacaatggcttcaccttagcagaattcagcctcctctcatcctcctaacctgatgatctttcattcagtttaagtttaattttggggaaggacggttatcatttaaagtattaaccagctgggtgtggtggctcacgcctgtaatcccaacactttgggagccccaggtgggtggatcatttgaggtcaggagttcgagaccagcctggccaacatggagaaaccccacttctactaaaaatacaaaaattacccggatgtggtggtgcgtgcctgtaattccagctactcgggaggctgaggcaggagaattgcttgaacccaggaggtggaaattgaagtgagctgaggtcacaccactgcactcaaacctgggtggcagagcgagactctgtctcaaaaaataataagaacaaaaaataaactgttaaccaaatgtctcccaaagttagcttggcccggacccaggaatgattaagggcagtttggacattaaagcaaaatgggggttggttagatgagatctctttcactgtcataattttctcactttttcgcaaaggcagttttggtttcaggaccaagaaatagaacctgtctctacccaggagcgcctcaggcaccatcctttgtccatggtccagcctgcctggccttaacccctggctttgtgttgaatgctcacctgctggttctaggtgtccacaacattatggaaggccttagcagcttcacctaccccattcccagagttactgtttaggccgaagggttgtgactgctggggaattgctgtcaatcagcgtacccataccgacagcagcatgtgagactaagaagtatgtgagcttcctagtctcccctccaccttccaggtgcctggccccgggtgtgtgtgtgtccagccagggcctgccagcatccctctgcaggctgtgtgtgtgtcactctgaattcacccacagagttgagattggcaccgcgtcacattcttcctaagactgtgttgcagaattagcataagaatagcattaaaatgttagtacttttggccggtggctcactcctataatcccagcacttgggaggccaaggcaggtggatcacctgaggtcaggagttcaagaccagcctggctaacatgttgaaaccctgtctctactaaaaatacaaagaaaattagccgggcatggtggcaggcgcctgtaatcccagctacagggctgaggcaggagaatcacttcaacctgggaggtggaggttgcagtaagctgagactgcaccattgccctccagcctgggcaacaagagcgaaactccgtctcaaaaaaaaaaaaagttagtacttttaatttgcatatcttcggagcgctactatgtattttttctccttgaatcctcttagtagacaaacaaggtaaccacaaccatagccaacccgggactcagcaggctccagggattggagcggggccttgtgtccaggagcagtagagtgggtcctgcccctggtctcttgactgtgggtcttgtgttgtttctctaccagcgttgacttttggattggaaatttgaaagctgctaatgaatctccctcatgaattcatgtaactgctttgatcctaagtatatttagtctgtcccaccttggcacagtgggttctgtcaccagctcctcaacgttaggacccaggaggtccctgtggtaggtagtatgggaaggacatgatgacagggcagtgccatgggagcctaggaggggtcgggaaagggttctcctgtcttcttcacatgcatttgcatagtgtgggaatgaataaaaggtttaaaagaacctgtgttattcctgttactatttatttttccagaacatatctggtcagattttcattttctagtttttatgttcaagtaagcgtcttaagcgtgtgggaatgtcattctcctgcctttttgttaaattaaagaccaggtgggtgggcacattccttacctgtgctcttggagtcccacagggccaagtttttcttagttcctgaaggtgacagaatgagcaggcagtcgtctcatcagagttgagccaggcatctcctgtttttgtttgttagagacagggtcttgctttattgctcaggttggattgtggtggcacctcttagctcactgcaactgtgaactcctgggcacaagcgatcctcccacctcagcctcctgagtagctgggactacaggcacttgccactatgcatggctaatcttgtgttttttgtagaaatgggtgtcactggtatgttacccaggctggtcccgtacacctggcctcaaacgatttgccagcctcggcctcccaaattgttgggattacaggcatgagccaccgtgtccagctggcatctactttttagggcagttcttcctttttcaaaaagaggcttaacaattatgagcgaaataaacctcattatataaaataaaaatatcactcatggtcctccctttcactcaaaatagctccctttgtttggtctctctccaaacgcgtgggtgtcatcggtgctcatctctgttccgggccccgtggccttcagcagcagcgtttaagatgtctgtccgtattctgcacgagggtttatatcccgttctgagtgctggccatttgggtgggttccagtttttgctggtataaataattctgtgatttgcatttttatgtgaatataacttttttttttcttttggggttttcttaggatagaaacctgtatgtggggtttgtagtaaggactagcacagcttattaaaaattgaccgtggatcattgtcaaccatgtttcacaatttagaatattcagttatttaaatacttcaatttaattcaaagaataagccaaaacctttttgtattttcccacctttttattttgaaaaattatatatccacagaataagtgaaaatgaacactgatggtcgctttattaatttaaatttaccagttgttaacgtttgccacatctgctttatctttgtctttctgcctcccttcctgcatctctacacacacacacacacacacacacgggcatgcacattttttttttttattgctaaatcatttgaaagtaagttgcagacatctgacactttacttttaaatacttcaacacttatctcccaagaatgaaaacagtctgcaacataaatgaaacacatgatcacacctaagaaaaacagtggttccatagtatcgtctaacatatggttcaaaataaaatttgtctccagaagtccttgatagcttttgtttcctcagtctacgatccagttaggtttagtgcattgagtctgactgttttgtaaattccgagtacgttaaagcctttggaatgcgtgccatggactgttctgaaaaggttccccttaaaccactaggtttaaaccaatttttttccttcaaaggaaacattcagcacagctctacgtgttgaagagagagctttggtgctactctgatggggtggggactggagcctgcacttgtcccctcccctgagccactctggcagattgctgctcttggccacattgtgtcttcctaaagccagcagggttcccgcaaacttttgggccactggcctctgagtttagagtttatttatctccttggccacaatagccagctgtagtctacattgtggacgtcctgaaaactggcagttctctggcatttggctcctggattagaagcattgctcatactgcagctcgttgacagctgactctgttctccgtttcagtggcgggaccactggatgcagtgtgtgtacttcctgccacaagaggagcctgtggtgcagggctcagcgctctatctggtagcccaccacgatgactactgcgtatggtacagcctgcagaggaccaggtacgtcgagcctcgtgggggtggaggatgagcctctgagacttgtatgtaaattccccatttacagatcctctggaggtgccagtgggttgatttgtgtctggacagaataacataagaacaaagatttgtgaccagtgtgtcagtgcccattcgtgtgtacccaggagaggctgtcatgggttgctggaatctgtttagagcagatgcgtaggaaaagtctggaattagcgggtgctctaagccctcatgcctactggagaccagtgtccagattcatgccctctggagacctgtggaggcgctcacagcccacgtctgtttgttcatctcctggcctagccctgaaaagaatgagagagtccgccagatgcgccccgtgtgtgactgccaggctcacctgctctggaaccggcctcggtttggagagatcaatgaccaggacagaactgatcgatacgtccaggctctgaggacc

SEQ ID NO: 15752 - DNA, 41597 bp, Homo sapiens
tagcagcggaggcgagcggagggtttcccgcggcgggtgaggcgctgggtatgctgggaaggtggggtcgctttggggttctgtgtgcagcgagcatggtgtccttggcaccagggtttcggcagaggagcctagcgtgggcctacttggactcctccgcgtggggcagctcgggacacccgggcctgcaggagagcggggttctaggctggccccggctctgcagtgcagccgggtgcctgccactcgcggggctctgtcgcagtactcgtgcctggcgcctcccctcagccacagagaccgcagtagctccaaccatcgcacccctaactgggccacgagttctctgattgccagacctgttgtctttgccactcactgttctgagtaattggagagtcgtgtattcactacacgccaaccagagtggtcctgtaaaagcgtaagcctagtgtagatacgcttctgcttaaaactcttgagtggctcccagtgcttttagaacaaaatccaaacgcctttccgaagtcgacaaggcccagcttgattgagcagaagatgtgataggagatgaggagcggggggcttctgcaaaagtgcttcggtcgctcaggcttttggcacattttgcttatgcaacctagttctttctaccttagggccttttcttgggaaagttggggtaaggattcctgacctgtaaaaactcttccccaacttttatcccggtctgtcttgtagatctcaaatgctagtttcctcagagtccttctgtaaccttggttttctctttctacaacgctctgtgtatttcttgcattcatgtagtctgtaatttgtattactctctcattagagtctaagctcttggagggcaagggtcttctctagcttgtggtggtggctccagtccctaatatagtgcctggcacatagaaggtatttaataaattttgttattttattttttcgagacagagtctcactctgctgcctaggctgagtgcagtggtgtgatcgaggcgcactgcagccttgacctcctgggctcaagcgatcctcacctcggcctaccgagtagctgggactacaggcacgcgccactacactcgggtaatttttaattttaatatatgtatatttatatatatatatatatatatatatttttttttttaagacagggtctcactctgtcacccaggctggagttcagtggcgccatctctgctcactgcaacctctgcctcccgggctcaagtgattcccctacctcagcctcccgagtagctgggagtaactgggactacaggcacaggccaccgcgcccggctaatttttttaaaaattttttgtagagaacggggtctcactatgttgcgcaggctggtctggaactcccagactcgatatccttgcgtctcggcccctcacagtgctgggatcacaggtgtgagccaccaccgcctagcaaatacattttgaatgaatgtagtggaccatctgctctgcagtctgacggctaatacaattagggcttggcatggtggtttctatttcctccttgtaaatggccatgcaagtttacaactcttggagaatgaggaggggttcagagaatatctcctgaatctgtagtgtagactgcttctgggagagaacaaataataatggatgagggcattcagccagagaaggtgtgtagtgcccaccagaagaggttcatgccttcataaaattgttaacacaagacatagttccaggtttgtttgtttgtttgagatacagtcttgctctgttgcccaggctggagtgcagtggcgcgatcttggctcactgcaacctctgcctcccaggttcaagcaattctcctgcctcagcctcccaagtagcagggattacaggcacctgccaccatgctggctaattttttgtatttttagtagagacggggtttcgccatgttggccaggctggtctcgaactcctgacctcaggtgatccacctgctttggtctcccaaagtgctgggattataggcgtgagtcaccgtgcctgggctgttccaggttttgaaaagacactgtggtcctggttttagactcagcaacatcacagacaagaaaggaatcctatggattaaagttcttcactataagttttttttttcctccagttcaaatgggtaacgtgccaatgtagtaaaggtttgagggaggcacgtctgacacaggcacatgaacacccagtcatcacgcttatgaactacaaaacgatgactcttaaccttgaagtgacttcagaattgattccacatggaccacaggattagtatttcaggactctaccatatggatcctattgatatgtttgacacctggtccagttttacttcactaaactgattgatataatgtgcatgattgtctaagcctttctaattggatgaaatgccttctccgtccacaaccccctccttctcctcctgcctcagctgaatccaccttttaagccttccttgaacattcagtcagatatggccatttctttctctactccaacatttgttggacacagttttctaatgcacattacagattctgacagttctagatattctgtctgtaaaataaatgttagtacatgagataaagtggattatagcaatgttgttaaactgctggttgcaacccattgatgggtcctgaccagcaagtaaaagtgcagctgggtgccgtggtgcatgccggtagtctagctacttgggaggctgacgtaggaggatcgcttgagtccaggagtttaaggctgtagagtgtaatgatcatgcctgtgaatagccactgtgatccaacctggacagcagggagatcccatctcttaaaaacaataaaaatgaaatagagcatatcagagggccttgttcgtaggaagtcagtattgttttgtggaacatttagttgtatgcgtacatgcaggtatgtgtattgagtctcattttaaagtatatttcttactggggttatcagaaagtttgaaaatcattagactaggggataggtatgctgagattttagtagtagagttttacctggacaaattgtctactttgaacctgactgccggcctgagtttgttcagggaagattgtttctaatctatttgctttttgtttgtttgttttggtgacggagtcttactctgttgcccaggctggagtgcagtggtgcggtctcagctcactgcaacctccgcctcctggattcaagtgattctcctgcctcagcctcctgagtagctgggaatacagacgtgcgccaccatgtctggctaatttttgtatttttagtagagacgagggtttcgccatgttggcaaggctggtcttgaactcctgacctcaggtgatccgcctgccttggcctcccaaagtgctgggattacaggtgtgagccaccgtgcccagcctgtttctcatctatttgtgtaagaattccatgtttacttactctagataacttcaaaagaaaaaaaactctggccaataaaatgccataggaatgtttagggatatgtggagtaggcattctttctaagttttcctgaagatgcaccaatgtttaacaagaaaggaagggcagtgtagaacacctattgctttctgcatggtaagagggatgggtattgggagagcccacacctgctgaggagtgcctttagactttgagcggtggtgtttctctccctcccagaaatagatctctttggggagacaggccatacaagacgtgaatctggtgacattttacttgtttgaagcaaaatttttttagatgatggagggtttttaaaaattgcttttaaaattaaaatttgaatagataagaagtaatcactataaaaaataatgaagcataaggaatgctagtattagctgggtgtggggcactcacttgtagtcccaactactggagaggctgaggcaggaagaatgcttgagcccaggagtttgagtccagcctgggcaacataacgagaccccatcttttaaaaaaaaaaaaaaagaaaaagaatgctaatatcgtgaacatttatgttcccaccacccaatttaagaaaaagaacaatacttttgaagtccactgcgtacccctccttgatcccatctctttcccttctcttttaggagttaactatcctgattccttgctatgctttttagtgtgatccctgaagaacgtatcactccattttgcatagctataaatttcatagaaatggaatcgtattgcatgtgttgtgtgatttgctgtttttgctcatcattatattcctgggattatccatttttaggtttatgtgtgactgtaatttattgtttagatgaaagttttcctggtttgacttgctctatcttcatatttttccttaagctaagggttcagcatacgaaggcagtattggtggcacttctttaacagtaccccatctcttctcctagccttgagggctgcacctagatgaacttgtgaggctcatttgaaccttttggaagcaccgaagcctgctgaagtttccagacatctgtatgaatctgttgtagttttttaatgttatatgctgaatataaaaccaagtaactcctgctggaaacatttacaatatcgattaacaaatactatcagtggctttgacatttttgtcagtttcttgatttttttccccgcttttgtctccccttcccccctccacattttggggcattgtgctgttaatagattttttttctgttcgtttgtttatatacctcctgtttccttctgatgttaatagatttctgacagtcagacttgtccacaagaactcaactggcaaggctgcttttctgtgctaaaactggggagctagtgggcaccatgaagatcttctgcagtcgggccaatccgaccacggggtctgtggagtggctggaggaggatgaacactatgattaccaccaggagattgcaaggtactgggttggtttacagcaggctgcagctgggtggggcacttgatctcaaagcagatgccttgggctccagtctgagcgtgggctaggctgtcacccagtgcttatgatgagggctggtgttggtcctgagcaggtctgctcagccaggtaggtatatgtagcagttaggcaaaatcatgcctgtttggagagtcagacattatgtagcagccttagcagagcctcagcatctgtttaacggagcaaagaaaacccaagcctcagtagtgttgatgaagttgaatcatttacttgccttactgaaatggtgacatgttcatcatatggttaaattcttttgaatgaaaaaaatgaaaatggttttttttttcccttagaagaaatatttaaaagtatgtgagttgttggccaggcgcagtggctcacgcctctaatcctagcactttgggaggccgaggtggccagatcacctgaggtcaggagttcgagaccagcctgaccaacatggagaaaccccgtttctactaaaaatacaaaattagctgggcatggtggctcatgcctgtaatcccagcttacttgagaggctgaggcaggagaatcacttgagcctgggaggcagaggttgtgttgagccgagatcgagccattgcactccagcctgggcaacaagagcgaaactctgtctcaaaaaaaaagtatgtgagttgttatgtagcaatcattaagtgcattcagtgtgccagcattgtgctaaggctgtggataccagatgaagaagatcctgttctcatcttcaaggaccatgcagttttgtggaagagacaggcacatacaaaattacagcacaaaagccaggcacggtggctcatgcccgtaatcccagcactttgggaggcaaagggcgggcgggcgggcggtggagggggtggtggcggctgatcacttgagggtcaggagttcgagaccagcctggccaacacggtgaaaccccgtctctataaaaaaaaattagctgggagtggtggtgggcgcctgtaatcccaggtactcgggaggctgaggcaggaaaatcacttgaactcgggaggtggaggttgcagtgagccaaggttgtgccactgcactccagcctgggtaacagagtgagactctgtctcaaaaaaaaaaaaaaaaaaattacagcacagtgagataaaggcacaagaggtcatggaagcagcaagaaccagctgaacttggggtgggaggtaatgtttgaataatttctcagttctaaaggaagagaaggtgaagtttgagcagcagggattacaggtaagctttcagatgagccagattgtggctgggtgcagtggcctacacctgtagtcccagctacttgggaggccaaggcaggaggattgcttatgcccacgagttcaacatagtaaaacactgtctcacaaacaaacaaagaccaaaaacaggctgggcacagtggctcatgcctgtaatcccagcactttgggagaccaaggcgggcggatcacctgaggtcgggagttcgagaccagcctgaccaacatggagaaaccctgtctctactaaaaatacaaaattagccaggtgtggtggcgcatgcatgcctgtaatcccagctgctcgggaggctgaggcaggagaatcacttgaacctgggaggcggaggttgccatgagccgagatcgtgccattgcattccagcctgggcaacaagagctaaactctgtctcaaaaaaaaaaaaagaaaaaaaaccacacacacacagatgggctattctggggagcagctagcagtttagtgcagctggagtgtggtacaaaagtactatggtaagagaggctgccgaaagcatacgcggggtcattttgtaaagggtggtagcaaaatgcaggaagaggaacatgagtttaagtccaagctttgccacttctttactctcttggccaagttacttctctgagccttaatataaaataatatatacttcaatatagtaatacattatctcacagtataatacaattatcttagaattgtttgatgattaaatgtaatacagtatctggtgcagaattagggcttaaaatatttacttttttttctttttttttttttgagacagagtctcgctctgtttcccaggctaaagtgcagtggcacgatctctgctcactgcaagctccgcctcctgggttcacgccattctcccgcctcagcctcttgagtagctgggactacaggtgcccgctgccacgcccggctaattttttgtatttttaatagagacggggtttcaccgtgttagccaggatgatcttgatctcctgaccttgtgatccgcccgcctcggcctcccaaagagctgggattacaggcgtgagccactgcacctgcccaggtcttaaaatatttctaaacattttggacattattttcttgttttattgttcagatggagtcttactctgttgccttggctggagtgcagtggcgcagtctcggctcactgcaatctctgcctcccaggttcaagggattctcttgcctcagcctcttaggtaactgggattacaggcatctgccaccacacctggctaatatttgtgtttttagtagagacttggtttcacctgttggccaggctggtcttgaacttctgacctcaggtgatccacctgcctctgcctcccaaagtgctgggattacaggtgtgagccacagtgtcaggcctggacgttattttctgagtgatatattaaacaggagagaaagaggattggattgcattttggaacactcactgagagcggtgtggagaggagagcatttggggatattgtagtcccagagctgcatagtcccagaggagacagctcgggggaacttgagtttggtaactcactggatatgatggagggagagagaagattcaagaagcaccaagacttctggttagaatgacaaagtggatggggcctgcaagggaggaatgggtggtgtggggaggggaacacgatggagattaggcgtttaggtttggacatccacatagagatgccaatggcagatagaattttgggtctggagacagaatttgtagttgttggaactgaaactgggagaggttgcagtctctcaagggggtgtggaatgtgaaaggtagagggctgaagaaggaatcccggaatagctgaggaggcaaagaagggcaagggagatagccagcatggaaaggaagaaagagggagtgtgtctagcaaggtcagaggcactgggaagtcccagatactgatgactgacatcagctgcaggagtgagctggtggtggttaccgagagtgatgtcagtggagtggtgggcagtaagtgtgaagaggccaggaaggtggtgagtgagatgccttttaaatagtgagcagaggtagaaaggactacatttcagctaagcatccatagctggcttcagatataaaaccttgatgtgccattaaaaaaaaaaaaaaaagaacccccttctttcagtgcaccgctcttcaaagtgtggaatgtggaccacctgtggcacaattgcctggagcacattagcccagccttctcaataagagtgagagtgtgtgtgtgtgtgtgtgtgtgtgtgtgttctgggactctgcatttcaggtaagctttctagtgattctagtgttgacccaaggctggagggcctctgttttaatgtgagctccttagctgtccccttgaattcccagaaagcgtggcagggcctgcctagttctgggtgctcatcccgaccccgcctgagggttttcagtgtgtgaattactgcagtaggaaatatggagaagtgattctcctccctttactacggtattggtgaactctttagttttccctgatgatgttaagtgaacgtgcccagtggggtacctgtcacatatacagtgggtgtatgtgagtgcttctctttccccggctgctctccctaataccgcatcagtggttatctccaggcagagatgtaggccaggttaggtcaagtattaggcagattgagtctgagtttttcctgaggaggaaaatgtgtagtgtatagcaagatcaagatgctagtggctgtggaattactgtgacagggctaactgccgagaccagctcggtcgtggagaccctaacccagtggcgctagaggaattaaagacacacacacagaaatatagagtgcagagtgggaattggggggctgacagccttcagagctgacagccacgaacagaactttacctacatatttattgacagcaagccagtgataagcattgttcctatagattatagattaaaacgggaaacaaagggatgggctctggctagttatttgcagcaggaacatgtccttaaggcacagatcactcatgctattgtttgtggttcaggaacgccttaagcgaaagccgccctgggtgggccaggtattccttgccctcattccagtaaacccacgaccttcagtgtgggcatcatagccatcaacgagcatgtcacagtgctgcagagatttgtttatgaccagttttggggcctgtttttggccagatttgggggcctgttcccagcagctaactactggagcatttttaggtctgagaacatctttctctgagacttttttctgcagcactagagaataacagcttgaaactctattaaaataaagtggccaggtgcagcgacggatgcttgtattgtagttctgctgaggcaagaggatctcttgagctaaggagttcaaggctgcagtgcccaatgattgaggctgttcatagccactgcactacagcctgggtgacataacgagaccctgtttctaaaaataaacaaaaaaataggccaggcgcagtagctcacacctgtaatcccagcactttaggaggccaaggtgggcggatcagttgaggtcaggagttcgagaacagcctggccaacatagtgaaaccccatctctaatgtaaatacaaaaattagccaggcgtggtggtgagcacctgtaatcccagctacctgggaggctgaggcatgagaatcacttgaacttgggaggcagaggttgcagtgagctgagattgcaccactgtactccagcctgggtgatggggtgagaccctgtctcaaaaaaaaaaaaataaataaagataaaagacaaccaaaaaatagtttaaaatagatgacacgtttgttctatctgtttagcaatgtgtttatatatgtgaatactcttgtgtgttgatgtgtatcatgcaaaggttactgacttttttgttttttaggtcatcttatgcagatatgctacatgacaaagacagagtaagtgtaaaaggaaactattatcttgatgtggggtgttttgaagtcttggattacaagaaggttaagaatccctgggggtcatgatgttaaatgatactgagaggcgtatggtgtagaagtcaggaaatcagttgggagactgggtcctacttctggctctatttttgttgtttaatctcccagctttatcaagatagaactgacaaataaaaatggtctatgtttatggtaatacaatgtgatgaatatatgtgtatggtgtaaaatgattgaatcaagctaattaacaaatctaccgcctcatacttttttgtgtgtggtgagaacatttaagatctactcgcttagtaatttttaagtgtacattattaactatagctcacaatgccgtacagcagatctccacaacttattcatcctatctgactgaaacatcagatcctctcccttagcaggtaccattctctgggcttctgagttcaacatttttttttttttttgagacagaatctcgctctgtcactcaggctagagtacaggggcgagatctcggctcactgcagcctcagtctcccgagttcaagcgattctcctgcctcaacctgcctaagtgttgggattgtacctagtattgggataatactattattatactattatacctagtattgggattataacttgggattacaggtgcgtgccatgacacctggccttcactgtagttttaatttccatttttaattttaattttatttttttgagactgggtctctgttgcccagtgcagtggtgtgatctcggctgcactgcagcctagacttcttgggcttaagcgatcccccaacctcagccttcccagtagctgggactacaggcatgccaccatgcctggctaatttttgtatgttttgtagaggcagagtttcgctgtattgcccaggctggtcttgatcccctgaggtcaagtgatccacccgccttggtctcccaaagtgctgggattatgggcatgagctactgcgcccggccatcgtgtgcttgtttaccatgtgtatatctttgttctagtctagggttatgaacataggtgtgattcttgatagacactgccacattgccttcaaaaagggttccagattcactgtaatatcttcaaaactgggtcattaaaaagtgacagctaatttaatggcatcgttaaagtgaaggctgtgccatccctggtttacaattgaggacgctgttcatcaattttttttaacttaaaaaataaataaaacaaggccaggcacggtggctcatgcctgtaatcccagcactttgggaagccgaggcaggcagatcacggggtcaggagatcgagaccatcctggctaacatggtgaaaccccgtccctactaaaaatacaaaaaaaagccgagcgtggtggcgggcagggcctgtaatcccagctactcaggaggctgatgcgggagaatggcgtgaatctgggaggcggagcttgcagtgagccgagattgcaccactgcactccagcctgggcgacagggagactccgtctcaaaaaaaaaaattgtggtaaaaacacataacataaacggtcatactgattgtatctaagacataaatgcacttactttgacaatgaaatagttctatatttctgtgaaaaattatttcacccagactaaacatttttgtgctttacctcagaggcaacgtcatttcttttttttcttttttctttctttctttttttttttttaacaagaatgagtctccctctgttgccaggctttagtgcagtggtgtgatcttagctcactgcaacctccacctcccgagttcaagtgattctcctgccttagcctcccaagtagctggggttacaggcatgcgccaccatgcctggctaattttttgtatctttagtagagatggggtttcaccatgttggccaggttggtctccaactcctgacctcaagtgatccacccgcctcagcctcccaaagtgctgggattacagatgtgagtcactgcacccggcctggtaattctaaagaatattcagttctagatattttctaattccagtctgatttagtcttttgcctatcagtttagaagtgtgtttcttaatgtatgaaaaattttttttcttcagttgtgtttctgatattaagatttttgacttgttttgcattgtggtcagaggatatcacccttttgatgccagttctgtattagctgtctaatgttatttaacaaattaccttaaattttaatagcctcttaatatttcttactaacttggcaggtcatcagtctatttaaaagatttgcacatattttttccatcatctttagttattttcaacagaagggtcactgtgcctattgagtcagaccgttatagatgaaagatgtatgtgtttactaaagacagaagtaaaaatcttcaagatgcaaagaagttattttctgatggggaaaatactttttagtgaagctctctgagttagagtcggtaaaggaaaacaagccatacatattgcagcagagcggctttaacacaaggagctggctacccagctgtgggagggctagaaagcaaatgggaacgctgagtaacctaacagtagagattgcagggagcagttaccttgcctagggctgagaaactaaacgagaagattaggatttccagaagccacaagcattgaggagagatcctgtggaccactgtccaagtacggctgcagctctgaggggcccaaggagctggttatgggatcattgggaaaagttggagtctgcaatcaactgcccctaccgagaggaccctgatgagaacagcagcatgcagaaaggagcaagcctgctctgtcctcctaccttccagtcgccctcttggtcccccttttggctgtacctaacagttggaaaaaggagaacatggtttgcagggctctggcatcacttagtagaggatagaagagtgagtgtggagcagggacagtcgcttaataaagggcaaggggctgactcacaagacctgcccaactcagccagagctgttctgccaggggccagaaaggccatagggccctgacttgcactgccactgccagctgtgactctagaactttgcaaagcacctttccacttacttataataactggtagtaagtgacggccatgtcttccttagaatgtaaaatactaccaaggtatccgggctgccgtgagcagggtgaaggacagaggacagaaggccttggttctcgacattggcactggcacgggactcttgtcaatgatggcggtcacagcaggtgccgacttctgctatgccatcgaggtaagccattcccttcaggtgtgtgtcctgcatcttgcatgggaaatcccctatgctcttgcactttccccgtctgttccttcacaaacattcatggagtgctcactctgtgccaagcacagagccaggctctgagcgtatagagatgagtcagacacagttccttcctccaggagctaattttctcctctgtcagcctaggctgcacatcagaatcactaggagctttagaaaatacttacaggctgggcacagtggctcacgcctgtaatcccagcacttcgggagggtgaggcaagacaattgcttgagcccaggagtttgagaccagcctgggcaacatagtgagatcccatctctacagaaaaacttttaaatattagctgggcatggtggcatgtgcctgtgttccagctattcttgaggctgagatgggaagatctcttgagcccggaaagtcaaggctgcagtgagccatgatttggacttcatgtaagaaagcaaaaaattacttctaccttgtttaagccagttattgtgggactttgttgtttccaactaatcagtatatgaactcagttttgtaggggaaagtatttaaatacatgcccccacaccaccacactccagcctgggtgacagagtgagactttatctcaaaaaaatcaaaacgaaacaaaggctgggcacagtgtctcacccctgtaatcccagcactttgggaggccgaggcttggatcatgaggtcaggagttcaagaccagcctgaccaacatggtgaaactccatctttactaaaaatacaaaaattagccgggtgtggtgatgcgcgcctgtaatcccagctactcaggaggctgaggcgagagaatcgcttgaacccaggaggcagaggttacagtgagccgagattgcgccactgcactccagcctgggcgacagagtgagactccatctcaaaacaaaacaaaacaaaaaaaccttatgcctagtccccagccctaacagattttgatttaacttttctggggtgaggcctgagccttgggacttgggaatgtgcggcaaggttgagaaccactaccttaaatgtccctatggagtcagctctcttatgtttaccaatttgtcatttctttaataaaacattaaacagcttgagcccacagagcaagaaaaattaaaaaccaaacaaaattaaaaattaaacatgttatttttctcataaaacaaataatgcatattattataggaaatttggtaaataccaaataaaaatagtatgttgacccaaagttaagtactgttaacattttggtgtatattcttccaagttttgggggcaggcagggagcatgtatataaatactttccctacaaaattgggttcatgtagtgattgagttggaaataacaaagcctcaaaatcactgtggtttaaggtagagtagttttttgctatctttttcgtggcgtgatctctattcaccgcaacctccgcctcctgggttcaagcaattctcttttctcagcctcccaaatagctgggattacaggtatgtaccactgcacctggctaatttttatatttttagtagagatagggtttcgccatgttggccaggctggtcttgaattcctgatctcaggggatccccccacctcagcctcccaaagtgttgggattacaggtgtgaatcactgcgccctgccttgttcctcttttttaaaagtaagaataactttcccaggaatttctattatagcaaacctctccttgggtaccatcggctagaatgaggttaaatctcatttcttatctctggcaagagggattcagttactcttagctcagacaagtgcaccactgcaaaggtcagttccccacgctgcaccctcacctgatttcaggggagaggaggacacagaatggatgtcgggaggtcatcttcagtgtccactcctggtagtgttttgggtgagatcttgagcttcttgatgggctgaggagaaggaggtgtgaaggtaccagcttgcaggttcagggagaggtgactgatgagtcagaaggcagcaggggtgagggacgacactggctttggatattgtcagggtggaggcaaagtgattggtgagaactagggtttaaggccctcaaaccacatctaaaaacatcaaggcaaatcctagaaataatttgaaatagatgatgaagatttttctaggagaacatgtgtgtgtattccatgtaaatactgcgcgctaatcaattgcacaactggagctgctcacgtaagtactctttacgaaaggatacagcatttgtcccttgattatagtaaaaaatatagtattcatggtagaaaatgtgggaaatacagaaaaggatttagaaaaaaggaaaatcttatcaggaacagtctcggtatcattttgtggtttccacttcgtgtgtagggccacacgtgagtctgtttgttttacatgctagagctcttggggctgtggaatctagactggataagttgaaaacaaagagttggaggtgcttatttatgttcagggaaactcgaagagttcagggaagacttctggatgggggattcatgctgccctgggaagtggggtttgatttggcaggtggggccaggatagggaaggctcagtgatcatgagatcattgtggctggagtgttggttgttgggggaatgggggaggaagactgggaaggtaagggagggcctccaaagcagtagtttccccttatctatggtttcacttttcgtgatttcagttacctgtggtcaactgaggtccaaaaatactaaatggagccaggtgcggtggctcacgcctgtaatcccagcactttgggtggctgagacaggtggaaaccttgagtcccagagttggagaccagcctgggcaacatggcaaaaccccgcctctacaaaaagtagctgggcatggtgatctacgcctgtagtcccagctacttgggagattgaggtgggaaattgcttgagcctgggaggtggaagctgcagtgatcatgccactggactccagcctggacaatagagtgagacccttctcaaaaaaaaaaaaaagaaaaattaaatggaaaattccagaaattatttataagttgtaagttgtgtaccattctgagtattattacataattgttctatttttagttattgttaatttataaattattatttatatttattattgtgcctaatttataaattaaacctggtcataggtaagcttggaggctgaagcagctccactgtgaatgctaatcctccacgctgacttctgaccaaccccagcttcaggaatgcctctaaaatttccgctctcatgcactttgatgtaaatcctgccctcaggtcagaacaactttgatgttatcataaatacatacttaccgtaaatcctgcccttcgtcaaattccctgtggtatgtaagccctgcgtctgagccataacagtgtgggggcccagtttctcactgcccgagacaaggcttctgtttgtatgtctctataaagtgtgtctttctgagaagctggatttgccagtctttcctcagcctctcagctcccgtggcctgttggggtaggtttgcatagagctgcccaccatggaacagtatgtatgtatagcaaaaaaaaaaaaaaaaaaaaaatggtatacataagggtcagtactgtctgaggtttcaagcatccaccaagggtcttaaaatgtatcccccatggacaagaggcactgctgcaccataagaaaatagaggctgtgttctgccaacagtggggatttgggacaattttgagcccagaggatgacctacttactcacacctacagtctgctctcctctggagggcacagcacgcctcccaggttcgtgaggcaagtccctttcctggctttttggcgtcctcttgtgcggtactgacacctactgctcttactaagtagtgcagcctcctcaggatccccggcatccccgctgtgcctggcacggaatgagagtccctaatcacaagttaaagccagctgaatctcagccctttttcatgatgcacatttggagaataaagtatttaagttacatatcttaggaccagaatcaaggaatagcttgctcaccttaaaggtcagactactgtttaatttattgctcatttttccttgggtttcggctctattttctaggttttcaagcctatggctgatgctgctgtgaagattgtggagaaaaatggctttagtgataagattaaggttatcaacaagcattccaccgaggtgactgtaggtccaggtgagatttacacaccctgtgttgaaagctttgcttgctcttgtgtgagagaggaaaagggttattccagttacctggaacaaatccaggtcatagcatagaagtgggacctctctgtgtggagctctgacagtaaggacttggtttctcttgatgtttattttcctgctagttaaaactagtcaacaaggagtagactagagctagtcaggtccagcaatggagacgcaaacaaaacctacatttgctttaagcaaattggaattcttatggggctcaactcttgagtttcaactaccaataattacgccttggataaacctcattggctacgatactgccactgctcaaagctcaactctgagtttcatcaggcagaaagtacttagttcttttatttatttatttttttgagagagagtctcactctgtcgcccaggctggagtgcagtggcgctatcttgcctcactgcaagctctgcctcctgggttcacccatcctggctaacacggtgaaactctatctctactaaaaatacaaaaaattagccaggcatggtggtgggcacctgtagtcccagctactggagaggctgaggcaggagaatggcgagagtagttctgacattctgcttctgcatacaacatgaacaattttcctgtatagcattgtctcttaaggtttccagaatatgtatatgtacacacacacacacacacacacatattttttttttgagacggaatctcactgtgtcacccaggctgcattgcagtggtgcaatcttggctcactgcatcctccacctcctgggtacaagtgattctcctgcctcagcctcccaagtagcggtgattacaggtgcctgccaccacacctggctgctttttgtatttttagcagagacggggtttcaccatgttggccaggctggtcttgaacccctgacctcaggtgatccgcctgcctcagcctcccaaagtgctaggattataagcgtgagccaccatgcctggcctccagaatattttttatagtctagaactttgtttcagtctttgaaaatttcacatgccactgacacttagagaacatagttgaaagatttgcaaaggaaaaactgtggtgaagttatggataacaccatgggttttttctaattttttgtggagatagggtcttactatgttgcccaggctggactcaaactcttatgctaaagtgatcctcccatctcagcgacccaagtacctgggactacaggtgtgcactactgcacctggctttttcaccacggttttggagaatgcagtatcattctgaattgaagcttctacctaaggtcaacattattctcccatttaacaatttttttttaatggagaatctgaaacatgtacaaaagaagtgggtactatcttatttatttatttatttgagacagagtctcactctgttgcccaggctggagtgcaatggcaggatctcagctcactgcaacctctgcctcccatgttcaagcgattctcctgcttcagcctcatgagtagctgggattacaggcgtgcaccaccatgcctggctaatttttgtatttttagtggagacggggtttcaccgtgttggccaggctagtcccgaactcctgacctcaggtgaccagcctgcctcggcctccgaaagtgctgggattacaggtgtgagccaccgcgcccggcctatcttttttatttttaaaatatacaatagagtgctcaaatcattccatttacaatcaacgttattgaagtatgatttacattaaatgaatatccattttcattatggatatttgacaaatataaacacacttgtaaccaccatcaccataatgaagataatagaacatctccatcatgcccaaagagattcctcataaccctttctatcagtccccccatatcctggtcctaggcacccactcatagacttcattatagattagatttgcctgtctaggatttcaaggaagtggaatcaaagaagtgtggactcttctgtgtgtgtgctctcttttttatagcgtgatgctggtaagattcttccacactgttcatgtcttgggggtccgttcttttgtgttactgagcagcactctattagatagatgtaccataacttgtttatctctctacctgttgatggacagggatttcttggataggtctttagattcactgatcttttcttttgcagcatctaatatgctgttaagtatatttagtaaacttttcatttctctttctttgttgttcttttttttttttttttgagacaggatcttgacctgtcccccaggctggagtgcaggggtgtgagcatggcttattgcagctttgacctcctgggctcaagcagtcctcctgcttcagcctcctgtgtagctgggaccacaggctcatgccaccatgcctggctaacttaaaaaaaatttttttttgtagagatgggatctcagtttgttgcttaggctggtctcaaactcctgggctcaagcgattctcccacctcagcatcccaaagtcctaggattacaggcgtgggccgctgtgcctggcctcatttttgatattgtattttttaatctctgaaagttccacttgattctttttcataacttccatttttctcatgttcatagttttctataagcacatttattttagctttttgaacatccttatcttctgttcccaccatctttgttttttctgggtttgttctcttgactcatttttatccttattctgggtcacattttccttcttcacatgtctaaccatttttgtttggatgctgtggctatttggaattccccattgttgagtgctagacttcgttggttttgctttttaaactttggcatgcagttgggttacttgcagttcagattgatcctttcagggcttgtttaagctttctttggagtggggttagagtagctttaagtcaggccttctcaacagtagtgctgtgacgttttggcattctccaactatgtgacattttgataattctttgttgtggaccctgtcctttgcattgtaggatgtttagcagtgtccctggcctcttcccagtggatgtcagtagcactcccctcctcccaccattcttgccaactaaaaatgtctccagactgccacgtcttccttggtctcgagtgtgtaaaattgccacctgttgagaaccactgctctaaggctgtttagccagacagttactgtaacctttctggagtgtctgctgagagctctaggtgctcagcagggtttcccttgtctggctgatcagaacttgaatgtttcccaggcctctgagagctccggagattgttatcactcatgcaacctttgctcggcttcacagagtattaccctgtgtgtgtgtgaatgtattaacacagaccctagaggaaccctgtgcagcattctgaaggctttttttctgtgtaatttcctctctgattctctgcctggcaagttccagctgcttccacttccctgaactcgtttcctgtctgtttaactcagcaagactgccgtgctctgtgtcacctcttaccctatactgtggtctggaaagggtctcctggctgatagccagagcagggtaagggttacttggtttgtttcccttcttagggagcaaactgtgttgcctcttgctcaacatctgaaaacacttgtttcatatattttgcccagttttctagttgataacagccggagggtaagcctgatcccacttattccactatggccagagtggagattgattcatttatttatttttttttgagacagtctcactctgttgcctaggctggagtacagtgatgcgaacacagctcactgcagcctcgacttctgggctcaagtgatcctcctgcctcagcctcctgagtagctgggaccacaggcaggcgccaccatacccaactaatttttttgtttttttaaatttttattagaaactaagtcttgcggctgggtgcagtggcttatgcctgtaatcctagcactttgggaggccgaggctggcggatcacctgaggttgggagtagcaaccagcctgaccaacttggagaaacctgtctctactaaaaatacaaaattagtcaggtgtggtggtgcatgcctgtaatcccagctactgaggagattgaggcaggagaattgcttgaacctgggaggcaaaggttgcggtgagccgagattgcgctattgcacttcagcctgggcaacaagagcaaaattctggctcaaaaaaaaaaaaaaagaaaagaaaagaaactaggtctcgctttgtttcacaggctggtcttgaacgccaggcctcacacagtccttctgcctcagcctcccaaagtgctgggatcacagatgggagccactgtacctggcgagatcatttattcttgaaaatttatccattttgacggcagggagactgatctgcagggcagccttggccatgaagtatgctgactctgcctccaggcagcattgttcacacacacctcagcttaggccaggcccctcatatgatttcttattaaaaaaaaaaattttttttagatagagtggctctgtcgcccaggctggagtgcagtggcatgacctcggctcactgcaacctccacctcccggattcaagtgatccttccacgtcagcctcctaagtagctgatattacaggcatgcaccaccacctggctaatttttgtatttttagtagagatggggtttcactatgttggccaagctggtcttgaactcatgacctcaagcgatctgcctgccttggcctcccaaaatgctgggattacaggcatgaaccaccacgcctggccaatttcgtaatacttttcttcatagcgcttaccactgcaatcattaaatcattatgtagttatgtatttaatgtctgtatccccacccagctgaggcatcctgaggtcatgcactgcgtgggttgtattaactattccattccgttatttgctccgggcctgtcatgtaaaggagttaggtaatttttgtaaagtgagtagattgtcagttgtgcttcatccataatcccttgtaaatgtgactttgtttccgatcctcagcctgacaagtggcttcctcattgccaagttgggtggtctttcctctgcttttcctctctaaccactgccgctttggtacttctgccattccttccttcttgaaactctccctggaccttagtgacatctcttcatcttggttctcctgtgttgctttctttctgctccagatgtatactttccaaggttctgctctcagccctttttaaaagtggcatctgaagttgcctgttccccagagctgggttacatgctgaggcttgtggagagccaacccagggagcagcgtgtgttcatccgtccattttgttcatttggaaagggcttaggaagctcctggggtggctacctgcttcagactcccccaccccgtgcccttatacattagcagtcacactcaaaataccaggccctcaagaagtacttgttaaaatgcactggaccataaagcttgaattttttttttttaatttttattattttttgagacagtctcactgtatcacccaagatggagtatggtggggcaatttcagctcactacaacatctgcctcccgggttcaggcaattctcatgcctcagcctcctgagtagctgggactacaggcgcgtgctactacacccggctaatttttgtatttttagtagagacaaggtttcaccacattggccaggctggtatcgaactcctggcctcaagtgatcagcccagcttggcctctcaaagtgctggaattacaggtgtgagtcactgtgcctggctcttgatttttattttaatgaagcaatttggactataaagcattttaagttatataattggtttaaacattcaggagatagaattggcagagtgggtgatcagtgggttgtagggtgacagaaatcaataatttatctaatgtgtgttgactgttacggggcactagaccttgtgggtgctggggtacagtagtggacaggcagtcagcggtcctgctgtcctggaactagtaaatgatgcccagattcctggactatgtgactcattgattgattgaggcagaaaccctggagggaggagcaggcgtgttagctggggtgggtgggatgagttttggacagtgtattccagttggagtttgatgtgacatcagagaggatgggcagggcttctcgggagggtggtctctgtggcagaagacagaagtttcttcttaagctcctccacgtgatactgtcatggagcacaggtgagcttcataggaagtgtgcttttttttttttatcttcatcatcccgaccaccaccacatgagacagagcccattcacccgttttactgatgaggcaactgatggtcagaacggagggctcagggataggaagtgagatccaggccaggctccagcctcgagctcgaggttcacgctgtctctgttgtgctcttctatcagctgctctctttcttttttttttttttttgaaatggagtctcactctggcccagattagagtgcagtggcgtgatctcggctcactgcaacctctgcctcccaggtttaagtgattctcctgcctcagcctctcaagtagctgggattacaggcacccatcaccacgcctggctaatttttgtattcttagtagagacagggtttcaccacgttggccaggttggtttcaaacttctgacctcaggtgatctgcccatctcagcctcccaaagtgctgggattacaggcgggagccaccgcgcccggcccctgtcagctgctttcatgcttctcttttccttgtgtcatctgtgagacttgtgctctgtgtaggggaaatgagtgggctttgtcagattataattcatgaggcattaaaagtgtttacagttaattctccctgatgaatagccccttccaaagtctattttggctcttggctcattaaaaattataattgtagaagtagcagtacattactgaggtttagaaaacagttaacagaagatccctcccaaatcctactcttctctaaaatcctactgtcctaaaacaactgttatttaagagattgtttggtgacaaggcgctttcattaagggaatttgccatagtgatctggggattctaagtcatggatctcaattttggctgccagagcctaactcacagtagctggaagatcatcagagaaccttgttgtcttgctttggctttccctccctctccctgcaacctagaagtatttgacataccagcattctgtttttgcttttcaaataatttttctaatttagtggttaatagtttaattgttaatttatatctctctaattgctaatagggatgaaaaagttttcataagtttgatttctgttttgaattttctgtttatatttttacctggtttctttttgggtgtgtgttttttttgtttgtttgagacagagtctcactctgtcgcgcaggctggatcactctgtcgcgcaggctggagtacagtggcacaatttcggctcactgcaacctctgcctcccaggttcaagtgattctcatgcctcagcctcctgggtagctggggttacaggcgtgtgccatcacacctggctaatttttgtatttttagtagagatggggtttcgccatgatggccaggctggtcttgaactcctggcttcaagtgatcctcctgccttggcctcccaaagtgctaggattacaggcgtgagccaccatgcctggctaatttttgtattttttgtggaaatggggttttgtcatgtttcccaggctgatctcaaactcctgaactcaatccattgggtatttatagttttcttatcattttttgcagtctccctcccaatattaagcatacagaatagctgtaagagcagtacagtaaacacttatgatcccttaccctagatttatcaattagcgttttgtcatacatttacatatggattttttttttttcctgaaccattggcaagtcagttgcagacatcctgacacttctgaatacctcagcatgtatatgtgcttttagcgtgatggccccttaaccacttatctttcccatatttgctgtaaatatttttcctagtctgttgcttatgtccaactctgttttcttgtgtttttcagagggtgacatgccatgccgtgccaacatcctggtcacagagttgtttgacacagagctgatcggggagggggcgctgccctcctatgagcacgcacacaggcatctcgtggaggtagtagacggagggctccctcagacgtgtctgtggtctcagccagctcacatagcactcactcatgcaccgtgtcccacacagcccaagccctcagcacctctgatacacctgggacacccctccattcctgggggggctctggttctcctcacttaaaactttcatgtcccttgaatgccaaatcttaataggttagagttgaaaagcaagaaactatattcaaattcagttaagttcagcaaatattctcaggaaggcgatgcttgagctgtcagtcttgagaagtgatcaggtgttggcctggcagatggaatatttctggtagaggagagcagcacgtgctagacgtgagactgaatcggtgcggtggctccggagcctgctttggattttgtgctgtgtgggaggcaggagagatgggcttagcaactgaggctagagagctgggcaggggctagatggagtggggtttgggggccatgcccagagggtagctgtcattagaaggtggggtggcatcacaggagggtttgaagcagaggattgacagcagacttatgcaggcagatgtgtggagggcagttggggtatagggctggaggttgcgggtgggttaaaaggctgtggaatcgtccagacgctgtggtacagtgggcctcagctaaggctgtagacagaggcctgataggtggtcccaggagttggtggtcccttaggtgtagagatatcgatgctagggtttgggcacctggattggatggtggtgcttcctgttgacggggagtgcaggaagaggggtagccttgggaaggttgggaagtggtgagggcgattcttctggtttacacagagtttgagctctctaaaggtcagccaagcaaagaggcccagagatgcatggatttactcagtgaagagggcatggttgaggtcactgtggagagtgtggagggagacagtccggaccagggagtccccttgtgaggtggggcggaggaagcacagcctggggaaggcagcgggagtgagtccagttagagcagcatttgtctaccagagcaaggttgggagatgcttcgcagggaggccagttattctgctagccttttaccatgcccagagcaacccctacagcagagaatcatttggcccaagaggccagtggtgtcctggtggtgaaagccatgtgggtagcagctgtgagtgtgctcttgccgggtccctattgcctggtgcatggaggacgtggagtggatgcaagaggtaggaggagagccggacaaggagccggagccggagccacagccctaggggctgagtgtgcagcagtgcccagcggcgctagagggctgggcagctgagggggcaccgtggtccacagggctttgccacaaggaggctcttgttttggtgctgggcaggagcggcactgaagggacactgagcccagagccaggatcaccacccagcagcaggacgtgaagcatttaagagtgccaggtagccaggaacttagctgacagaagtcattttaggcacagtgtgtgttctttttgaaatgtagtaccctttttttcccttttccaagggcatagggctgaaaacagttcactattctaatagtataaggtgttgggcattactgaaccaacctaatgttaaggaataaacctcttttgatcaatgggaattactgtgggtctaagcatctgatttttgtttggttttgtttttaatataaacttaggaaaattgtgaggccgtgccccacagagccaccgtctatgcacagctggtggagtccgggaggatgtggtcgtggaacaagctatttcccatccacgtgcagaccagcctcggagagcaggtcatcgtccctcccgttgacgtggagagctgccctggcgcaccctctgtctgtgacattcagctgaaccaggtgtcaccagccgactttacagtcctcagcgatgtgctgcccatgttcaggtaccaaggagccaccataggtgatggcgctttgagacatttgatggaagttgggtattaggaggttctttttgagtgggaaggaaatctagctgctgtcacctgcctcgaaggcaagagtcctttgcagccaaatgtcattgccagtgaagtcactgtaaaagcttaaaaaatggagtgtgtgaggttaaactctgcttacattcttgaatattattcctcagcatagacttcagcaagcaagtcagtagctcagcagcctgccatagcaggcggtttgaacctctgacatctggccgagctcaggtggttctctcgtggtgggacattgaaatggaccctgaggggaagatcaagtgcaccatggcccccttctgggcacactcagacccagaggagatgcaggtaagaggcaggagcctagcatgtgccctgtcaggaaacttgtccactgctgttcatgggaaagtaacagttgagccttggacccaggagaatttagagacaggagggctgtgtcagaatcaaagacaaaagtttttaaaaagcaagcaaaggctagctgtagtaacgtagccttcccagggtgagctcatggtgagcactcatggacacagtgaggaacagagaagttggctttcctctcccgcctcatcatgatgcagccacccttagataccacccctcatcccctgagtaatcccagggggctcccatcagcttggaatagagaactacagcctcaccttctgtggcctcaaaatctcctttctccaccccgatagaaagtaggcagaggacatgaaacacagaaaaggaaatacagatgatggggatagttgcccactgtccctcataataagagaaatgcagttttagctgctcacagcacctatgctcccagcctctcaggagactgaggcaggagggttgcttgaacccaggaagttgaggctgcagtgagtcgggactgcattactgcactcccgcctgggcaataagatgagaacctgtctctaaaaaaaaaaaaaaagagaaatgcaactttaaactgcaatgagatctcattttcacctactagtgaataaagtttaaacagtttgcaagcacactgttggggaagctcagggaaaaagcaggaaagcgagtcatcagaacgtttcaggtagaaagcaatgctgctttcagacatggggctgtggctggatttgcgtctgtgcagaatagatgtgtgcagccctggtttagtagaaaaaggccaacctaaaggccactagcagggatcaagtccattatcctttcagtgggtgaggtagctctctgtgcactgatgtgggacaagcttcagggtggattattacctgacacaaaaataaaggtgcagaatggtgtgttgtgtggcagcactggtgttagtaaaaataggaatatatgtgtttgtgagtggatagtcatgtgtggtgtacatataaggaggtctttggaagaattcccagaaattcgtaaaactgactgcatctgggaatggggactggaggttaggggtggaaaggaaacatattttttactatgcgtccttgtataccttttgaattttctctcatgtgcttgtgttatttacacccccatccaccctctctcactctcacactcaaaggaaaagaaagtgggaaaggtgtgtcggaattgcctgatgggttcttcccacccactgttcagacaaaaccaattcgctgacaccatggcattgcaataaagactttaattgacacgaagccagccacaccacgtgggggagagatttgttactcaaatcagtctccctgaaaattcacaggctacggttttttgtttgtttgttttgagatggagtttcgttcttgttggtcaggctggagtgcaatggcgcgatctcagctcactgcaacctctacctcccgggttcaagcaattctcctgcctcagccccctgagtagctgggattacgggcatgcgccaccatgcctggctaattttgtatttttagtagagatggggtttctccacgttggccaggctggtctcaaattcccgacctcaggtgacctgccccaccggcctcccaaagtgctgggattacaggcgtgagccgctatgcccggctcaggctagggtttttcaaggatagtttggcaggcgagggagtccacttctgggtggagtcatcagacagaaacgtaaaaacccgaaaagacatttcaaagggtcaatcttagtttctgcaaggtggtgttatctgcaggaggaatcagggaaggttgcagatcttgtgacctaacaatggcttcaccttagcagaattcagcctcctctcatcctcctaacctgatgatctttcattcagtttaagtttaattttggggaaggacggttatcatttaaagtattaaccagctgggtgtggtggctcacgcctgtaatcccaacactttgggagccccaggtgggtggatcatttgaggtcaggagttcgagaccagcctggccaacatggagaaaccccacttctactaaaaatacaaaaattacccggatgtggtggtgcgtgcctgtaattccagctactcgggaggctgaggcaggagaattgcttgaacccaggaggtggaaattgaagtgagctgaggtcacaccactgcactcaaacctgggtggcagagcgagactctgtctcaaaaaataataagaacaaaaaataaactgttaaccaaatgtctcccaaagttagcttggcccggacccaggaatgattaagggcagtttggacattaaagcaaaatgggggttggttagatgagatctctttcactgtcataattttctcactttttcgcaaaggcagttttggtttcaggaccaagaaatagaacctgtctctacccaggagcgcctcaggcaccatcctttgtccatggtccagcctgcctggccttaacccctggctttgtgttgaatgctcacctgctggttctaggtgtccacaacattatggaaggccttagcagcttcacctaccccattcccagagttactgtttaggccgaagggttgtgactgctggggaattgctgtcaatcagcgtacccataccgacagcagcatgtgagactaagaagtatgtgagcttcctagtctcccctccaccttccaggtgcctggccccgggtgtgtgtgtgtccagccagggcctgccagcatccctctgcaggctgtgtgtgtgtcactctgaattcacccacagagttgagattggcaccgcgtcacattcttcctaagactgtgttgcagaattagcataagaatagcattaaaatgttagtacttttggccggtggctcactcctataatcccagcacttgggaggccaaggcaggtggatcacctgaggtcaggagttcaagaccagcctggctaacatgttgaaaccctgtctctactaaaaatacaaagaaaattagccgggcatggtggcaggcgcctgtaatcccagctacagggctgaggcaggagaatcacttcaacctgggaggtggaggttgcagtaagctgagactgcaccattgccctccagcctgggcaacaagagcgaaactccgtctcaaaaaaaaaaaaagttagtacttttaatttgcatatcttcggagcgctactatgtattttttctccttgaatcctcttagtagacaaacaaggtaaccacaaccatagccaacccgggactcagcaggctccagggattggagcggggccttgtgtccaggagcagtagagtgggtcctgcccctggtctcttgactgtgggtcttgtgttgtttctctaccagcgttgacttttggattggaaatttgaaagctgctaatgaatctccctcatgaattcatgtaactgctttgatcctaagtatatttagtctgtcccaccttggcacagtgggttctgtcaccagctcctcaacgttaggacccaggaggtccctgtggtaggtagtatgggaaggacatgatgacagggcagtgccatgggagcctaggaggggtcgggaaagggttctcctgtcttcttcacatgcatttgcatagtgtgggaatgaataaaaggtttaaaagaacctgtgttattcctgttactatttatttttccagaacatatctggtcagattttcattttctagtttttatgttcaagtaagcgtcttaagcgtgtgggaatgtcattctcctgcctttttgttaaattaaagaccaggtgggtgggcacattccttacctgtgctcttggagtcccacagggccaagtttttcttagttcctgaaggtgacagaatgagcaggcagtcgtctcatcagagttgagccaggcatctcctgtttttgtttgttagagacagggtcttgctttattgctcaggttggattgtggtggcacctcttagctcactgcaactgtgaactcctgggcacaagcgatcctcccacctcagcctcctgagtagctgggactacaggcacttgccactatgcatggctaatcttgtgttttttgtagaaatgggtgtcactggtatgttacccaggctggtcccgtacacctggcctcaaacgatttgccagcctcggcctcccaaattgttgggattacaggcatgagccaccgtgtccagctggcatctactttttagggcagttcttcctttttcaaaaagaggcttaacaattatgagcgaaataaacctcattatataaaataaaaatatcactcatggtcctccctttcactcaaaatagctccctttgtttggtctctctccaaacgcgtgggtgtcatcggtgctcatctctgttccgggccccgtggccttcagcagcagcgtttaagatgtctgtccgtattctgcacgagggtttatatcccgttctgagtgctggccatttgggtgggttccagtttttgctggtataaataattctgtgatttgcatttttatgtgaatataacttttttttttcttttggggttttcttaggatagaaacctgtatgtggggtttgtagtaaggactagcacagcttattaaaaattgaccgtggatcattgtcaaccatgtttcacaatttagaatattcagttatttaaatacttcaatttaattcaaagaataagccaaaacctttttgtattttcccacctttttattttgaaaaattatatatccacagaataagtgaaaatgaacactgatggtcgctttattaatttaaatttaccagttgttaacgtttgccacatctgctttatctttgtctttctgcctcccttcctgcatctctacacacacacacacacacacacacgggcatgcacattttttttttttattgctaaatcatttgaaagtaagttgcagacatctgacactttacttttaaatacttcaacacttatctcccaagaatgaaaacagtctgcaacataaatgaaacacatgatcacacctaagaaaaacagtggttccatagtatcgtctaacatatggttcaaaataaaatttgtctccagaagtccttgatagcttttgtttcctcagtctacgatccagttaggtttagtgcattgagtctgactgttttgtaaattccgagtacgttaaagcctttggaatgcgtgccatggactgttctgaaaaggttccccttaaaccactaggtttaaaccaatttttttccttcaaaggaaacattcagcacagctctacgtgttgaagagagagctttggtgctactctgatggggtggggactggagcctgcacttgtcccctcccctgagccactctggcagattgctgctcttggccacattgtgtcttcctaaagccagcagggttcccgcaaacttttgggccactggcctctgagtttagagtttatttatctccttggccacaatagccagctgtagtctacattgtggacgtcctgaaaactggcagttctctggcatttggctcctggattagaagcattgctcatactgcagctcgttgacagctgactctgttctccgtttcagtggcgggaccactggatgcagtgtgtgtacttcctgccacaagaggagcctgtggtgcagggctcagcgctctatctggtagcccaccacgatgactactgcgtatggtacagcctgcagaggaccaggtacgtcgagcctcgtgggggtggaggatgagcctctgagacttgtatgtaaattccccatttacagatcctctggaggtgccagtgggttgatttgtgtctggacagaataacataagaacaaagatttgtgaccagtgtgtcagtgcccattcgtgtgtacccaggagaggctgtcatgggttgctggaatctgtttagagcagatgcgtaggaaaagtctggaattagcgggtgctctaagccctcatgcctactggagaccagtgtccagattcatgccctctggagacctgtggaggcgctcacagcccacgtctgtttgttcatctcctggcctagccctgaaaagaatgagagagtccgccagatgcgccccgtgtgtgactgccaggctcacctgctctggaaccggcctcggtttggagagatcaatgaccaggacagaactgatcgatacgtccaggctctgaggaccgtaagtgtccagccccttggcttgttgtggggaaaagggagaaagaagtttgtcccatgaaccccagcactttgcttatgatttgctgtttctttcctgtgtcctcttgtctatgagtggcttcagcgagcgcctcctgggtgggcactggagcagaaagcgggagagcctggggctggacttcctgagggcttgctctctgctctactgggagagcctctggctgggctcctgctggacacctttgccttgtcagacacagtcattgctgtgggtggtcacggtggattaggccaccccctcttttcatgtgttgtcacctttctaaaattttctaagatgtaaatctgatcatgtcgctctcctgcctgaaaacctttgctccctgctacctgtagcaggggactcggcttggggattacagatggggcttagagggagggtctcttgaggcccttgggggtgtgtacagaaataggtgtgaatgtgtgcattttgggggatggggggaggatccaagccatcctgagtttctctcagaggggtctgtcacccagaaaggcatccttgcctttgggcagtcaattgtgaacactcaagccttggaggctctcagctgtctgtgctctaaccagacagggaagaagcctgttgtcatggactggaaggtggcctgcaggtggtgcaggccttcagcggggcctctaggctgggttgaggggtgtctttcctgacactggggacaggtggggagatgtgagcaaggcgggcatgtttgtggctgggggtggttactgcatgaggacgcagggggatggtctgaggtctgggcaagtggagtgagaagggaagtatttctgacagcttgccagcaggaatcttctggcaaactggaggaagccctgtgctgagcttgcctgttccccgcaggtgctgaagccagacagcgtgtgcctgtgtgtcagcgatggcagcctgctctccgtgctggcccatcacctgggggtggagcaggtactgacatgcacccttgtcagcctcctgatgtgggcttgtgagttagagcattgcgtggtccgggtgcacaattctgtgatcaaggctctttgcaaaggccactgttgtgggcacagcatgctcgggtcaggggctggggggtttattgcctgtgcgtgcaggcaggcgtcaggcctcagagctggtgttcaggctgccccagggagggaatgagggcagggagggttgttcaggtgtgtcctctgtcttaggatggtcttgtcgcattttaatctttaatttcttctctgttaagtgaatatcttacaactaatagcgtggtgttccctctaggtgtttacagtcgagagttcagcagcttctcacaaactgttgagaaaagtaagtgagaattgttgttgctgaaatagtgagaggacctgtggggtctgggttgatggctttgaagtggcattggccccaggggaacaaaggagtggtggctcgcttgcacccctgtgttgtcttggttgctgcctggagagcagccagaggccttgggagctgtcactgaaatagaggcaggcatttgcactctgctttgtttttttgtgtctgaagaagtttaggcttttttcctcacttcacataagctactgttgcggtagaattaaatgtaggatgtgtttctgggacatcagtgctgagggagccagtgctcacagcctgatgggagatggcatttctctccctggccagtaactggtttgatttcctctccaaaggggaactcccttcaccagaactgcaggctcgcactgagtcctggtgtgcacatgcgggagaaatttcttttgcttttatcacattgtgctcctgatctcatccgtggtctataggatgccccccaaggagaggatttttccacaaagcagataaaagtggtgttccagaaccatttgccggaaaattcaaagcggagaatgcaactttgagagatttttttttcctgacaaacacaatactttagtatgaatacagtaattttacggttttctttctaagatcttcaaggctaaccacttggaagataaaattaacatcatagagaaacggccggaattattaacaaatgaggacctacagggcagaaaggtgagtagcgggagccttttggccacgctgggctgtgttagggtggtcagcacggcactgaagtagcccaggccccaccctgtccctggagtctcacagtgggtcctccacatgcaaccttacctcctacgagctcccaccatcaagggtgtggtgaagctttcatggagctgcccggtgagcagatggttgcactgctcttttttttttttttttttttttttttttgaaaatggggtctcgcgctgtcgtccaggctggagtgcagtggcacgatcttggcttactgcagcctcgaccttccagcctcaagcgatcctcccacctctcccgagtagctgggactgtaggcatgtgccattatgcctggctaatttttgtattttttgtagagtcagcgtttcatcatgtggcccaggctggtcttgaactcctgggctcatgcgatctgccagtctcagcctcccaaagtgtcggggttacaggcatgagccaccacacctggctgtactgctcttagctcagcctcatctctgctccttcaggtcaggacagagcagctctcttggggttcctaggagcagagcatgtcctttcctctccaccgcactcctgtcttcattccccgtccacggcttcctgctgcagtcaggcttccgggccctgaaactgcttctgccagcaacctcgtcgttactcccacggtctccctgcaggcttcatctgctctacccgcttgtccttgtgacccgggacttctgcctgtgctggggaggtcgctttcccctcaccttcctggctgctccttaccttgcactgctccgtggcactctccccgtgtcccccgcttcccctactgcatcctctctggtaatcacgttccttctcatgtgtgaatcagtgaccatcagagccggccttcactctttactattttggattcaaatctcatgtccagctgccatcctgtcacctttccttgaatatgccacaaactggactcacccaacgcggagctatcatctttcatctttcctgccagtctttttttaaataacagctttattgagatgtagttgacataccacaaaattaatgcatttcaattgtacagttgagtgatttttttaagtaaatatatggagttagccgtcacccagtctcatttagaacatttccaggcccgacatggtggcacatgtctgtaatcccagaacttcggaaggccaaggtgggaggatcgcttggacccaggagttcaagaccaatctgagtaacatagggagaccctgtctctataaaaacaaaaaaaattaaccgagtgtggtggcacgtgcctgtagtcccaggaggctgaggtgggtgaggtgggaggatcgcctgagcccaggagttggaggctgcagggagccgtgcttgtggcagagcactacagcatggctgacagagtgataccttgtctctaaaaaaaatgggaatgaaaagagaacatttctgttacctcccaaattcctgggagcctgttgatagtctgcatccccatgccccaggcctggcagccactggtctggtttgtgtctccagtatgtgcctcttctggcatatctcaaaagtgaggtacgcagtgtgtggtcttgtgagtctggctcctttcgctgagcataatgtctttgagattcacccatttcgttcttttgaaggctgtgtagcattccacggtgtggctatccattcatgtgcttatggacgtttggattgtgtccagtttttggccactttgaataaggcttctgtgaacatggattcactggtcttagagaggatgtatgtcctcagtctcttatgcagatgccttggtgtggattgctgggtcatgtggtagttacgatcgactttttaagaagctgctgaactgttggttgaagtggctgtccttttgacatccccatcggtaacatctgagggtccaggttctcggatcctcaccagcacctggcattggctttttttttttagcataaccatattaatgggagtgtggtgatgtctccacatagttttaatttgtatttgcccaatgactgatgatggtgaacatcatttcgtgtgcttgtcttgcttggtgaaatgtctattcaagccttttgcccatttaaaaaaataacagttttattgagatataattcacataccttacgattcactcagtgatttttgtatattcataaggttgtgtaaccatcaccacatcagtttaagaaccctttcattacccattggcagtcatgcaccatttgtccgcagtcccccagccctgggcacccactcttctcctttctgtctttagcttgcccattctgggcatcttgtgtgaatggaatcagacaagtgtgtggtctttcgtggctggcctctcatgtggcttcatgttttcgggctcatccatgtcgtagcctgaatcaatacctcatttctctttcttgctgaataagattccattgtgtggatagaccatgttatttatctgtttctcagctgatggacatttgggtggctcctacttttgggctgttgtgagtaatgctgctataaatattcatccacaagtcgccttttttctccctcatagatgagggcataggagatgattctgaaagccactgtgtggtgtaccggtagaccggggtcacattgaattggagtggtgggagcgggcgttcttgccatgttcctgatgctgtgtggggaggcgaggaagcactcagggcagccccttctgtctgccagcatttcctgctgcatctccatcatctctgactggccccactttggtgcctgactgcttgggcctgcccagggtcggctacctccttaccctctgccactccttccactcctcccacccctcccaccctgtagtctccgtttcttacccggactctttctgcactctcccaggtcgcctccgtccccagcacctgcaggttcccttccacacttcgtggtcctcagcagcatcttctaaatcacattccttctgattttgaaccctgatgaaaacttctagtgacatccaccacccccactgccgcctccgggatgagtccagcccctcaccctgtcctggctgccttgggctgggctggcttctgtccagctccacaccctcaccttggggggccttgctgtctcccggcctcactcttgcccctgctgcccctccctcggccgttcaggctcctcgctgtgcacgtgttcatttactcacaaatgttcacagaacatctggtcacggcactggcccactgctgggggatgctgggccaccagtccctgctcttgtggtgctcagagcctggggagggagacggagacaagccccggtaagtcctgagataaagcgtccagtgggggttgacaggatgccactctggaagccccgtctggcacgtttatttctgggctccctccatgacccccttccttgcttttttctatcacatggggtcagccccactttgtctgcttccctcttctgctctgctctcctgagcacgggactcatgtctggttgtaatctttacagcctccagggcaggtacagagcaccttgctgccttgcttgtttgttgactgagggagggagggactgatgagggagggagggaatgagtgagtgactgagtgagggagggagagggagggagtgagggagtgacttgagtgactgagtggcctgttgcttccgtgttcctgttaacactcctggaccgagccctactgacacctgggccctgcttctcgcccattcaccaggtctctctcctcctgggcgagccgttcttcactaccagcctgctgccgtggcacaacctctacttctggtacgtgcggaccgctgtggaccagcacctggggccaggtgccatggtgatgccccaggcagcctcgctgcacgctgtggttgtggagttcagggtaggccacccaggggatgttggagaaaaaagcagaggaggcgggtggggaaccttgttttcttgcaggaaccttgggtgcctgtagagcggctcaggccttgatgatttgagcttgtgttttctttctgtgtcagcacactgtggggttgaatagaagatgcttgccttttaaaaaatgcgataatttgacatacgaaatggaaatggctgagtgttgtcattttacaattgtggcttatcagaataatt

SEQ ID NO: 15753 - DNA, 34581 bp, Homo sapiens
ctctgagttagagtcggtaaaggaaaacaagccatacatattgcagcagagcggctttaacacaaggagctggctacccagctgtgggagggctagaaagcaaatgggaacgctgagtaacctaacagtagagattgcagggagcagttaccttgcctagggctgagaaactaaacgagaagattaggatttccagaagccacaagcattgaggagagatcctgtggaccactgtccaagtacggctgcagctctgaggggcccaaggagctggttatgggatcattgggaaaagttggagtctgcaatcaactgcccctaccgagaggaccctgatgagaacagcagcatgcagaaaggagcaagcctgctctgtcctcctaccttccagtcgccctcttggtcccccttttggctgtacctaacagttggaaaaaggagaacatggtttgcagggctctggcatcacttagtagaggatagaagagtgagtgtggagcagggacagtcgcttaataaagggcaaggggctgactcacaagacctgcccaactcagccagagctgttctgccaggggccagaaaggccatagggccctgacttgcactgccactgccagctgtgactctagaactttgcaaagcacctttccacttacttataataactggtagtaagtgacggccatgtcttccttagaatgtaaaatactaccaaggtatccgggctgccgtgagcagggtgaaggacagaggacagaaggccttggttctcgacattggcactggcacgggactcttgtcaatgatggcggtcacagcaggtgccgacttctgctatgccatcgaggtaagccattcccttcaggtgtgtgtcctgcatcttgcatgggaaatcccctatgctcttgcactttccccgtctgttccttcacaaacattcatggagtgctcactctgtgccaagcacagagccaggctctgagcgtatagagatgagtcagacacagttccttcctccaggagctaattttctcctctgtcagcctaggctgcacatcagaatcactaggagctttagaaaatacttacaggctgggcacagtggctcacgcctgtaatcccagcacttcgggagggtgaggcaagacaattgcttgagcccaggagtttgagaccagcctgggcaacatagtgagatcccatctctacagaaaaacttttaaatattagctgggcatggtggcatgtgcctgtgttccagctattcttgaggctgagatgggaagatctcttgagcccggaaagtcaaggctgcagtgagccatgatttggacttcatgtaagaaagcaaaaaattacttctaccttgtttaagccagttattgtgggactttgttgtttccaactaatcagtatatgaactcagttttgtaggggaaagtatttaaatacatgcccccacaccaccacactccagcctgggtgacagagtgagactttatctcaaaaaaatcaaaacgaaacaaaggctgggcacagtgtctcacccctgtaatcccagcactttgggaggccgaggcttggatcatgaggtcaggagttcaagaccagcctgaccaacatggtgaaactccatctttactaaaaatacaaaaattagccgggtgtggtgatgcgcgcctgtaatcccagctactcaggaggctgaggcgagagaatcgcttgaacccaggaggcagaggttacagtgagccgagattgcgccactgcactccagcctgggcgacagagtgagactccatctcaaaacaaaacaaaacaaaaaaaccttatgcctagtccccagccctaacagattttgatttaacttttctggggtgaggcctgagccttgggacttgggaatgtgcggcaaggttgagaaccactaccttaaatgtccctatggagtcagctctcttatgtttaccaatttgtcatttctttaataaaacattaaacagcttgagcccacagagcaagaaaaattaaaaaccaaacaaaattaaaaattaaacatgttatttttctcataaaacaaataatgcatattattataggaaatttggtaaataccaaataaaaatagtatgttgacccaaagttaagtactgttaacattttggtgtatattcttccaagttttgggggcaggcagggagcatgtatataaatactttccctacaaaattgggttcatgtagtgattgagttggaaataacaaagcctcaaaatcactgtggtttaaggtagagtagttttttgctatctttttcgtggcgtgatctctattcaccgcaacctccgcctcctgggttcaagcaattctcttttctcagcctcccaaatagctgggattacaggtatgtaccactgcacctggctaatttttatatttttagtagagatagggtttcgccatgttggccaggctggtcttgaattcctgatctcaggggatccccccacctcagcctcccaaagtgttgggattacaggtgtgaatcactgcgccctgccttgttcctcttttttaaaagtaagaataactttcccaggaatttctattatagcaaacctctccttgggtaccatcggctagaatgaggttaaatctcatttcttatctctggcaagagggattcagttactcttagctcagacaagtgcaccactgcaaaggtcagttccccacgctgcaccctcacctgatttcaggggagaggaggacacagaatggatgtcgggaggtcatcttcagtgtccactcctggtagtgttttgggtgagatcttgagcttcttgatgggctgaggagaaggaggtgtgaaggtaccagcttgcaggttcagggagaggtgactgatgagtcagaaggcagcaggggtgagggacgacactggctttggatattgtcagggtggaggcaaagtgattggtgagaactagggtttaaggccctcaaaccacatctaaaaacatcaaggcaaatcctagaaataatttgaaatagatgatgaagatttttctaggagaacatgtgtgtgtattccatgtaaatactgcgcgctaatcaattgcacaactggagctgctcacgtaagtactctttacgaaaggatacagcatttgtcccttgattatagtaaaaaatatagtattcatggtagaaaatgtgggaaatacagaaaaggatttagaaaaaaggaaaatcttatcaggaacagtctcggtatcattttgtggtttccacttcgtgtgtagggccacacgtgagtctgtttgttttacatgctagagctcttggggctgtggaatctagactggataagttgaaaacaaagagttggaggtgcttatttatgttcagggaaactcgaagagttcagggaagacttctggatgggggattcatgctgccctgggaagtggggtttgatttggcaggtggggccaggatagggaaggctcagtgatcatgagatcattgtggctggagtgttggttgttgggggaatgggggaggaagactgggaaggtaagggagggcctccaaagcagtagtttccccttatctatggtttcacttttcgtgatttcagttacctgtggtcaactgaggtccaaaaatactaaatggagccaggtgcggtggctcacgcctgtaatcccagcactttgggtggctgagacaggtggaaaccttgagtcccagagttggagaccagcctgggcaacatggcaaaaccccgcctctacaaaaagtagctgggcatggtgatctacgcctgtagtcccagctacttgggagattgaggtgggaaattgcttgagcctgggaggtggaagctgcagtgatcatgccactggactccagcctggacaatagagtgagacccttctcaaaaaaaaaaaaaagaaaaattaaatggaaaattccagaaattatttataagttgtaagttgtgtaccattctgagtattattacataattgttctatttttagttattgttaatttataaattattatttatatttattattgtgcctaatttataaattaaacctggtcataggtaagcttggaggctgaagcagctccactgtgaatgctaatcctccacgctgacttctgaccaaccccagcttcaggaatgcctctaaaatttccgctctcatgcactttgatgtaaatcctgccctcaggtcagaacaactttgatgttatcataaatacatacttaccgtaaatcctgcccttcgtcaaattccctgtggtatgtaagccctgcgtctgagccataacagtgtgggggcccagtttctcactgcccgagacaaggcttctgtttgtatgtctctataaagtgtgtctttctgagaagctggatttgccagtctttcctcagcctctcagctcccgtggcctgttggggtaggtttgcatagagctgcccaccatggaacagtatgtatgtatagcaaaaaaaaaaaaaaaaaaaaaatggtatacataagggtcagtactgtctgaggtttcaagcatccaccaagggtcttaaaatgtatcccccatggacaagaggcactgctgcaccataagaaaatagaggctgtgttctgccaacagtggggatttgggacaattttgagcccagaggatgacctacttactcacacctacagtctgctctcctctggagggcacagcacgcctcccaggttcgtgaggcaagtccctttcctggctttttggcgtcctcttgtgcggtactgacacctactgctcttactaagtagtgcagcctcctcaggatccccggcatccccgctgtgcctggcacggaatgagagtccctaatcacaagttaaagccagctgaatctcagccctttttcatgatgcacatttggagaataaagtatttaagttacatatcttaggaccagaatcaaggaatagcttgctcaccttaaaggtcagactactgtttaatttattgctcatttttccttgggtttcggctctattttctaggttttcaagcctatggctgatgctgctgtgaagattgtggagaaaaatggctttagtgataagattaaggttatcaacaagcattccaccgaggtgactgtaggtccaggtgagatttacacaccctgtgttgaaagctttgcttgctcttgtgtgagagaggaaaagggttattccagttacctggaacaaatccaggtcatagcatagaagtgggacctctctgtgtggagctctgacagtaaggacttggtttctcttgatgtttattttcctgctagttaaaactagtcaacaaggagtagactagagctagtcaggtccagcaatggagacgcaaacaaaacctacatttgctttaagcaaattggaattcttatggggctcaactcttgagtttcaactaccaataattacgccttggataaacctcattggctacgatactgccactgctcaaagctcaactctgagtttcatcaggcagaaagtacttagttcttttatttatttatttttttgagagagagtctcactctgtcgcccaggctggagtgcagtggcgctatcttgcctcactgcaagctctgcctcctgggttcacccatcctggctaacacggtgaaactctatctctactaaaaatacaaaaaattagccaggcatggtggtgggcacctgtagtcccagctactggagaggctgaggcaggagaatggcgagagtagttctgacattctgcttctgcatacaacatgaacaattttcctgtatagcattgtctcttaaggtttccagaatatgtatatgtacacacacacacacacacacacatattttttttttgagacggaatctcactgtgtcacccaggctgcattgcagtggtgcaatcttggctcactgcatcctccacctcctgggtacaagtgattctcctgcctcagcctcccaagtagcggtgattacaggtgcctgccaccacacctggctgctttttgtatttttagcagagacggggtttcaccatgttggccaggctggtcttgaacccctgacctcaggtgatccgcctgcctcagcctcccaaagtgctaggattataagcgtgagccaccatgcctggcctccagaatattttttatagtctagaactttgtttcagtctttgaaaatttcacatgccactgacacttagagaacatagttgaaagatttgcaaaggaaaaactgtggtgaagttatggataacaccatgggttttttctaattttttgtggagatagggtcttactatgttgcccaggctggactcaaactcttatgctaaagtgatcctcccatctcagcgacccaagtacctgggactacaggtgtgcactactgcacctggctttttcaccacggttttggagaatgcagtatcattctgaattgaagcttctacctaaggtcaacattattctcccatttaacaatttttttttaatggagaatctgaaacatgtacaaaagaagtgggtactatcttatttatttatttatttgagacagagtctcactctgttgcccaggctggagtgcaatggcaggatctcagctcactgcaacctctgcctcccatgttcaagcgattctcctgcttcagcctcatgagtagctgggattacaggcgtgcaccaccatgcctggctaatttttgtatttttagtggagacggggtttcaccgtgttggccaggctagtcccgaactcctgacctcaggtgaccagcctgcctcggcctccgaaagtgctgggattacaggtgtgagccaccgcgcccggcctatcttttttatttttaaaatatacaatagagtgctcaaatcattccatttacaatcaacgttattgaagtatgatttacattaaatgaatatccattttcattatggatatttgacaaatataaacacacttgtaaccaccatcaccataatgaagataatagaacatctccatcatgcccaaagagattcctcataaccctttctatcagtccccccatatcctggtcctaggcacccactcatagacttcattatagattagatttgcctgtctaggatttcaaggaagtggaatcaaagaagtgtggactcttctgtgtgtgtgctctcttttttatagcgtgatgctggtaagattcttccacactgttcatgtcttgggggtccgttcttttgtgttactgagcagcactctattagatagatgtaccataacttgtttatctctctacctgttgatggacagggatttcttggataggtctttagattcactgatcttttcttttgcagcatctaatatgctgttaagtatatttagtaaacttttcatttctctttctttgttgttcttttttttttttttttgagacaggatcttgacctgtcccccaggctggagtgcaggggtgtgagcatggcttattgcagctttgacctcctgggctcaagcagtcctcctgcttcagcctcctgtgtagctgggaccacaggctcatgccaccatgcctggctaacttaaaaaaaatttttttttgtagagatgggatctcagtttgttgcttaggctggtctcaaactcctgggctcaagcgattctcccacctcagcatcccaaagtcctaggattacaggcgtgggccgctgtgcctggcctcatttttgatattgtattttttaatctctgaaagttccacttgattctttttcataacttccatttttctcatgttcatagttttctataagcacatttattttagctttttgaacatccttatcttctgttcccaccatctttgttttttctgggtttgttctcttgactcatttttatccttattctgggtcacattttccttcttcacatgtctaaccatttttgtttggatgctgtggctatttggaattccccattgttgagtgctagacttcgttggttttgctttttaaactttggcatgcagttgggttacttgcagttcagattgatcctttcagggcttgtttaagctttctttggagtggggttagagtagctttaagtcaggccttctcaacagtagtgctgtgacgttttggcattctccaactatgtgacattttgataattctttgttgtggaccctgtcctttgcattgtaggatgtttagcagtgtccctggcctcttcccagtggatgtcagtagcactcccctcctcccaccattcttgccaactaaaaatgtctccagactgccacgtcttccttggtctcgagtgtgtaaaattgccacctgttgagaaccactgctctaaggctgtttagccagacagttactgtaacctttctggagtgtctgctgagagctctaggtgctcagcagggtttcccttgtctggctgatcagaacttgaatgtttcccaggcctctgagagctccggagattgttatcactcatgcaacctttgctcggcttcacagagtattaccctgtgtgtgtgtgaatgtattaacacagaccctagaggaaccctgtgcagcattctgaaggctttttttctgtgtaatttcctctctgattctctgcctggcaagttccagctgcttccacttccctgaactcgtttcctgtctgtttaactcagcaagactgccgtgctctgtgtcacctcttaccctatactgtggtctggaaagggtctcctggctgatagccagagcagggtaagggttacttggtttgtttcccttcttagggagcaaactgtgttgcctcttgctcaacatctgaaaacacttgtttcatatattttgcccagttttctagttgataacagccggagggtaagcctgatcccacttattccactatggccagagtggagattgattcatttatttatttttttttgagacagtctcactctgttgcctaggctggagtacagtgatgcgaacacagctcactgcagcctcgacttctgggctcaagtgatcctcctgcctcagcctcctgagtagctgggaccacaggcaggcgccaccatacccaactaatttttttgtttttttaaatttttattagaaactaagtcttgcggctgggtgcagtggcttatgcctgtaatcctagcactttgggaggccgaggctggcggatcacctgaggttgggagtagcaaccagcctgaccaacttggagaaacctgtctctactaaaaatacaaaattagtcaggtgtggtggtgcatgcctgtaatcccagctactgaggagattgaggcaggagaattgcttgaacctgggaggcaaaggttgcggtgagccgagattgcgctattgcacttcagcctgggcaacaagagcaaaattctggctcaaaaaaaaaaaaaaagaaaagaaaagaaactaggtctcgctttgtttcacaggctggtcttgaacgccaggcctcacacagtccttctgcctcagcctcccaaagtgctgggatcacagatgggagccactgtacctggcgagatcatttattcttgaaaatttatccattttgacggcagggagactgatctgcagggcagccttggccatgaagtatgctgactctgcctccaggcagcattgttcacacacacctcagcttaggccaggcccctcatatgatttcttattaaaaaaaaaaattttttttagatagagtggctctgtcgcccaggctggagtgcagtggcatgacctcggctcactgcaacctccacctcccggattcaagtgatccttccacgtcagcctcctaagtagctgatattacaggcatgcaccaccacctggctaatttttgtatttttagtagagatggggtttcactatgttggccaagctggtcttgaactcatgacctcaagcgatctgcctgccttggcctcccaaaatgctgggattacaggcatgaaccaccacgcctggccaatttcgtaatacttttcttcatagcgcttaccactgcaatcattaaatcattatgtagttatgtatttaatgtctgtatccccacccagctgaggcatcctgaggtcatgcactgcgtgggttgtattaactattccattccgttatttgctccgggcctgtcatgtaaaggagttaggtaatttttgtaaagtgagtagattgtcagttgtgcttcatccataatcccttgtaaatgtgactttgtttccgatcctcagcctgacaagtggcttcctcattgccaagttgggtggtctttcctctgcttttcctctctaaccactgccgctttggtacttctgccattccttccttcttgaaactctccctggaccttagtgacatctcttcatcttggttctcctgtgttgctttctttctgctccagatgtatactttccaaggttctgctctcagccctttttaaaagtggcatctgaagttgcctgttccccagagctgggttacatgctgaggcttgtggagagccaacccagggagcagcgtgtgttcatccgtccattttgttcatttggaaagggcttaggaagctcctggggtggctacctgcttcagactcccccaccccgtgcccttatacattagcagtcacactcaaaataccaggccctcaagaagtacttgttaaaatgcactggaccataaagcttgaattttttttttttaatttttattattttttgagacagtctcactgtatcacccaagatggagtatggtggggcaatttcagctcactacaacatctgcctcccgggttcaggcaattctcatgcctcagcctcctgagtagctgggactacaggcgcgtgctactacacccggctaatttttgtatttttagtagagacaaggtttcaccacattggccaggctggtatcgaactcctggcctcaagtgatcagcccagcttggcctctcaaagtgctggaattacaggtgtgagtcactgtgcctggctcttgatttttattttaatgaagcaatttggactataaagcattttaagttatataattggtttaaacattcaggagatagaattggcagagtgggtgatcagtgggttgtagggtgacagaaatcaataatttatctaatgtgtgttgactgttacggggcactagaccttgtgggtgctggggtacagtagtggacaggcagtcagcggtcctgctgtcctggaactagtaaatgatgcccagattcctggactatgtgactcattgattgattgaggcagaaaccctggagggaggagcaggcgtgttagctggggtgggtgggatgagttttggacagtgtattccagttggagtttgatgtgacatcagagaggatgggcagggcttctcgggagggtggtctctgtggcagaagacagaagtttcttcttaagctcctccacgtgatactgtcatggagcacaggtgagcttcataggaagtgtgcttttttttttttatcttcatcatcccgaccaccaccacatgagacagagcccattcacccgttttactgatgaggcaactgatggtcagaacggagggctcagggataggaagtgagatccaggccaggctccagcctcgagctcgaggttcacgctgtctctgttgtgctcttctatcagctgctctctttcttttttttttttttttgaaatggagtctcactctggcccagattagagtgcagtggcgtgatctcggctcactgcaacctctgcctcccaggtttaagtgattctcctgcctcagcctctcaagtagctgggattacaggcacccatcaccacgcctggctaatttttgtattcttagtagagacagggtttcaccacgttggccaggttggtttcaaacttctgacctcaggtgatctgcccatctcagcctcccaaagtgctgggattacaggcgggagccaccgcgcccggcccctgtcagctgctttcatgcttctcttttccttgtgtcatctgtgagacttgtgctctgtgtaggggaaatgagtgggctttgtcagattataattcatgaggcattaaaagtgtttacagttaattctccctgatgaatagccccttccaaagtctattttggctcttggctcattaaaaattataattgtagaagtagcagtacattactgaggtttagaaaacagttaacagaagatccctcccaaatcctactcttctctaaaatcctactgtcctaaaacaactgttatttaagagattgtttggtgacaaggcgctttcattaagggaatttgccatagtgatctggggattctaagtcatggatctcaattttggctgccagagcctaactcacagtagctggaagatcatcagagaaccttgttgtcttgctttggctttccctccctctccctgcaacctagaagtatttgacataccagcattctgtttttgcttttcaaataatttttctaatttagtggttaatagtttaattgttaatttatatctctctaattgctaatagggatgaaaaagttttcataagtttgatttctgttttgaattttctgtttatatttttacctggtttctttttgggtgtgtgttttttttgtttgtttgagacagagtctcactctgtcgcgcaggctggatcactctgtcgcgcaggctggagtacagtggcacaatttcggctcactgcaacctctgcctcccaggttcaagtgattctcatgcctcagcctcctgggtagctggggttacaggcgtgtgccatcacacctggctaatttttgtatttttagtagagatggggtttcgccatgatggccaggctggtcttgaactcctggcttcaagtgatcctcctgccttggcctcccaaagtgctaggattacaggcgtgagccaccatgcctggctaatttttgtattttttgtggaaatggggttttgtcatgtttcccaggctgatctcaaactcctgaactcaatccattgggtatttatagttttcttatcattttttgcagtctccctcccaatattaagcatacagaatagctgtaagagcagtacagtaaacacttatgatcccttaccctagatttatcaattagcgttttgtcatacatttacatatggattttttttttttcctgaaccattggcaagtcagttgcagacatcctgacacttctgaatacctcagcatgtatatgtgcttttagcgtgatggccccttaaccacttatctttcccatatttgctgtaaatatttttcctagtctgttgcttatgtccaactctgttttcttgtgtttttcagagggtgacatgccatgccgtgccaacatcctggtcacagagttgtttgacacagagctgatcggggagggggcgctgccctcctatgagcacgcacacaggcatctcgtggaggtagtagacggagggctccctcagacgtgtctgtggtctcagccagctcacatagcactcactcatgcaccgtgtcccacacagcccaagccctcagcacctctgatacacctgggacacccctccattcctgggggggctctggttctcctcacttaaaactttcatgtcccttgaatgccaaatcttaataggttagagttgaaaagcaagaaactatattcaaattcagttaagttcagcaaatattctcaggaaggcgatgcttgagctgtcagtcttgagaagtgatcaggtgttggcctggcagatggaatatttctggtagaggagagcagcacgtgctagacgtgagactgaatcggtgcggtggctccggagcctgctttggattttgtgctgtgtgggaggcaggagagatgggcttagcaactgaggctagagagctgggcaggggctagatggagtggggtttgggggccatgcccagagggtagctgtcattagaaggtggggtggcatcacaggagggtttgaagcagaggattgacagcagacttatgcaggcagatgtgtggagggcagttggggtatagggctggaggttgcgggtgggttaaaaggctgtggaatcgtccagacgctgtggtacagtgggcctcagctaaggctgtagacagaggcctgataggtggtcccaggagttggtggtcccttaggtgtagagatatcgatgctagggtttgggcacctggattggatggtggtgcttcctgttgacggggagtgcaggaagaggggtagccttgggaaggttgggaagtggtgagggcgattcttctggtttacacagagtttgagctctctaaaggtcagccaagcaaagaggcccagagatgcatggatttactcagtgaagagggcatggttgaggtcactgtggagagtgtggagggagacagtccggaccagggagtccccttgtgaggtggggcggaggaagcacagcctggggaaggcagcgggagtgagtccagttagagcagcatttgtctaccagagcaaggttgggagatgcttcgcagggaggccagttattctgctagccttttaccatgcccagagcaacccctacagcagagaatcatttggcccaagaggccagtggtgtcctggtggtgaaagccatgtgggtagcagctgtgagtgtgctcttgccgggtccctattgcctggtgcatggaggacgtggagtggatgcaagaggtaggaggagagccggacaaggagccggagccggagccacagccctaggggctgagtgtgcagcagtgcccagcggcgctagagggctgggcagctgagggggcaccgtggtccacagggctttgccacaaggaggctcttgttttggtgctgggcaggagcggcactgaagggacactgagcccagagccaggatcaccacccagcagcaggacgtgaagcatttaagagtgccaggtagccaggaacttagctgacagaagtcattttaggcacagtgtgtgttctttttgaaatgtagtaccctttttttcccttttccaagggcatagggctgaaaacagttcactattctaatagtataaggtgttgggcattactgaaccaacctaatgttaaggaataaacctcttttgatcaatgggaattactgtgggtctaagcatctgatttttgtttggttttgtttttaatataaacttaggaaaattgtgaggccgtgccccacagagccaccgtctatgcacagctggtggagtccgggaggatgtggtcgtggaacaagctatttcccatccacgtgcagaccagcctcggagagcaggtcatcgtccctcccgttgacgtggagagctgccctggcgcaccctctgtctgtgacattcagctgaaccaggtgtcaccagccgactttacagtcctcagcgatgtgctgcccatgttcaggtaccaaggagccaccataggtgatggcgctttgagacatttgatggaagttgggtattaggaggttctttttgagtgggaaggaaatctagctgctgtcacctgcctcgaaggcaagagtcctttgcagccaaatgtcattgccagtgaagtcactgtaaaagcttaaaaaatggagtgtgtgaggttaaactctgcttacattcttgaatattattcctcagcatagacttcagcaagcaagtcagtagctcagcagcctgccatagcaggcggtttgaacctctgacatctggccgagctcaggtggttctctcgtggtgggacattgaaatggaccctgaggggaagatcaagtgcaccatggcccccttctgggcacactcagacccagaggagatgcaggtaagaggcaggagcctagcatgtgccctgtcaggaaacttgtccactgctgttcatgggaaagtaacagttgagccttggacccaggagaatttagagacaggagggctgtgtcagaatcaaagacaaaagtttttaaaaagcaagcaaaggctagctgtagtaacgtagccttcccagggtgagctcatggtgagcactcatggacacagtgaggaacagagaagttggctttcctctcccgcctcatcatgatgcagccacccttagataccacccctcatcccctgagtaatcccagggggctcccatcagcttggaatagagaactacagcctcaccttctgtggcctcaaaatctcctttctccaccccgatagaaagtaggcagaggacatgaaacacagaaaaggaaatacagatgatggggatagttgcccactgtccctcataataagagaaatgcagttttagctgctcacagcacctatgctcccagcctctcaggagactgaggcaggagggttgcttgaacccaggaagttgaggctgcagtgagtcgggactgcattactgcactcccgcctgggcaataagatgagaacctgtctctaaaaaaaaaaaaaaagagaaatgcaactttaaactgcaatgagatctcattttcacctactagtgaataaagtttaaacagtttgcaagcacactgttggggaagctcagggaaaaagcaggaaagcgagtcatcagaacgtttcaggtagaaagcaatgctgctttcagacatggggctgtggctggatttgcgtctgtgcagaatagatgtgtgcagccctggtttagtagaaaaaggccaacctaaaggccactagcagggatcaagtccattatcctttcagtgggtgaggtagctctctgtgcactgatgtgggacaagcttcagggtggattattacctgacacaaaaataaaggtgcagaatggtgtgttgtgtggcagcactggtgttagtaaaaataggaatatatgtgtttgtgagtggatagtcatgtgtggtgtacatataaggaggtctttggaagaattcccagaaattcgtaaaactgactgcatctgggaatggggactggaggttaggggtggaaaggaaacatattttttactatgcgtccttgtataccttttgaattttctctcatgtgcttgtgttatttacacccccatccaccctctctcactctcacactcaaaggaaaagaaagtgggaaaggtgtgtcggaattgcctgatgggttcttcccacccactgttcagacaaaaccaattcgctgacaccatggcattgcaataaagactttaattgacacgaagccagccacaccacgtgggggagagatttgttactcaaatcagtctccctgaaaattcacaggctacggttttttgtttgtttgttttgagatggagtttcgttcttgttggtcaggctggagtgcaatggcgcgatctcagctcactgcaacctctacctcccgggttcaagcaattctcctgcctcagccccctgagtagctgggattacgggcatgcgccaccatgcctggctaattttgtatttttagtagagatggggtttctccacgttggccaggctggtctcaaattcccgacctcaggtgacctgccccaccggcctcccaaagtgctgggattacaggcgtgagccgctatgcccggctcaggctagggtttttcaaggatagtttggcaggcgagggagtccacttctgggtggagtcatcagacagaaacgtaaaaacccgaaaagacatttcaaagggtcaatcttagtttctgcaaggtggtgttatctgcaggaggaatcagggaaggttgcagatcttgtgacctaacaatggcttcaccttagcagaattcagcctcctctcatcctcctaacctgatgatctttcattcagtttaagtttaattttggggaaggacggttatcatttaaagtattaaccagctgggtgtggtggctcacgcctgtaatcccaacactttgggagccccaggtgggtggatcatttgaggtcaggagttcgagaccagcctggccaacatggagaaaccccacttctactaaaaatacaaaaattacccggatgtggtggtgcgtgcctgtaattccagctactcgggaggctgaggcaggagaattgcttgaacccaggaggtggaaattgaagtgagctgaggtcacaccactgcactcaaacctgggtggcagagcgagactctgtctcaaaaaataataagaacaaaaaataaactgttaaccaaatgtctcccaaagttagcttggcccggacccaggaatgattaagggcagtttggacattaaagcaaaatgggggttggttagatgagatctctttcactgtcataattttctcactttttcgcaaaggcagttttggtttcaggaccaagaaatagaacctgtctctacccaggagcgcctcaggcaccatcctttgtccatggtccagcctgcctggccttaacccctggctttgtgttgaatgctcacctgctggttctaggtgtccacaacattatggaaggccttagcagcttcacctaccccattcccagagttactgtttaggccgaagggttgtgactgctggggaattgctgtcaatcagcgtacccataccgacagcagcatgtgagactaagaagtatgtgagcttcctagtctcccctccaccttccaggtgcctggccccgggtgtgtgtgtgtccagccagggcctgccagcatccctctgcaggctgtgtgtgtgtcactctgaattcacccacagagttgagattggcaccgcgtcacattcttcctaagactgtgttgcagaattagcataagaatagcattaaaatgttagtacttttggccggtggctcactcctataatcccagcacttgggaggccaaggcaggtggatcacctgaggtcaggagttcaagaccagcctggctaacatgttgaaaccctgtctctactaaaaatacaaagaaaattagccgggcatggtggcaggcgcctgtaatcccagctacagggctgaggcaggagaatcacttcaacctgggaggtggaggttgcagtaagctgagactgcaccattgccctccagcctgggcaacaagagcgaaactccgtctcaaaaaaaaaaaaagttagtacttttaatttgcatatcttcggagcgctactatgtattttttctccttgaatcctcttagtagacaaacaaggtaaccacaaccatagccaacccgggactcagcaggctccagggattggagcggggccttgtgtccaggagcagtagagtgggtcctgcccctggtctcttgactgtgggtcttgtgttgtttctctaccagcgttgacttttggattggaaatttgaaagctgctaatgaatctccctcatgaattcatgtaactgctttgatcctaagtatatttagtctgtcccaccttggcacagtgggttctgtcaccagctcctcaacgttaggacccaggaggtccctgtggtaggtagtatgggaaggacatgatgacagggcagtgccatgggagcctaggaggggtcgggaaagggttctcctgtcttcttcacatgcatttgcatagtgtgggaatgaataaaaggtttaaaagaacctgtgttattcctgttactatttatttttccagaacatatctggtcagattttcattttctagtttttatgttcaagtaagcgtcttaagcgtgtgggaatgtcattctcctgcctttttgttaaattaaagaccaggtgggtgggcacattccttacctgtgctcttggagtcccacagggccaagtttttcttagttcctgaaggtgacagaatgagcaggcagtcgtctcatcagagttgagccaggcatctcctgtttttgtttgttagagacagggtcttgctttattgctcaggttggattgtggtggcacctcttagctcactgcaactgtgaactcctgggcacaagcgatcctcccacctcagcctcctgagtagctgggactacaggcacttgccactatgcatggctaatcttgtgttttttgtagaaatgggtgtcactggtatgttacccaggctggtcccgtacacctggcctcaaacgatttgccagcctcggcctcccaaattgttgggattacaggcatgagccaccgtgtccagctggcatctactttttagggcagttcttcctttttcaaaaagaggcttaacaattatgagcgaaataaacctcattatataaaataaaaatatcactcatggtcctccctttcactcaaaatagctccctttgtttggtctctctccaaacgcgtgggtgtcatcggtgctcatctctgttccgggccccgtggccttcagcagcagcgtttaagatgtctgtccgtattctgcacgagggtttatatcccgttctgagtgctggccatttgggtgggttccagtttttgctggtataaataattctgtgatttgcatttttatgtgaatataacttttttttttcttttggggttttcttaggatagaaacctgtatgtggggtttgtagtaaggactagcacagcttattaaaaattgaccgtggatcattgtcaaccatgtttcacaatttagaatattcagttatttaaatacttcaatttaattcaaagaataagccaaaacctttttgtattttcccacctttttattttgaaaaattatatatccacagaataagtgaaaatgaacactgatggtcgctttattaatttaaatttaccagttgttaacgtttgccacatctgctttatctttgtctttctgcctcccttcctgcatctctacacacacacacacacacacacacgggcatgcacattttttttttttattgctaaatcatttgaaagtaagttgcagacatctgacactttacttttaaatacttcaacacttatctcccaagaatgaaaacagtctgcaacataaatgaaacacatgatcacacctaagaaaaacagtggttccatagtatcgtctaacatatggttcaaaataaaatttgtctccagaagtccttgatagcttttgtttcctcagtctacgatccagttaggtttagtgcattgagtctgactgttttgtaaattccgagtacgttaaagcctttggaatgcgtgccatggactgttctgaaaaggttccccttaaaccactaggtttaaaccaatttttttccttcaaaggaaacattcagcacagctctacgtgttgaagagagagctttggtgctactctgatggggtggggactggagcctgcacttgtcccctcccctgagccactctggcagattgctgctcttggccacattgtgtcttcctaaagccagcagggttcccgcaaacttttgggccactggcctctgagtttagagtttatttatctccttggccacaatagccagctgtagtctacattgtggacgtcctgaaaactggcagttctctggcatttggctcctggattagaagcattgctcatactgcagctcgttgacagctgactctgttctccgtttcagtggcgggaccactggatgcagtgtgtgtacttcctgccacaagaggagcctgtggtgcagggctcagcgctctatctggtagcccaccacgatgactactgcgtatggtacagcctgcagaggaccaggtacgtcgagcctcgtgggggtggaggatgagcctctgagacttgtatgtaaattccccatttacagatcctctggaggtgccagtgggttgatttgtgtctggacagaataacataagaacaaagatttgtgaccagtgtgtcagtgcccattcgtgtgtacccaggagaggctgtcatgggttgctggaatctgtttagagcagatgcgtaggaaaagtctggaattagcgggtgctctaagccctcatgcctactggagaccagtgtccagattcatgccctctggagacctgtggaggcgctcacagcccacgtctgtttgttcatctcctggcctagccctgaaaagaatgagagagtccgccagatgcgccccgtgtgtgactgccaggctcacctgctctggaaccggcctcggtttggagagatcaatgaccaggacagaactgatcgatacgtccaggctctgaggaccgtaagtgtccagccccttggcttgttgtggggaaaagggagaaagaagtttgtcccatgaaccccagcactttgcttatgatttgctgtttctttcctgtgtcctcttgtctatgagtggcttcagcgagcgcctcctgggtgggcactggagcagaaagcgggagagcctggggctggacttcctgagggcttgctctctgctctactgggagagcctctggctgggctcctgctggacacctttgccttgtcagacacagtcattgctgtgggtggtcacggtggattaggccaccccctcttttcatgtgttgtcacctttctaaaattttctaagatgtaaatctgatcatgtcgctctcctgcctgaaaacctttgctccctgctacctgtagcaggggactcggcttggggattacagatggggcttagagggagggtctcttgaggcccttgggggtgtgtacagaaataggtgtgaatgtgtgcattttgggggatggggggaggatccaagccatcctgagtttctctcagaggggtctgtcacccagaaaggcatccttgcctttgggcagtcaattgtgaacactcaagccttggaggctctcagctgtctgtgctctaaccagacagggaagaagcctgttgtcatggactggaaggtggcctgcaggtggtgcaggccttcagcggggcctctaggctgggttgaggggtgtctttcctgacactggggacaggtggggagatgtgagcaaggcgggcatgtttgtggctgggggtggttactgcatgaggacgcagggggatggtctgaggtctgggcaagtggagtgagaagggaagtatttctgacagcttgccagcaggaatcttctggcaaactggaggaagccctgtgctgagcttgcctgttccccgcaggtgctgaagccagacagcgtgtgcctgtgtgtcagcgatggcagcctgctctccgtgctggcccatcacctgggggtggagcaggtactgacatgcacccttgtcagcctcctgatgtgggcttgtgagttagagcattgcgtggtccgggtgcacaattctgtgatcaaggctctttgcaaaggccactgttgtgggcacagcatgctcgggtcaggggctggggggtttattgcctgtgcgtgcaggcaggcgtcaggcctcagagctggtgttcaggctgccccagggagggaatgagggcagggagggttgttcaggtgtgtcctctgtcttaggatggtcttgtcgcattttaatctttaatttcttctctgttaagtgaatatcttacaactaatagcgtggtgttccctctaggtgtttacagtcgagagttcagcagcttctcacaaactgttgagaaaagtaagtgagaattgttgttgctgaaatagtgagaggacctgtggggtctgggttgatggctttgaagtggcattggccccaggggaacaaaggagtggtggctcgcttgcacccctgtgttgtcttggttgctgcctggagagcagccagaggccttgggagctgtcactgaaatagaggcaggcatttgcactctgctttgtttttttgtgtctgaagaagtttaggcttttttcctcacttcacataagctactgttgcggtagaattaaatgtaggatgtgtttctgggacatcagtgctgagggagccagtgctcacagcctgatgggagatggcatttctctccctggccagtaactggtttgatttcctctccaaaggggaactcccttcaccagaactgcaggctcgcactgagtcctggtgtgcacatgcgggagaaatttcttttgcttttatcacattgtgctcctgatctcatccgtggtctataggatgccccccaaggagaggatttttccacaaagcagataaaagtggtgttccagaaccatttgccggaaaattcaaagcggagaatgcaactttgagagatttttttttcctgacaaacacaatactttagtatgaatacagtaattttacggttttctttctaagatcttcaaggctaaccacttggaagataaaattaacatcatagagaaacggccggaattattaacaaatgaggacctacagggcagaaaggtgagtagcgggagccttttggccacgctgggctgtgttagggtggtcagcacggcactgaagtagcccaggccccaccctgtccctggagtctcacagtgggtcctccacatgcaaccttacctcctacgagctcccaccatcaagggtgtggtgaagctttcatggagctgcccggtgagcagatggttgcactgctcttttttttttttttttttttttttttttgaaaatggggtctcgcgctgtcgtccaggctggagtgcagtggcacgatcttggcttactgcagcctcgaccttccagcctcaagcgatcctcccacctctcccgagtagctgggactgtaggcatgtgccattatgcctggctaatttttgtattttttgtagagtcagcgtttcatcatgtggcccaggctggtcttgaactcctgggctcatgcgatctgccagtctcagcctcccaaagtgtcggggttacaggcatgagccaccacacctggctgtactgctcttagctcagcctcatctctgctccttcaggtcaggacagagcagctctcttggggttcctaggagcagagcatgtcctttcctctccaccgcactcctgtcttcattccccgtccacggcttcctgctgcagtcaggcttccgggccctgaaactgcttctgccagcaacctcgtcgttactcccacggtctccctgcaggcttcatctgctctacccgcttgtccttgtgacccgggacttctgcctgtgctggggaggtcgctttcccctcaccttcctggctgctccttaccttgcactgctccgtggcactctccccgtgtcccccgcttcccctactgcatcctctctggtaatcacgttccttctcatgtgtgaatcagtgaccatcagagccggccttcactctttactattttggattcaaatctcatgtccagctgccatcctgtcacctttccttgaatatgccacaaactggactcacccaacgcggagctatcatctttcatctttcctgccagtctttttttaaataacagctttattgagatgtagttgacataccacaaaattaatgcatttcaattgtacagttgagtgatttttttaagtaaatatatggagttagccgtcacccagtctcatttagaacatttccaggcccgacatggtggcacatgtctgtaatcccagaacttcggaaggccaaggtgggaggatcgcttggacccaggagttcaagaccaatctgagtaacatagggagaccctgtctctataaaaacaaaaaaaattaaccgagtgtggtggcacgtgcctgtagtcccaggaggctgaggtgggtgaggtgggaggatcgcctgagcccaggagttggaggctgcagggagccgtgcttgtggcagagcactacagcatggctgacagagtgataccttgtctctaaaaaaaatgggaatgaaaagagaacatttctgttacctcccaaattcctgggagcctgttgatagtctgcatccccatgccccaggcctggcagccactggtctggtttgtgtctccagtatgtgcctcttctggcatatctcaaaagtgaggtacgcagtgtgtggtcttgtgagtctggctcctttcgctgagcataatgtctttgagattcacccatttcgttcttttgaaggctgtgtagcattccacggtgtggctatccattcatgtgcttatggacgtttggattgtgtccagtttttggccactttgaataaggcttctgtgaacatggattcactggtcttagagaggatgtatgtcctcagtctcttatgcagatgccttggtgtggattgctgggtcatgtggtagttacgatcgactttttaagaagctgctgaactgttggttgaagtggctgtccttttgacatccccatcggtaacatctgagggtccaggttctcggatcctcaccagcacctggcattggctttttttttttagcataaccatattaatgggagtgtggtgatgtctccacatagttttaatttgtatttgcccaatgactgatgatggtgaacatcatttcgtgtgcttgtcttgcttggtgaaatgtctattcaagccttttgcccatttaaaaaaataacagttttattgagatataattcacataccttacgattcactcagtgatttttgtatattcataaggttgtgtaaccatcaccacatcagtttaagaaccctttcattacccattggcagtcatgcaccatttgtccgcagtcccccagccctgggcacccactcttctcctttctgtctttagcttgcccattctgggcatcttgtgtgaatggaatcagacaagtgtgtggtctttcgtggctggcctctcatgtggcttcatgttttcgggctcatccatgtcgtagcctgaatcaatacctcatttctctttcttgctgaataagattccattgtgtggatagaccatgttatttatctgtttctcagctgatggacatttgggtggctcctacttttgggctgttgtgagtaatgctgctataaatattcatccacaagtcgccttttttctccctcatagatgagggcataggagatgattctgaaagccactgtgtggtgtaccggtagaccggggtcacattgaattggagtggtgggagcgggcgttcttgccatgttcctgatgctgtgtggggaggcgaggaagcactcagggcagccccttctgtctgccagcatttcctgctgcatctccatcatctctgactggccccactttggtgcctgactgcttgggcctgcccagggtcggctacctccttaccctctgccactccttccactcctcccacccctcccaccctgtagtctccgtttcttacccggactctttctgcactctcccaggtcgcctccgtccccagcacctgcaggttcccttccacacttcgtggtcctcagcagcatcttctaaatcacattccttctgattttgaaccctgatgaaaacttctagtgacatccaccacccccactgccgcctccgggatgagtccagcccctcaccctgtcctggctgccttgggctgggctggcttctgtccagctccacaccctcaccttggggggccttgctgtctcccggcctcactcttgcccctgctgcccctccctcggccgttcaggctcctcgctgtgcacgtgttcatttactcacaaatgttcacagaacatctggtcacggcactggcccactgctgggggatgctgggccaccagtccctgctcttgtggtgctcagagcctggggagggagacggagacaagccccggtaagtcctgagataaagcgtccagtgggggttgacaggatgccactctggaagccccgtctggcacgtttatttctgggctccctccatgacccccttccttgcttttttctatcacatggggtcagccccactttgtctgcttccctcttctgctctgctctcctgagcacgggactcatgtctggttgtaatctttacagcctccagggcaggtacagagcaccttgctgccttgcttgtttgttgactgagggagggagggactgatgagggagggagggaatgagtgagtgactgagtgagggagggagagggagggagtgagggagtgacttgagtgactgagtggcctgttgcttccgtgttcctgttaacactcctggaccgagccctactgacacctgggccctgcttctcgcccattcaccaggtctctctcctcctgggcgagccgttcttcactaccagcctgctgccgtggcacaacctctacttctggtacgtgcggaccgctgtggaccagcacctggggccaggtgccatggtgatgccccaggcagcctcgctgcacgctgtggttgtggagttcagggtaggccacccaggggatgttggagaaaaaagcagaggaggcgggtggggaaccttgttttcttgcaggaaccttgggtgcctgtagagcggctcaggccttgatgatttgagcttgtgttttctttctgtgtcagcacactgtggggttgaatagaagatgcttgccttttaaaaaatgcgataatttgacatacgaaatggaaatggctgagtgttgtcattttacaattgtggcttatcagaataatttaaaaatataaattaagcgtttcagaagccatgccgtgtggcctgctctgctctcattaatagccgaggcttcgattgttaaaggcattttgagatgggagagtcagctgctttgtgcaagaaaaaatggaaaagcttccttttaattttctcatcaaagcagaaccatagtcacaaagtcattttgggaagggcatttttattaaaaggatttgaaaagctttaccctggatggagagtgtatctcatttgatgagagtggttttctctcctagcttagtggctccatcactgaaagtctgggcatttctcctgtgttacttgtttacctaatcagatttccacatgaattctggttttcatggccaaagaggggatgtcacgatccatgcgtgcgtgtgaccaggaggaagggagggaaggctgtgtggcctgagtgtcctctgggttcctcttggcagggcctttttctctccccagcatcctcatgaactggagatgatgctggggagagaattggcttacagatttcttcccaaagaaatgatgttcaggatggcccggataggagtgtgcagcccccagcctaggagctctggccgactgtcccttataggagaggactcaggtgtcacgtcagagcttgcaggttcccgcccagcccagtctgttacagaaaccgttgtggatctttgttctctctgagccccttcatacttgggggtctctttcaggtgtgcagggaacagcaagatgtgcctcttgttcttgctgccacgcttccctgtgtcctggcgggcgggtgtggacggggctgctccttcctcacaggacctgtggcggatccggagcccctgtggtgactgcgaaggcttcgacgtgcacatcatggacgacatgattaaggtaggcagggccacactctgcatagtacccccgacctgctcctgtatcgcaggcctctcacagggtcccagcttgggcagcacaggctcttctgttgggggcagtgaggtcaggtgctgccattttgtgtggttcaacatgagcattgcttggtaccagccctgttcttggctccgtgctgtcaccctgtgtcagaatctccactgggcctgcacgtcctgtcattgcaactgcccctgccagtgcccacagcttcttttctagtggggctgactttccagaggccatctgggaaccttcttaggcagccatttccatggtgggggctccattcccgggaggggtacctgaggagattcccacaggttatttacatggtaggggttagcaactgggcctacgttctccagaaccatgggctgtcctgacagcgccagtggtccttggattcatgaggactgaagctgagagtcgtgttccatccacatgagaggggcagggtgaggagcatgggccgtgctgtgtattaaggaaatgcacgtggctcctgcttgtcatcccagcactctgggaacctgaggctggtggattgcttgagcccagacgtttgagaccagcttgggcaatatagcaagaccctgtctcgacaaaaaataacaaaaaattagccaggcatggtagtgcacacctgtattcccagctactcaggaggctgaggtgggaggatggctttagcctgggaggtcgaggctgcagtgagctgcgtttgtgccactgcctccaggctgggtgacagagcaagaccttgtctcaaaaaaagaaatctcatggacaccagaggagcgggaagcagcggtggccccgcagcagcagctatgcatcgggaggtggggcttttctgcttctgctcacctttctgctctcattttcccatagtgaacatggattgcctgtgtgtgaacacttttttaagtaaattaaaccttgtggatattttcagtttgtatcttatctgcccctcacagcagaccattgactgttcgatgcttttagaaatctccttcgtgctgagccctgcgtgctctggacccatgcgctctacgcctcctctgggcccctgctcatggcctgcccaccctggctgtccctgtcccctcttgctgatacggttctgctactctggtcctgggccagtgtctgtctctcgtgtgctaaggcagatggccgagagtggtgggtatcccacagtggggtgccaggcatttttacttctatgctttccaaatccacctgcccttccccacccttagcctggcccttccagtgccctgtcttagacctggcgccacttcacacgaccagccaggcccagggccccgggcatcctccctggcaagtcctcccatcccctgccattggtcttcgtgctcctggtgagcctccgacccaggctgtcccctgactgctgccgtcctggtttgagcccctcctgctctggccgtcctccacacggagcccacatgaacttgtagatctgagtctggccacatccccactgcaggaatgccctagctggctccccacaccacacctgcagagtggcccggctggcctgggtgccctggcctgctctcctgacttagctctatcctcaaggccccctctggcccttctcctgccggctcccatttgaccgtcacctcccctcctccaggtagctttctgcatccctcctggatgcaggtgcccccagcctgccgccaggcaccggggctgtactgtcacgcatttatccctccctgtggcccggggcccacctgtcggggccacacagctgtggtggtcaccaagtttctaggtgctgggtgttctcaccagtgatgtagatatgtggtcctcagaaggcttgagacaggcagcaccaccccatcttaaaaatccggagagcgaggctcagagccagcggtgcctggggagccactgatgagagagaagtggcagagagggggcgccgctggtctgctgggcgctcggcatctttatgggagaacgcacaccccttgtgactgcagtcagtgggagccaagccggggagcggtacctctgtctagctgccggcctgtctctgcagcccccaggcccccttctgttcgcagcgtgccctggacttcagggagagcagggaagctgagccccacccgctgtgggagtacccatgccgcagcctctccgagccctggcagatcctgacctttgacttccagcagccggtgcccctgcagcccctgtgtgccgagggcaccgtggagctcagaaggtgggtgcagagagggctggggggcagggaggggctgctgcttgcccttggagttctcacccccgtggtgagcacagctggcctgggagacgctgacacgtggagggggtattcgtcctccccacaaccttgcccttccctgtcagagtggccctgcgcgtgtggtggttcccacggtcctgtgtgtgccactggtggaggagccaggaagggctctgctccccctctacagctgaggctcccttgttggatcacagctcaggaagatgggagcttacttcctgtggtcaccgatgcaccattttcctgaaccctcctgggagctgaagcaggtcagggtcagcaagtgctgcttgcgtccagggacgggcagccctgtcctgctccggccctcaccccaccctcgcccgaggagtgacttctcctggaagcacctcccaactcggggcaggcagccaggcagggcgggcgccatcacctgagctcccagggttgctgtctggggcatcagaggggccttccggccttcagtgccaggctgtgcctcaagctcccccagaccctgcagccacaccggccctgccccatgtgtggcccggctgcagggctcgggttggctcaggtgggggcttggctgcggctcttctggctggggtttttctgaggaacgtttatgtaactgcagcactaggaactcccggcagggcaggaaggaagtggggaagaccacaggtttctggaaagccgcaggagctgcagctgttcccccgctgcctcttgtgtgactacttctgctgggcccccctctccttgacaggcccgggcagagccacgcagcggtgctatggatggagtaccacctgaccccggagtgcacgctcagcactggcctcctggagcctgcagaccccgaggtagtgcctgcgcaccgggcccagtgtgcgtgcagaccctgagagcaggcgccgcctggggaggcctccctgcccccatgctctgggtgtttctgtcacaagttcttcgggccagatgatgacccctcagtggtcctgggccatctggcccctgagcagcttctctctgctgcgagctgcctgggctggaggctggctaggaaggaggctcaggtgccagggagccctcaccatcttcctgctcttcttcctacaggggggctgctgctggaacccccactgcaagcaggccgtctacttcttcagccctgccccagatcccagagcactgctgggtggcccacggactgtcagctatgcagtggagtttcaccccgacacaggcgacatcatcatggagttcaggcatgcagataccccagactgaccactcttgagcaataaagtggcctgagggctggggttctgagtggctcatggctttctagcggggaaggctgaaggccctcctctcctctctgggagctgctcggcctcagggatgggaaagactgcgccgtgttgcatcttgttgcatctttgcactgctggcctctggctccagctgtggcaggaagcatgagagggtgactgaatttggagccctggaggggctgggaagacccccctgcttgtgcttctgaggtgctgagaatgctccaacacagagacatctctccccagctgggaagggagtggaagcacagggagcttgtggggctggccggtggggttgtccacgccgcccttggcgagcagtccccgtggcgggagcctgtcctgtctgtctcactctcgaggatctccgggtccctgctcttctggcttctgctaggagggtggagatgctgagttgtggctgggtctctggggcttgaagaccctggctgggcccgggctgagaggcctgggttctggccctttcacctgacaggtaacttcaagccacatccataggtgtctggcctcagtgctgcaccagctggtggcctgccaggacctgagactggacacaaggcagctgtcccagagcagttcctgagatgcaggcccaggaaagtggctgtcaggggagctgggaggcagccctgttccctgcacctccctcagattggaaagcccctcctgcaggtggggtatggcagggagcagcccctgcccagcgccgcttcaccaggaaggtcagtaggtgccgtggccttgcttctctcacacactaacccccctttggttatgtcccagctctcagaggtaacagcagacaccacgtgagagaacccagtggcctctggctcgcagcttagaaggtgaggcttgtgccaggccagccgagccgcctgtatgagcagagttccggtgtcctcggattcagggcagacttgggcagtgcctgtcctgcagttgggggcaggaactccctcccctgcccccaggcgtgcccctgaggcctggccccagcttgtcgctgaaataagtggagaacaccagccttgagcctcacagttttattttctcctcgttatccatccttcctttcagcaccagtaaggaaaaagaacacctctcttcgcaaaatattttatcaggtgtaaagacttgtttttcttctagggaagaaccgtctggatatatatttgataatgtttttaccaaaaccataggtgtgcttaccatagaaaacccctaatgtcccatgaagatacaatacagaaaaaaatacagaaatt

SEQ ID NO: 15754 - DNA, 42065 bp, Homo sapiens
tttgaagtccactgcgtacccctccttgatcccatctctttcccttctcttttaggagttaactatcctgattccttgctatgctttttagtgtgatccctgaagaacgtatcactccattttgcatagctataaatttcatagaaatggaatcgtattgcatgtgttgtgtgatttgctgtttttgctcatcattatattcctgggattatccatttttaggtttatgtgtgactgtaatttattgtttagatgaaagttttcctggtttgacttgctctatcttcatatttttccttaagctaagggttcagcatacgaaggcagtattggtggcacttctttaacagtaccccatctcttctcctagccttgagggctgcacctagatgaacttgtgaggctcatttgaaccttttggaagcaccgaagcctgctgaagtttccagacatctgtatgaatctgttgtagttttttaatgttatatgctgaatataaaaccaagtaactcctgctggaaacatttacaatatcgattaacaaatactatcagtggctttgacatttttgtcagtttcttgatttttttccccgcttttgtctccccttcccccctccacattttggggcattgtgctgttaatagattttttttctgttcgtttgtttatatacctcctgtttccttctgatgttaatagatttctgacagtcagacttgtccacaagaactcaactggcaaggctgcttttctgtgctaaaactggggagctagtgggcaccatgaagatcttctgcagtcgggccaatccgaccacggggtctgtggagtggctggaggaggatgaacactatgattaccaccaggagattgcaaggtactgggttggtttacagcaggctgcagctgggtggggcacttgatctcaaagcagatgccttgggctccagtctgagcgtgggctaggctgtcacccagtgcttatgatgagggctggtgttggtcctgagcaggtctgctcagccaggtaggtatatgtagcagttaggcaaaatcatgcctgtttggagagtcagacattatgtagcagccttagcagagcctcagcatctgtttaacggagcaaagaaaacccaagcctcagtagtgttgatgaagttgaatcatttacttgccttactgaaatggtgacatgttcatcatatggttaaattcttttgaatgaaaaaaatgaaaatggttttttttttcccttagaagaaatatttaaaagtatgtgagttgttggccaggcgcagtggctcacgcctctaatcctagcactttgggaggccgaggtggccagatcacctgaggtcaggagttcgagaccagcctgaccaacatggagaaaccccgtttctactaaaaatacaaaattagctgggcatggtggctcatgcctgtaatcccagcttacttgagaggctgaggcaggagaatcacttgagcctgggaggcagaggttgtgttgagccgagatcgagccattgcactccagcctgggcaacaagagcgaaactctgtctcaaaaaaaaagtatgtgagttgttatgtagcaatcattaagtgcattcagtgtgccagcattgtgctaaggctgtggataccagatgaagaagatcctgttctcatcttcaaggaccatgcagttttgtggaagagacaggcacatacaaaattacagcacaaaagccaggcacggtggctcatgcccgtaatcccagcactttgggaggcaaagggcgggcgggcgggcggtggagggggtggtggcggctgatcacttgagggtcaggagttcgagaccagcctggccaacacggtgaaaccccgtctctataaaaaaaaattagctgggagtggtggtgggcgcctgtaatcccaggtactcgggaggctgaggcaggaaaatcacttgaactcgggaggtggaggttgcagtgagccaaggttgtgccactgcactccagcctgggtaacagagtgagactctgtctcaaaaaaaaaaaaaaaaaaattacagcacagtgagataaaggcacaagaggtcatggaagcagcaagaaccagctgaacttggggtgggaggtaatgtttgaataatttctcagttctaaaggaagagaaggtgaagtttgagcagcagggattacaggtaagctttcagatgagccagattgtggctgggtgcagtggcctacacctgtagtcccagctacttgggaggccaaggcaggaggattgcttatgcccacgagttcaacatagtaaaacactgtctcacaaacaaacaaagaccaaaaacaggctgggcacagtggctcatgcctgtaatcccagcactttgggagaccaaggcgggcggatcacctgaggtcgggagttcgagaccagcctgaccaacatggagaaaccctgtctctactaaaaatacaaaattagccaggtgtggtggcgcatgcatgcctgtaatcccagctgctcgggaggctgaggcaggagaatcacttgaacctgggaggcggaggttgccatgagccgagatcgtgccattgcattccagcctgggcaacaagagctaaactctgtctcaaaaaaaaaaaaagaaaaaaaaccacacacacacagatgggctattctggggagcagctagcagtttagtgcagctggagtgtggtacaaaagtactatggtaagagaggctgccgaaagcatacgcggggtcattttgtaaagggtggtagcaaaatgcaggaagaggaacatgagtttaagtccaagctttgccacttctttactctcttggccaagttacttctctgagccttaatataaaataatatatacttcaatatagtaatacattatctcacagtataatacaattatcttagaattgtttgatgattaaatgtaatacagtatctggtgcagaattagggcttaaaatatttacttttttttctttttttttttttgagacagagtctcgctctgtttcccaggctaaagtgcagtggcacgatctctgctcactgcaagctccgcctcctgggttcacgccattctcccgcctcagcctcttgagtagctgggactacaggtgcccgctgccacgcccggctaattttttgtatttttaatagagacggggtttcaccgtgttagccaggatgatcttgatctcctgaccttgtgatccgcccgcctcggcctcccaaagagctgggattacaggcgtgagccactgcacctgcccaggtcttaaaatatttctaaacattttggacattattttcttgttttattgttcagatggagtcttactctgttgccttggctggagtgcagtggcgcagtctcggctcactgcaatctctgcctcccaggttcaagggattctcttgcctcagcctcttaggtaactgggattacaggcatctgccaccacacctggctaatatttgtgtttttagtagagacttggtttcacctgttggccaggctggtcttgaacttctgacctcaggtgatccacctgcctctgcctcccaaagtgctgggattacaggtgtgagccacagtgtcaggcctggacgttattttctgagtgatatattaaacaggagagaaagaggattggattgcattttggaacactcactgagagcggtgtggagaggagagcatttggggatattgtagtcccagagctgcatagtcccagaggagacagctcgggggaacttgagtttggtaactcactggatatgatggagggagagagaagattcaagaagcaccaagacttctggttagaatgacaaagtggatggggcctgcaagggaggaatgggtggtgtggggaggggaacacgatggagattaggcgtttaggtttggacatccacatagagatgccaatggcagatagaattttgggtctggagacagaatttgtagttgttggaactgaaactgggagaggttgcagtctctcaagggggtgtggaatgtgaaaggtagagggctgaagaaggaatcccggaatagctgaggaggcaaagaagggcaagggagatagccagcatggaaaggaagaaagagggagtgtgtctagcaaggtcagaggcactgggaagtcccagatactgatgactgacatcagctgcaggagtgagctggtggtggttaccgagagtgatgtcagtggagtggtgggcagtaagtgtgaagaggccaggaaggtggtgagtgagatgccttttaaatagtgagcagaggtagaaaggactacatttcagctaagcatccatagctggcttcagatataaaaccttgatgtgccattaaaaaaaaaaaaaaaagaacccccttctttcagtgcaccgctcttcaaagtgtggaatgtggaccacctgtggcacaattgcctggagcacattagcccagccttctcaataagagtgagagtgtgtgtgtgtgtgtgtgtgtgtgtgtgttctgggactctgcatttcaggtaagctttctagtgattctagtgttgacccaaggctggagggcctctgttttaatgtgagctccttagctgtccccttgaattcccagaaagcgtggcagggcctgcctagttctgggtgctcatcccgaccccgcctgagggttttcagtgtgtgaattactgcagtaggaaatatggagaagtgattctcctccctttactacggtattggtgaactctttagttttccctgatgatgttaagtgaacgtgcccagtggggtacctgtcacatatacagtgggtgtatgtgagtgcttctctttccccggctgctctccctaataccgcatcagtggttatctccaggcagagatgtaggccaggttaggtcaagtattaggcagattgagtctgagtttttcctgaggaggaaaatgtgtagtgtatagcaagatcaagatgctagtggctgtggaattactgtgacagggctaactgccgagaccagctcggtcgtggagaccctaacccagtggcgctagaggaattaaagacacacacacagaaatatagagtgcagagtgggaattggggggctgacagccttcagagctgacagccacgaacagaactttacctacatatttattgacagcaagccagtgataagcattgttcctatagattatagattaaaacgggaaacaaagggatgggctctggctagttatttgcagcaggaacatgtccttaaggcacagatcactcatgctattgtttgtggttcaggaacgccttaagcgaaagccgccctgggtgggccaggtattccttgccctcattccagtaaacccacgaccttcagtgtgggcatcatagccatcaacgagcatgtcacagtgctgcagagatttgtttatgaccagttttggggcctgtttttggccagatttgggggcctgttcccagcagctaactactggagcatttttaggtctgagaacatctttctctgagacttttttctgcagcactagagaataacagcttgaaactctattaaaataaagtggccaggtgcagcgacggatgcttgtattgtagttctgctgaggcaagaggatctcttgagctaaggagttcaaggctgcagtgcccaatgattgaggctgttcatagccactgcactacagcctgggtgacataacgagaccctgtttctaaaaataaacaaaaaaataggccaggcgcagtagctcacacctgtaatcccagcactttaggaggccaaggtgggcggatcagttgaggtcaggagttcgagaacagcctggccaacatagtgaaaccccatctctaatgtaaatacaaaaattagccaggcgtggtggtgagcacctgtaatcccagctacctgggaggctgaggcatgagaatcacttgaacttgggaggcagaggttgcagtgagctgagattgcaccactgtactccagcctgggtgatggggtgagaccctgtctcaaaaaaaaaaaaataaataaagataaaagacaaccaaaaaatagtttaaaatagatgacacgtttgttctatctgtttagcaatgtgtttatatatgtgaatactcttgtgtgttgatgtgtatcatgcaaaggttactgacttttttgttttttaggtcatcttatgcagatatgctacatgacaaagacagagtaagtgtaaaaggaaactattatcttgatgtggggtgttttgaagtcttggattacaagaaggttaagaatccctgggggtcatgatgttaaatgatactgagaggcgtatggtgtagaagtcaggaaatcagttgggagactgggtcctacttctggctctatttttgttgtttaatctcccagctttatcaagatagaactgacaaataaaaatggtctatgtttatggtaatacaatgtgatgaatatatgtgtatggtgtaaaatgattgaatcaagctaattaacaaatctaccgcctcatacttttttgtgtgtggtgagaacatttaagatctactcgcttagtaatttttaagtgtacattattaactatagctcacaatgccgtacagcagatctccacaacttattcatcctatctgactgaaacatcagatcctctcccttagcaggtaccattctctgggcttctgagttcaacatttttttttttttttgagacagaatctcgctctgtcactcaggctagagtacaggggcgagatctcggctcactgcagcctcagtctcccgagttcaagcgattctcctgcctcaacctgcctaagtgttgggattgtacctagtattgggataatactattattatactattatacctagtattgggattataacttgggattacaggtgcgtgccatgacacctggccttcactgtagttttaatttccatttttaattttaattttatttttttgagactgggtctctgttgcccagtgcagtggtgtgatctcggctgcactgcagcctagacttcttgggcttaagcgatcccccaacctcagccttcccagtagctgggactacaggcatgccaccatgcctggctaatttttgtatgttttgtagaggcagagtttcgctgtattgcccaggctggtcttgatcccctgaggtcaagtgatccacccgccttggtctcccaaagtgctgggattatgggcatgagctactgcgcccggccatcgtgtgcttgtttaccatgtgtatatctttgttctagtctagggttatgaacataggtgtgattcttgatagacactgccacattgccttcaaaaagggttccagattcactgtaatatcttcaaaactgggtcattaaaaagtgacagctaatttaatggcatcgttaaagtgaaggctgtgccatccctggtttacaattgaggacgctgttcatcaattttttttaacttaaaaaataaataaaacaaggccaggcacggtggctcatgcctgtaatcccagcactttgggaagccgaggcaggcagatcacggggtcaggagatcgagaccatcctggctaacatggtgaaaccccgtccctactaaaaatacaaaaaaaagccgagcgtggtggcgggcagggcctgtaatcccagctactcaggaggctgatgcgggagaatggcgtgaatctgggaggcggagcttgcagtgagccgagattgcaccactgcactccagcctgggcgacagggagactccgtctcaaaaaaaaaaattgtggtaaaaacacataacataaacggtcatactgattgtatctaagacataaatgcacttactttgacaatgaaatagttctatatttctgtgaaaaattatttcacccagactaaacatttttgtgctttacctcagaggcaacgtcatttcttttttttcttttttctttctttctttttttttttttaacaagaatgagtctccctctgttgccaggctttagtgcagtggtgtgatcttagctcactgcaacctccacctcccgagttcaagtgattctcctgccttagcctcccaagtagctggggttacaggcatgcgccaccatgcctggctaattttttgtatctttagtagagatggggtttcaccatgttggccaggttggtctccaactcctgacctcaagtgatccacccgcctcagcctcccaaagtgctgggattacagatgtgagtcactgcacccggcctggtaattctaaagaatattcagttctagatattttctaattccagtctgatttagtcttttgcctatcagtttagaagtgtgtttcttaatgtatgaaaaattttttttcttcagttgtgtttctgatattaagatttttgacttgttttgcattgtggtcagaggatatcacccttttgatgccagttctgtattagctgtctaatgttatttaacaaattaccttaaattttaatagcctcttaatatttcttactaacttggcaggtcatcagtctatttaaaagatttgcacatattttttccatcatctttagttattttcaacagaagggtcactgtgcctattgagtcagaccgttatagatgaaagatgtatgtgtttactaaagacagaagtaaaaatcttcaagatgcaaagaagttattttctgatggggaaaatactttttagtgaagctctctgagttagagtcggtaaaggaaaacaagccatacatattgcagcagagcggctttaacacaaggagctggctacccagctgtgggagggctagaaagcaaatgggaacgctgagtaacctaacagtagagattgcagggagcagttaccttgcctagggctgagaaactaaacgagaagattaggatttccagaagccacaagcattgaggagagatcctgtggaccactgtccaagtacggctgcagctctgaggggcccaaggagctggttatgggatcattgggaaaagttggagtctgcaatcaactgcccctaccgagaggaccctgatgagaacagcagcatgcagaaaggagcaagcctgctctgtcctcctaccttccagtcgccctcttggtcccccttttggctgtacctaacagttggaaaaaggagaacatggtttgcagggctctggcatcacttagtagaggatagaagagtgagtgtggagcagggacagtcgcttaataaagggcaaggggctgactcacaagacctgcccaactcagccagagctgttctgccaggggccagaaaggccatagggccctgacttgcactgccactgccagctgtgactctagaactttgcaaagcacctttccacttacttataataactggtagtaagtgacggccatgtcttccttagaatgtaaaatactaccaaggtatccgggctgccgtgagcagggtgaaggacagaggacagaaggccttggttctcgacattggcactggcacgggactcttgtcaatgatggcggtcacagcaggtgccgacttctgctatgccatcgaggtaagccattcccttcaggtgtgtgtcctgcatcttgcatgggaaatcccctatgctcttgcactttccccgtctgttccttcacaaacattcatggagtgctcactctgtgccaagcacagagccaggctctgagcgtatagagatgagtcagacacagttccttcctccaggagctaattttctcctctgtcagcctaggctgcacatcagaatcactaggagctttagaaaatacttacaggctgggcacagtggctcacgcctgtaatcccagcacttcgggagggtgaggcaagacaattgcttgagcccaggagtttgagaccagcctgggcaacatagtgagatcccatctctacagaaaaacttttaaatattagctgggcatggtggcatgtgcctgtgttccagctattcttgaggctgagatgggaagatctcttgagcccggaaagtcaaggctgcagtgagccatgatttggacttcatgtaagaaagcaaaaaattacttctaccttgtttaagccagttattgtgggactttgttgtttccaactaatcagtatatgaactcagttttgtaggggaaagtatttaaatacatgcccccacaccaccacactccagcctgggtgacagagtgagactttatctcaaaaaaatcaaaacgaaacaaaggctgggcacagtgtctcacccctgtaatcccagcactttgggaggccgaggcttggatcatgaggtcaggagttcaagaccagcctgaccaacatggtgaaactccatctttactaaaaatacaaaaattagccgggtgtggtgatgcgcgcctgtaatcccagctactcaggaggctgaggcgagagaatcgcttgaacccaggaggcagaggttacagtgagccgagattgcgccactgcactccagcctgggcgacagagtgagactccatctcaaaacaaaacaaaacaaaaaaaccttatgcctagtccccagccctaacagattttgatttaacttttctggggtgaggcctgagccttgggacttgggaatgtgcggcaaggttgagaaccactaccttaaatgtccctatggagtcagctctcttatgtttaccaatttgtcatttctttaataaaacattaaacagcttgagcccacagagcaagaaaaattaaaaaccaaacaaaattaaaaattaaacatgttatttttctcataaaacaaataatgcatattattataggaaatttggtaaataccaaataaaaatagtatgttgacccaaagttaagtactgttaacattttggtgtatattcttccaagttttgggggcaggcagggagcatgtatataaatactttccctacaaaattgggttcatgtagtgattgagttggaaataacaaagcctcaaaatcactgtggtttaaggtagagtagttttttgctatctttttcgtggcgtgatctctattcaccgcaacctccgcctcctgggttcaagcaattctcttttctcagcctcccaaatagctgggattacaggtatgtaccactgcacctggctaatttttatatttttagtagagatagggtttcgccatgttggccaggctggtcttgaattcctgatctcaggggatccccccacctcagcctcccaaagtgttgggattacaggtgtgaatcactgcgccctgccttgttcctcttttttaaaagtaagaataactttcccaggaatttctattatagcaaacctctccttgggtaccatcggctagaatgaggttaaatctcatttcttatctctggcaagagggattcagttactcttagctcagacaagtgcaccactgcaaaggtcagttccccacgctgcaccctcacctgatttcaggggagaggaggacacagaatggatgtcgggaggtcatcttcagtgtccactcctggtagtgttttgggtgagatcttgagcttcttgatgggctgaggagaaggaggtgtgaaggtaccagcttgcaggttcagggagaggtgactgatgagtcagaaggcagcaggggtgagggacgacactggctttggatattgtcagggtggaggcaaagtgattggtgagaactagggtttaaggccctcaaaccacatctaaaaacatcaaggcaaatcctagaaataatttgaaatagatgatgaagatttttctaggagaacatgtgtgtgtattccatgtaaatactgcgcgctaatcaattgcacaactggagctgctcacgtaagtactctttacgaaaggatacagcatttgtcccttgattatagtaaaaaatatagtattcatggtagaaaatgtgggaaatacagaaaaggatttagaaaaaaggaaaatcttatcaggaacagtctcggtatcattttgtggtttccacttcgtgtgtagggccacacgtgagtctgtttgttttacatgctagagctcttggggctgtggaatctagactggataagttgaaaacaaagagttggaggtgcttatttatgttcagggaaactcgaagagttcagggaagacttctggatgggggattcatgctgccctgggaagtggggtttgatttggcaggtggggccaggatagggaaggctcagtgatcatgagatcattgtggctggagtgttggttgttgggggaatgggggaggaagactgggaaggtaagggagggcctccaaagcagtagtttccccttatctatggtttcacttttcgtgatttcagttacctgtggtcaactgaggtccaaaaatactaaatggagccaggtgcggtggctcacgcctgtaatcccagcactttgggtggctgagacaggtggaaaccttgagtcccagagttggagaccagcctgggcaacatggcaaaaccccgcctctacaaaaagtagctgggcatggtgatctacgcctgtagtcccagctacttgggagattgaggtgggaaattgcttgagcctgggaggtggaagctgcagtgatcatgccactggactccagcctggacaatagagtgagacccttctcaaaaaaaaaaaaaagaaaaattaaatggaaaattccagaaattatttataagttgtaagttgtgtaccattctgagtattattacataattgttctatttttagttattgttaatttataaattattatttatatttattattgtgcctaatttataaattaaacctggtcataggtaagcttggaggctgaagcagctccactgtgaatgctaatcctccacgctgacttctgaccaaccccagcttcaggaatgcctctaaaatttccgctctcatgcactttgatgtaaatcctgccctcaggtcagaacaactttgatgttatcataaatacatacttaccgtaaatcctgcccttcgtcaaattccctgtggtatgtaagccctgcgtctgagccataacagtgtgggggcccagtttctcactgcccgagacaaggcttctgtttgtatgtctctataaagtgtgtctttctgagaagctggatttgccagtctttcctcagcctctcagctcccgtggcctgttggggtaggtttgcatagagctgcccaccatggaacagtatgtatgtatagcaaaaaaaaaaaaaaaaaaaaaatggtatacataagggtcagtactgtctgaggtttcaagcatccaccaagggtcttaaaatgtatcccccatggacaagaggcactgctgcaccataagaaaatagaggctgtgttctgccaacagtggggatttgggacaattttgagcccagaggatgacctacttactcacacctacagtctgctctcctctggagggcacagcacgcctcccaggttcgtgaggcaagtccctttcctggctttttggcgtcctcttgtgcggtactgacacctactgctcttactaagtagtgcagcctcctcaggatccccggcatccccgctgtgcctggcacggaatgagagtccctaatcacaagttaaagccagctgaatctcagccctttttcatgatgcacatttggagaataaagtatttaagttacatatcttaggaccagaatcaaggaatagcttgctcaccttaaaggtcagactactgtttaatttattgctcatttttccttgggtttcggctctattttctaggttttcaagcctatggctgatgctgctgtgaagattgtggagaaaaatggctttagtgataagattaaggttatcaacaagcattccaccgaggtgactgtaggtccaggtgagatttacacaccctgtgttgaaagctttgcttgctcttgtgtgagagaggaaaagggttattccagttacctggaacaaatccaggtcatagcatagaagtgggacctctctgtgtggagctctgacagtaaggacttggtttctcttgatgtttattttcctgctagttaaaactagtcaacaaggagtagactagagctagtcaggtccagcaatggagacgcaaacaaaacctacatttgctttaagcaaattggaattcttatggggctcaactcttgagtttcaactaccaataattacgccttggataaacctcattggctacgatactgccactgctcaaagctcaactctgagtttcatcaggcagaaagtacttagttcttttatttatttatttttttgagagagagtctcactctgtcgcccaggctggagtgcagtggcgctatcttgcctcactgcaagctctgcctcctgggttcacccatcctggctaacacggtgaaactctatctctactaaaaatacaaaaaattagccaggcatggtggtgggcacctgtagtcccagctactggagaggctgaggcaggagaatggcgagagtagttctgacattctgcttctgcatacaacatgaacaattttcctgtatagcattgtctcttaaggtttccagaatatgtatatgtacacacacacacacacacacacatattttttttttgagacggaatctcactgtgtcacccaggctgcattgcagtggtgcaatcttggctcactgcatcctccacctcctgggtacaagtgattctcctgcctcagcctcccaagtagcggtgattacaggtgcctgccaccacacctggctgctttttgtatttttagcagagacggggtttcaccatgttggccaggctggtcttgaacccctgacctcaggtgatccgcctgcctcagcctcccaaagtgctaggattataagcgtgagccaccatgcctggcctccagaatattttttatagtctagaactttgtttcagtctttgaaaatttcacatgccactgacacttagagaacatagttgaaagatttgcaaaggaaaaactgtggtgaagttatggataacaccatgggttttttctaattttttgtggagatagggtcttactatgttgcccaggctggactcaaactcttatgctaaagtgatcctcccatctcagcgacccaagtacctgggactacaggtgtgcactactgcacctggctttttcaccacggttttggagaatgcagtatcattctgaattgaagcttctacctaaggtcaacattattctcccatttaacaatttttttttaatggagaatctgaaacatgtacaaaagaagtgggtactatcttatttatttatttatttgagacagagtctcactctgttgcccaggctggagtgcaatggcaggatctcagctcactgcaacctctgcctcccatgttcaagcgattctcctgcttcagcctcatgagtagctgggattacaggcgtgcaccaccatgcctggctaatttttgtatttttagtggagacggggtttcaccgtgttggccaggctagtcccgaactcctgacctcaggtgaccagcctgcctcggcctccgaaagtgctgggattacaggtgtgagccaccgcgcccggcctatcttttttatttttaaaatatacaatagagtgctcaaatcattccatttacaatcaacgttattgaagtatgatttacattaaatgaatatccattttcattatggatatttgacaaatataaacacacttgtaaccaccatcaccataatgaagataatagaacatctccatcatgcccaaagagattcctcataaccctttctatcagtccccccatatcctggtcctaggcacccactcatagacttcattatagattagatttgcctgtctaggatttcaaggaagtggaatcaaagaagtgtggactcttctgtgtgtgtgctctcttttttatagcgtgatgctggtaagattcttccacactgttcatgtcttgggggtccgttcttttgtgttactgagcagcactctattagatagatgtaccataacttgtttatctctctacctgttgatggacagggatttcttggataggtctttagattcactgatcttttcttttgcagcatctaatatgctgttaagtatatttagtaaacttttcatttctctttctttgttgttcttttttttttttttttgagacaggatcttgacctgtcccccaggctggagtgcaggggtgtgagcatggcttattgcagctttgacctcctgggctcaagcagtcctcctgcttcagcctcctgtgtagctgggaccacaggctcatgccaccatgcctggctaacttaaaaaaaatttttttttgtagagatgggatctcagtttgttgcttaggctggtctcaaactcctgggctcaagcgattctcccacctcagcatcccaaagtcctaggattacaggcgtgggccgctgtgcctggcctcatttttgatattgtattttttaatctctgaaagttccacttgattctttttcataacttccatttttctcatgttcatagttttctataagcacatttattttagctttttgaacatccttatcttctgttcccaccatctttgttttttctgggtttgttctcttgactcatttttatccttattctgggtcacattttccttcttcacatgtctaaccatttttgtttggatgctgtggctatttggaattccccattgttgagtgctagacttcgttggttttgctttttaaactttggcatgcagttgggttacttgcagttcagattgatcctttcagggcttgtttaagctttctttggagtggggttagagtagctttaagtcaggccttctcaacagtagtgctgtgacgttttggcattctccaactatgtgacattttgataattctttgttgtggaccctgtcctttgcattgtaggatgtttagcagtgtccctggcctcttcccagtggatgtcagtagcactcccctcctcccaccattcttgccaactaaaaatgtctccagactgccacgtcttccttggtctcgagtgtgtaaaattgccacctgttgagaaccactgctctaaggctgtttagccagacagttactgtaacctttctggagtgtctgctgagagctctaggtgctcagcagggtttcccttgtctggctgatcagaacttgaatgtttcccaggcctctgagagctccggagattgttatcactcatgcaacctttgctcggcttcacagagtattaccctgtgtgtgtgtgaatgtattaacacagaccctagaggaaccctgtgcagcattctgaaggctttttttctgtgtaatttcctctctgattctctgcctggcaagttccagctgcttccacttccctgaactcgtttcctgtctgtttaactcagcaagactgccgtgctctgtgtcacctcttaccctatactgtggtctggaaagggtctcctggctgatagccagagcagggtaagggttacttggtttgtttcccttcttagggagcaaactgtgttgcctcttgctcaacatctgaaaacacttgtttcatatattttgcccagttttctagttgataacagccggagggtaagcctgatcccacttattccactatggccagagtggagattgattcatttatttatttttttttgagacagtctcactctgttgcctaggctggagtacagtgatgcgaacacagctcactgcagcctcgacttctgggctcaagtgatcctcctgcctcagcctcctgagtagctgggaccacaggcaggcgccaccatacccaactaatttttttgtttttttaaatttttattagaaactaagtcttgcggctgggtgcagtggcttatgcctgtaatcctagcactttgggaggccgaggctggcggatcacctgaggttgggagtagcaaccagcctgaccaacttggagaaacctgtctctactaaaaatacaaaattagtcaggtgtggtggtgcatgcctgtaatcccagctactgaggagattgaggcaggagaattgcttgaacctgggaggcaaaggttgcggtgagccgagattgcgctattgcacttcagcctgggcaacaagagcaaaattctggctcaaaaaaaaaaaaaaagaaaagaaaagaaactaggtctcgctttgtttcacaggctggtcttgaacgccaggcctcacacagtccttctgcctcagcctcccaaagtgctgggatcacagatgggagccactgtacctggcgagatcatttattcttgaaaatttatccattttgacggcagggagactgatctgcagggcagccttggccatgaagtatgctgactctgcctccaggcagcattgttcacacacacctcagcttaggccaggcccctcatatgatttcttattaaaaaaaaaaattttttttagatagagtggctctgtcgcccaggctggagtgcagtggcatgacctcggctcactgcaacctccacctcccggattcaagtgatccttccacgtcagcctcctaagtagctgatattacaggcatgcaccaccacctggctaatttttgtatttttagtagagatggggtttcactatgttggccaagctggtcttgaactcatgacctcaagcgatctgcctgccttggcctcccaaaatgctgggattacaggcatgaaccaccacgcctggccaatttcgtaatacttttcttcatagcgcttaccactgcaatcattaaatcattatgtagttatgtatttaatgtctgtatccccacccagctgaggcatcctgaggtcatgcactgcgtgggttgtattaactattccattccgttatttgctccgggcctgtcatgtaaaggagttaggtaatttttgtaaagtgagtagattgtcagttgtgcttcatccataatcccttgtaaatgtgactttgtttccgatcctcagcctgacaagtggcttcctcattgccaagttgggtggtctttcctctgcttttcctctctaaccactgccgctttggtacttctgccattccttccttcttgaaactctccctggaccttagtgacatctcttcatcttggttctcctgtgttgctttctttctgctccagatgtatactttccaaggttctgctctcagccctttttaaaagtggcatctgaagttgcctgttccccagagctgggttacatgctgaggcttgtggagagccaacccagggagcagcgtgtgttcatccgtccattttgttcatttggaaagggcttaggaagctcctggggtggctacctgcttcagactcccccaccccgtgcccttatacattagcagtcacactcaaaataccaggccctcaagaagtacttgttaaaatgcactggaccataaagcttgaattttttttttttaatttttattattttttgagacagtctcactgtatcacccaagatggagtatggtggggcaatttcagctcactacaacatctgcctcccgggttcaggcaattctcatgcctcagcctcctgagtagctgggactacaggcgcgtgctactacacccggctaatttttgtatttttagtagagacaaggtttcaccacattggccaggctggtatcgaactcctggcctcaagtgatcagcccagcttggcctctcaaagtgctggaattacaggtgtgagtcactgtgcctggctcttgatttttattttaatgaagcaatttggactataaagcattttaagttatataattggtttaaacattcaggagatagaattggcagagtgggtgatcagtgggttgtagggtgacagaaatcaataatttatctaatgtgtgttgactgttacggggcactagaccttgtgggtgctggggtacagtagtggacaggcagtcagcggtcctgctgtcctggaactagtaaatgatgcccagattcctggactatgtgactcattgattgattgaggcagaaaccctggagggaggagcaggcgtgttagctggggtgggtgggatgagttttggacagtgtattccagttggagtttgatgtgacatcagagaggatgggcagggcttctcgggagggtggtctctgtggcagaagacagaagtttcttcttaagctcctccacgtgatactgtcatggagcacaggtgagcttcataggaagtgtgcttttttttttttatcttcatcatcccgaccaccaccacatgagacagagcccattcacccgttttactgatgaggcaactgatggtcagaacggagggctcagggataggaagtgagatccaggccaggctccagcctcgagctcgaggttcacgctgtctctgttgtgctcttctatcagctgctctctttcttttttttttttttttgaaatggagtctcactctggcccagattagagtgcagtggcgtgatctcggctcactgcaacctctgcctcccaggtttaagtgattctcctgcctcagcctctcaagtagctgggattacaggcacccatcaccacgcctggctaatttttgtattcttagtagagacagggtttcaccacgttggccaggttggtttcaaacttctgacctcaggtgatctgcccatctcagcctcccaaagtgctgggattacaggcgggagccaccgcgcccggcccctgtcagctgctttcatgcttctcttttccttgtgtcatctgtgagacttgtgctctgtgtaggggaaatgagtgggctttgtcagattataattcatgaggcattaaaagtgtttacagttaattctccctgatgaatagccccttccaaagtctattttggctcttggctcattaaaaattataattgtagaagtagcagtacattactgaggtttagaaaacagttaacagaagatccctcccaaatcctactcttctctaaaatcctactgtcctaaaacaactgttatttaagagattgtttggtgacaaggcgctttcattaagggaatttgccatagtgatctggggattctaagtcatggatctcaattttggctgccagagcctaactcacagtagctggaagatcatcagagaaccttgttgtcttgctttggctttccctccctctccctgcaacctagaagtatttgacataccagcattctgtttttgcttttcaaataatttttctaatttagtggttaatagtttaattgttaatttatatctctctaattgctaatagggatgaaaaagttttcataagtttgatttctgttttgaattttctgtttatatttttacctggtttctttttgggtgtgtgttttttttgtttgtttgagacagagtctcactctgtcgcgcaggctggatcactctgtcgcgcaggctggagtacagtggcacaatttcggctcactgcaacctctgcctcccaggttcaagtgattctcatgcctcagcctcctgggtagctggggttacaggcgtgtgccatcacacctggctaatttttgtatttttagtagagatggggtttcgccatgatggccaggctggtcttgaactcctggcttcaagtgatcctcctgccttggcctcccaaagtgctaggattacaggcgtgagccaccatgcctggctaatttttgtattttttgtggaaatggggttttgtcatgtttcccaggctgatctcaaactcctgaactcaatccattgggtatttatagttttcttatcattttttgcagtctccctcccaatattaagcatacagaatagctgtaagagcagtacagtaaacacttatgatcccttaccctagatttatcaattagcgttttgtcatacatttacatatggattttttttttttcctgaaccattggcaagtcagttgcagacatcctgacacttctgaatacctcagcatgtatatgtgcttttagcgtgatggccccttaaccacttatctttcccatatttgctgtaaatatttttcctagtctgttgcttatgtccaactctgttttcttgtgtttttcagagggtgacatgccatgccgtgccaacatcctggtcacagagttgtttgacacagagctgatcggggagggggcgctgccctcctatgagcacgcacacaggcatctcgtggaggtagtagacggagggctccctcagacgtgtctgtggtctcagccagctcacatagcactcactcatgcaccgtgtcccacacagcccaagccctcagcacctctgatacacctgggacacccctccattcctgggggggctctggttctcctcacttaaaactttcatgtcccttgaatgccaaatcttaataggttagagttgaaaagcaagaaactatattcaaattcagttaagttcagcaaatattctcaggaaggcgatgcttgagctgtcagtcttgagaagtgatcaggtgttggcctggcagatggaatatttctggtagaggagagcagcacgtgctagacgtgagactgaatcggtgcggtggctccggagcctgctttggattttgtgctgtgtgggaggcaggagagatgggcttagcaactgaggctagagagctgggcaggggctagatggagtggggtttgggggccatgcccagagggtagctgtcattagaaggtggggtggcatcacaggagggtttgaagcagaggattgacagcagacttatgcaggcagatgtgtggagggcagttggggtatagggctggaggttgcgggtgggttaaaaggctgtggaatcgtccagacgctgtggtacagtgggcctcagctaaggctgtagacagaggcctgataggtggtcccaggagttggtggtcccttaggtgtagagatatcgatgctagggtttgggcacctggattggatggtggtgcttcctgttgacggggagtgcaggaagaggggtagccttgggaaggttgggaagtggtgagggcgattcttctggtttacacagagtttgagctctctaaaggtcagccaagcaaagaggcccagagatgcatggatttactcagtgaagagggcatggttgaggtcactgtggagagtgtggagggagacagtccggaccagggagtccccttgtgaggtggggcggaggaagcacagcctggggaaggcagcgggagtgagtccagttagagcagcatttgtctaccagagcaaggttgggagatgcttcgcagggaggccagttattctgctagccttttaccatgcccagagcaacccctacagcagagaatcatttggcccaagaggccagtggtgtcctggtggtgaaagccatgtgggtagcagctgtgagtgtgctcttgccgggtccctattgcctggtgcatggaggacgtggagtggatgcaagaggtaggaggagagccggacaaggagccggagccggagccacagccctaggggctgagtgtgcagcagtgcccagcggcgctagagggctgggcagctgagggggcaccgtggtccacagggctttgccacaaggaggctcttgttttggtgctgggcaggagcggcactgaagggacactgagcccagagccaggatcaccacccagcagcaggacgtgaagcatttaagagtgccaggtagccaggaacttagctgacagaagtcattttaggcacagtgtgtgttctttttgaaatgtagtaccctttttttcccttttccaagggcatagggctgaaaacagttcactattctaatagtataaggtgttgggcattactgaaccaacctaatgttaaggaataaacctcttttgatcaatgggaattactgtgggtctaagcatctgatttttgtttggttttgtttttaatataaacttaggaaaattgtgaggccgtgccccacagagccaccgtctatgcacagctggtggagtccgggaggatgtggtcgtggaacaagctatttcccatccacgtgcagaccagcctcggagagcaggtcatcgtccctcccgttgacgtggagagctgccctggcgcaccctctgtctgtgacattcagctgaaccaggtgtcaccagccgactttacagtcctcagcgatgtgctgcccatgttcaggtaccaaggagccaccataggtgatggcgctttgagacatttgatggaagttgggtattaggaggttctttttgagtgggaaggaaatctagctgctgtcacctgcctcgaaggcaagagtcctttgcagccaaatgtcattgccagtgaagtcactgtaaaagcttaaaaaatggagtgtgtgaggttaaactctgcttacattcttgaatattattcctcagcatagacttcagcaagcaagtcagtagctcagcagcctgccatagcaggcggtttgaacctctgacatctggccgagctcaggtggttctctcgtggtgggacattgaaatggaccctgaggggaagatcaagtgcaccatggcccccttctgggcacactcagacccagaggagatgcaggtaagaggcaggagcctagcatgtgccctgtcaggaaacttgtccactgctgttcatgggaaagtaacagttgagccttggacccaggagaatttagagacaggagggctgtgtcagaatcaaagacaaaagtttttaaaaagcaagcaaaggctagctgtagtaacgtagccttcccagggtgagctcatggtgagcactcatggacacagtgaggaacagagaagttggctttcctctcccgcctcatcatgatgcagccacccttagataccacccctcatcccctgagtaatcccagggggctcccatcagcttggaatagagaactacagcctcaccttctgtggcctcaaaatctcctttctccaccccgatagaaagtaggcagaggacatgaaacacagaaaaggaaatacagatgatggggatagttgcccactgtccctcataataagagaaatgcagttttagctgctcacagcacctatgctcccagcctctcaggagactgaggcaggagggttgcttgaacccaggaagttgaggctgcagtgagtcgggactgcattactgcactcccgcctgggcaataagatgagaacctgtctctaaaaaaaaaaaaaaagagaaatgcaactttaaactgcaatgagatctcattttcacctactagtgaataaagtttaaacagtttgcaagcacactgttggggaagctcagggaaaaagcaggaaagcgagtcatcagaacgtttcaggtagaaagcaatgctgctttcagacatggggctgtggctggatttgcgtctgtgcagaatagatgtgtgcagccctggtttagtagaaaaaggccaacctaaaggccactagcagggatcaagtccattatcctttcagtgggtgaggtagctctctgtgcactgatgtgggacaagcttcagggtggattattacctgacacaaaaataaaggtgcagaatggtgtgttgtgtggcagcactggtgttagtaaaaataggaatatatgtgtttgtgagtggatagtcatgtgtggtgtacatataaggaggtctttggaagaattcccagaaattcgtaaaactgactgcatctgggaatggggactggaggttaggggtggaaaggaaacatattttttactatgcgtccttgtataccttttgaattttctctcatgtgcttgtgttatttacacccccatccaccctctctcactctcacactcaaaggaaaagaaagtgggaaaggtgtgtcggaattgcctgatgggttcttcccacccactgttcagacaaaaccaattcgctgacaccatggcattgcaataaagactttaattgacacgaagccagccacaccacgtgggggagagatttgttactcaaatcagtctccctgaaaattcacaggctacggttttttgtttgtttgttttgagatggagtttcgttcttgttggtcaggctggagtgcaatggcgcgatctcagctcactgcaacctctacctcccgggttcaagcaattctcctgcctcagccccctgagtagctgggattacgggcatgcgccaccatgcctggctaattttgtatttttagtagagatggggtttctccacgttggccaggctggtctcaaattcccgacctcaggtgacctgccccaccggcctcccaaagtgctgggattacaggcgtgagccgctatgcccggctcaggctagggtttttcaaggatagtttggcaggcgagggagtccacttctgggtggagtcatcagacagaaacgtaaaaacccgaaaagacatttcaaagggtcaatcttagtttctgcaaggtggtgttatctgcaggaggaatcagggaaggttgcagatcttgtgacctaacaatggcttcaccttagcagaattcagcctcctctcatcctcctaacctgatgatctttcattcagtttaagtttaattttggggaaggacggttatcatttaaagtattaaccagctgggtgtggtggctcacgcctgtaatcccaacactttgggagccccaggtgggtggatcatttgaggtcaggagttcgagaccagcctggccaacatggagaaaccccacttctactaaaaatacaaaaattacccggatgtggtggtgcgtgcctgtaattccagctactcgggaggctgaggcaggagaattgcttgaacccaggaggtggaaattgaagtgagctgaggtcacaccactgcactcaaacctgggtggcagagcgagactctgtctcaaaaaataataagaacaaaaaataaactgttaaccaaatgtctcccaaagttagcttggcccggacccaggaatgattaagggcagtttggacattaaagcaaaatgggggttggttagatgagatctctttcactgtcataattttctcactttttcgcaaaggcagttttggtttcaggaccaagaaatagaacctgtctctacccaggagcgcctcaggcaccatcctttgtccatggtccagcctgcctggccttaacccctggctttgtgttgaatgctcacctgctggttctaggtgtccacaacattatggaaggccttagcagcttcacctaccccattcccagagttactgtttaggccgaagggttgtgactgctggggaattgctgtcaatcagcgtacccataccgacagcagcatgtgagactaagaagtatgtgagcttcctagtctcccctccaccttccaggtgcctggccccgggtgtgtgtgtgtccagccagggcctgccagcatccctctgcaggctgtgtgtgtgtcactctgaattcacccacagagttgagattggcaccgcgtcacattcttcctaagactgtgttgcagaattagcataagaatagcattaaaatgttagtacttttggccggtggctcactcctataatcccagcacttgggaggccaaggcaggtggatcacctgaggtcaggagttcaagaccagcctggctaacatgttgaaaccctgtctctactaaaaatacaaagaaaattagccgggcatggtggcaggcgcctgtaatcccagctacagggctgaggcaggagaatcacttcaacctgggaggtggaggttgcagtaagctgagactgcaccattgccctccagcctgggcaacaagagcgaaactccgtctcaaaaaaaaaaaaagttagtacttttaatttgcatatcttcggagcgctactatgtattttttctccttgaatcctcttagtagacaaacaaggtaaccacaaccatagccaacccgggactcagcaggctccagggattggagcggggccttgtgtccaggagcagtagagtgggtcctgcccctggtctcttgactgtgggtcttgtgttgtttctctaccagcgttgacttttggattggaaatttgaaagctgctaatgaatctccctcatgaattcatgtaactgctttgatcctaagtatatttagtctgtcccaccttggcacagtgggttctgtcaccagctcctcaacgttaggacccaggaggtccctgtggtaggtagtatgggaaggacatgatgacagggcagtgccatgggagcctaggaggggtcgggaaagggttctcctgtcttcttcacatgcatttgcatagtgtgggaatgaataaaaggtttaaaagaacctgtgttattcctgttactatttatttttccagaacatatctggtcagattttcattttctagtttttatgttcaagtaagcgtcttaagcgtgtgggaatgtcattctcctgcctttttgttaaattaaagaccaggtgggtgggcacattccttacctgtgctcttggagtcccacagggccaagtttttcttagttcctgaaggtgacagaatgagcaggcagtcgtctcatcagagttgagccaggcatctcctgtttttgtttgttagagacagggtcttgctttattgctcaggttggattgtggtggcacctcttagctcactgcaactgtgaactcctgggcacaagcgatcctcccacctcagcctcctgagtagctgggactacaggcacttgccactatgcatggctaatcttgtgttttttgtagaaatgggtgtcactggtatgttacccaggctggtcccgtacacctggcctcaaacgatttgccagcctcggcctcccaaattgttgggattacaggcatgagccaccgtgtccagctggcatctactttttagggcagttcttcctttttcaaaaagaggcttaacaattatgagcgaaataaacctcattatataaaataaaaatatcactcatggtcctccctttcactcaaaatagctccctttgtttggtctctctccaaacgcgtgggtgtcatcggtgctcatctctgttccgggccccgtggccttcagcagcagcgtttaagatgtctgtccgtattctgcacgagggtttatatcccgttctgagtgctggccatttgggtgggttccagtttttgctggtataaataattctgtgatttgcatttttatgtgaatataacttttttttttcttttggggttttcttaggatagaaacctgtatgtggggtttgtagtaaggactagcacagcttattaaaaattgaccgtggatcattgtcaaccatgtttcacaatttagaatattcagttatttaaatacttcaatttaattcaaagaataagccaaaacctttttgtattttcccacctttttattttgaaaaattatatatccacagaataagtgaaaatgaacactgatggtcgctttattaatttaaatttaccagttgttaacgtttgccacatctgctttatctttgtctttctgcctcccttcctgcatctctacacacacacacacacacacacacgggcatgcacattttttttttttattgctaaatcatttgaaagtaagttgcagacatctgacactttacttttaaatacttcaacacttatctcccaagaatgaaaacagtctgcaacataaatgaaacacatgatcacacctaagaaaaacagtggttccatagtatcgtctaacatatggttcaaaataaaatttgtctccagaagtccttgatagcttttgtttcctcagtctacgatccagttaggtttagtgcattgagtctgactgttttgtaaattccgagtacgttaaagcctttggaatgcgtgccatggactgttctgaaaaggttccccttaaaccactaggtttaaaccaatttttttccttcaaaggaaacattcagcacagctctacgtgttgaagagagagctttggtgctactctgatggggtggggactggagcctgcacttgtcccctcccctgagccactctggcagattgctgctcttggccacattgtgtcttcctaaagccagcagggttcccgcaaacttttgggccactggcctctgagtttagagtttatttatctccttggccacaatagccagctgtagtctacattgtggacgtcctgaaaactggcagttctctggcatttggctcctggattagaagcattgctcatactgcagctcgttgacagctgactctgttctccgtttcagtggcgggaccactggatgcagtgtgtgtacttcctgccacaagaggagcctgtggtgcagggctcagcgctctatctggtagcccaccacgatgactactgcgtatggtacagcctgcagaggaccaggtacgtcgagcctcgtgggggtggaggatgagcctctgagacttgtatgtaaattccccatttacagatcctctggaggtgccagtgggttgatttgtgtctggacagaataacataagaacaaagatttgtgaccagtgtgtcagtgcccattcgtgtgtacccaggagaggctgtcatgggttgctggaatctgtttagagcagatgcgtaggaaaagtctggaattagcgggtgctctaagccctcatgcctactggagaccagtgtccagattcatgccctctggagacctgtggaggcgctcacagcccacgtctgtttgttcatctcctggcctagccctgaaaagaatgagagagtccgccagatgcgccccgtgtgtgactgccaggctcacctgctctggaaccggcctcggtttggagagatcaatgaccaggacagaactgatcgatacgtccaggctctgaggaccgtaagtgtccagccccttggcttgttgtggggaaaagggagaaagaagtttgtcccatgaaccccagcactttgcttatgatttgctgtttctttcctgtgtcctcttgtctatgagtggcttcagcgagcgcctcctgggtgggcactggagcagaaagcgggagagcctggggctggacttcctgagggcttgctctctgctctactgggagagcctctggctgggctcctgctggacacctttgccttgtcagacacagtcattgctgtgggtggtcacggtggattaggccaccccctcttttcatgtgttgtcacctttctaaaattttctaagatgtaaatctgatcatgtcgctctcctgcctgaaaacctttgctccctgctacctgtagcaggggactcggcttggggattacagatggggcttagagggagggtctcttgaggcccttgggggtgtgtacagaaataggtgtgaatgtgtgcattttgggggatggggggaggatccaagccatcctgagtttctctcagaggggtctgtcacccagaaaggcatccttgcctttgggcagtcaattgtgaacactcaagccttggaggctctcagctgtctgtgctctaaccagacagggaagaagcctgttgtcatggactggaaggtggcctgcaggtggtgcaggccttcagcggggcctctaggctgggttgaggggtgtctttcctgacactggggacaggtggggagatgtgagcaaggcgggcatgtttgtggctgggggtggttactgcatgaggacgcagggggatggtctgaggtctgggcaagtggagtgagaagggaagtatttctgacagcttgccagcaggaatcttctggcaaactggaggaagccctgtgctgagcttgcctgttccccgcaggtgctgaagccagacagcgtgtgcctgtgtgtcagcgatggcagcctgctctccgtgctggcccatcacctgggggtggagcaggtactgacatgcacccttgtcagcctcctgatgtgggcttgtgagttagagcattgcgtggtccgggtgcacaattctgtgatcaaggctctttgcaaaggccactgttgtgggcacagcatgctcgggtcaggggctggggggtttattgcctgtgcgtgcaggcaggcgtcaggcctcagagctggtgttcaggctgccccagggagggaatgagggcagggagggttgttcaggtgtgtcctctgtcttaggatggtcttgtcgcattttaatctttaatttcttctctgttaagtgaatatcttacaactaatagcgtggtgttccctctaggtgtttacagtcgagagttcagcagcttctcacaaactgttgagaaaagtaagtgagaattgttgttgctgaaatagtgagaggacctgtggggtctgggttgatggctttgaagtggcattggccccaggggaacaaaggagtggtggctcgcttgcacccctgtgttgtcttggttgctgcctggagagcagccagaggccttgggagctgtcactgaaatagaggcaggcatttgcactctgctttgtttttttgtgtctgaagaagtttaggcttttttcctcacttcacataagctactgttgcggtagaattaaatgtaggatgtgtttctgggacatcagtgctgagggagccagtgctcacagcctgatgggagatggcatttctctccctggccagtaactggtttgatttcctctccaaaggggaactcccttcaccagaactgcaggctcgcactgagtcctggtgtgcacatgcgggagaaatttcttttgcttttatcacattgtgctcctgatctcatccgtggtctataggatgccccccaaggagaggatttttccacaaagcagataaaagtggtgttccagaaccatttgccggaaaattcaaagcggagaatgcaactttgagagatttttttttcctgacaaacacaatactttagtatgaatacagtaattttacggttttctttctaagatcttcaaggctaaccacttggaagataaaattaacatcatagagaaacggccggaattattaacaaatgaggacctacagggcagaaaggtgagtagcgggagccttttggccacgctgggctgtgttagggtggtcagcacggcactgaagtagcccaggccccaccctgtccctggagtctcacagtgggtcctccacatgcaaccttacctcctacgagctcccaccatcaagggtgtggtgaagctttcatggagctgcccggtgagcagatggttgcactgctcttttttttttttttttttttttttttttgaaaatggggtctcgcgctgtcgtccaggctggagtgcagtggcacgatcttggcttactgcagcctcgaccttccagcctcaagcgatcctcccacctctcccgagtagctgggactgtaggcatgtgccattatgcctggctaatttttgtattttttgtagagtcagcgtttcatcatgtggcccaggctggtcttgaactcctgggctcatgcgatctgccagtctcagcctcccaaagtgtcggggttacaggcatgagccaccacacctggctgtactgctcttagctcagcctcatctctgctccttcaggtcaggacagagcagctctcttggggttcctaggagcagagcatgtcctttcctctccaccgcactcctgtcttcattccccgtccacggcttcctgctgcagtcaggcttccgggccctgaaactgcttctgccagcaacctcgtcgttactcccacggtctccctgcaggcttcatctgctctacccgcttgtccttgtgacccgggacttctgcctgtgctggggaggtcgctttcccctcaccttcctggctgctccttaccttgcactgctccgtggcactctccccgtgtcccccgcttcccctactgcatcctctctggtaatcacgttccttctcatgtgtgaatcagtgaccatcagagccggccttcactctttactattttggattcaaatctcatgtccagctgccatcctgtcacctttccttgaatatgccacaaactggactcacccaacgcggagctatcatctttcatctttcctgccagtctttttttaaataacagctttattgagatgtagttgacataccacaaaattaatgcatttcaattgtacagttgagtgatttttttaagtaaatatatggagttagccgtcacccagtctcatttagaacatttccaggcccgacatggtggcacatgtctgtaatcccagaacttcggaaggccaaggtgggaggatcgcttggacccaggagttcaagaccaatctgagtaacatagggagaccctgtctctataaaaacaaaaaaaattaaccgagtgtggtggcacgtgcctgtagtcccaggaggctgaggtgggtgaggtgggaggatcgcctgagcccaggagttggaggctgcagggagccgtgcttgtggcagagcactacagcatggctgacagagtgataccttgtctctaaaaaaaatgggaatgaaaagagaacatttctgttacctcccaaattcctgggagcctgttgatagtctgcatccccatgccccaggcctggcagccactggtctggtttgtgtctccagtatgtgcctcttctggcatatctcaaaagtgaggtacgcagtgtgtggtcttgtgagtctggctcctttcgctgagcataatgtctttgagattcacccatttcgttcttttgaaggctgtgtagcattccacggtgtggctatccattcatgtgcttatggacgtttggattgtgtccagtttttggccactttgaataaggcttctgtgaacatggattcactggtcttagagaggatgtatgtcctcagtctcttatgcagatgccttggtgtggattgctgggtcatgtggtagttacgatcgactttttaagaagctgctgaactgttggttgaagtggctgtccttttgacatccccatcggtaacatctgagggtccaggttctcggatcctcaccagcacctggcattggctttttttttttagcataaccatattaatgggagtgtggtgatgtctccacatagttttaatttgtatttgcccaatgactgatgatggtgaacatcatttcgtgtgcttgtcttgcttggtgaaatgtctattcaagccttttgcccatttaaaaaaataacagttttattgagatataattcacataccttacgattcactcagtgatttttgtatattcataaggttgtgtaaccatcaccacatcagtttaagaaccctttcattacccattggcagtcatgcaccatttgtccgcagtcccccagccctgggcacccactcttctcctttctgtctttagcttgcccattctgggcatcttgtgtgaatggaatcagacaagtgtgtggtctttcgtggctggcctctcatgtggcttcatgttttcgggctcatccatgtcgtagcctgaatcaatacctcatttctctttcttgctgaataagattccattgtgtggatagaccatgttatttatctgtttctcagctgatggacatttgggtggctcctacttttgggctgttgtgagtaatgctgctataaatattcatccacaagtcgccttttttctccctcatagatgagggcataggagatgattctgaaagccactgtgtggtgtaccggtagaccggggtcacattgaattggagtggtgggagcgggcgttcttgccatgttcctgatgctgtgtggggaggcgaggaagcactcagggcagccccttctgtctgccagcatttcctgctgcatctccatcatctctgactggccccactttggtgcctgactgcttgggcctgcccagggtcggctacctccttaccctctgccactccttccactcctcccacccctcccaccctgtagtctccgtttcttacccggactctttctgcactctcccaggtcgcctccgtccccagcacctgcaggttcccttccacacttcgtggtcctcagcagcatcttctaaatcacattccttctgattttgaaccctgatgaaaacttctagtgacatccaccacccccactgccgcctccgggatgagtccagcccctcaccctgtcctggctgccttgggctgggctggcttctgtccagctccacaccctcaccttggggggccttgctgtctcccggcctcactcttgcccctgctgcccctccctcggccgttcaggctcctcgctgtgcacgtgttcatttactcacaaatgttcacagaacatctggtcacggcactggcccactgctgggggatgctgggccaccagtccctgctcttgtggtgctcagagcctggggagggagacggagacaagccccggtaagtcctgagataaagcgtccagtgggggttgacaggatgccactctggaagccccgtctggcacgtttatttctgggctccctccatgacccccttccttgcttttttctatcacatggggtcagccccactttgtctgcttccctcttctgctctgctctcctgagcacgggactcatgtctggttgtaatctttacagcctccagggcaggtacagagcaccttgctgccttgcttgtttgttgactgagggagggagggactgatgagggagggagggaatgagtgagtgactgagtgagggagggagagggagggagtgagggagtgacttgagtgactgagtggcctgttgcttccgtgttcctgttaacactcctggaccgagccctactgacacctgggccctgcttctcgcccattcaccaggtctctctcctcctgggcgagccgttcttcactaccagcctgctgccgtggcacaacctctacttctggtacgtgcggaccgctgtggaccagcacctggggccaggtgccatggtgatgccccaggcagcctcgctgcacgctgtggttgtggagttcagggtaggccacccaggggatgttggagaaaaaagcagaggaggcgggtggggaaccttgttttcttgcaggaaccttgggtgcctgtagagcggctcaggccttgatgatttgagcttgtgttttctttctgtgtcagcacactgtggggttgaatagaagatgcttgccttttaaaaaatgcgataatttgacatacgaaatggaaatggctgagtgttgtcattttacaattgtggcttatcagaataatttaaaaatataaattaagcgtttcagaagccatgccgtgtggcctgctctgctctcattaatagccgaggcttcgattgttaaaggcattttgagatgggagagtcagctgctttgtgcaagaaaaaatggaaaagcttccttttaattttctcatcaaagcagaaccatagtcacaaagtcattttgggaagggcatttttattaaaaggatttgaaaagctttaccctggatggagagtgtatctcatttgatgagagtggttttctctcctagcttagtggctccatcactgaaagtctgggcatttctcctgtgttacttgtttacctaatcagatttccacatgaattctggttttcatggccaaagaggggatgtcacgatccatgcgtgcgtgtgaccaggaggaagggagggaaggctgtgtggcctgagtgtcctctgggttcctcttggcagggcctttttctctccccagcatcctcatgaactggagatgatgctggggagagaattggcttacagatttcttcccaaagaaatgatgttcaggatggcccggataggagtgtgcagcccccagcctaggagctctggccgactgtcccttataggagaggactcaggtgtcacgtcagagcttgcaggttcccgcccagcccagtctgttacagaaaccgttgtggatctttgttctctctgagccccttcatacttgggggtctctttcaggtgtgcagggaacagcaagatgtgcctcttgttcttgctgccacgcttccctgtgtcctggcgggcgggtgtggacggggctgctccttcctcacaggacctgtggcggatccggagcccctgtggtgactgcgaaggcttcgacgtgcacatcatggacgacatgattaaggtaggcagggccacactctgcatagtacccccgacctgctcctgtatcgcaggcctctcacagggtcccagcttgggcagcacaggctcttctgttgggggcagtgaggtcaggtgctgccattttgtgtggttcaacatgagcattgcttggtaccagccctgttcttggctccgtgctgtcaccctgtgtcagaatctccactgggcctgcacgtcctgtcattgcaactgcccctgccagtgcccacagcttcttttctagtggggctgactttccagaggccatctgggaaccttcttaggcagccatttccatggtgggggctccattcccgggaggggtacctgaggagattcccacaggttatttacatggtaggggttagcaactgggcctacgttctccagaaccatgggctgtcctgacagcgccagtggtccttggattcatgaggactgaagctgagagtcgtgttccatccacatgagaggggcagggtgaggagcatgggccgtgctgtgtattaaggaaatgcacgtggctcctgcttgtcatcccagcactctgggaacctgaggctggtggattgcttgagcccagacgtttgagaccagcttgggcaatatagcaagaccctgtctcgacaaaaaataacaaaaaattagccaggcatggtagtgcacacctgtattcccagctactcaggaggctgaggtgggaggatggctttagcctgggaggtcgaggctgcagtgagctgcgtttgtgccactgcctccaggctgggtgacagagcaagaccttgtctcaaaaaaagaaatctcatggacaccagaggagcgggaagcagcggtggccccgcagcagcagctatgcatcgggaggtggggcttttctgcttctgctcacctttctgctctcattttcccatagtgaacatggattgcctgtgtgtgaacacttttttaagtaaattaaaccttgtggatattttcagtttgtatcttatctgcccctcacagcagaccattgactgttcgatgcttttagaaatctccttcgtgctgagccctgcgtgctctggacccatgcgctctacgcctcctctgggcccctgctcatggcctgcccaccctggctgtccctgtcccctcttgctgatacggttctgctactctggtcctgggccagtgtctgtctctcgtgtgctaaggcagatggccgagagtggtgggtatcccacagtggggtgccaggcatttttacttctatgctttccaaatccacctgcccttccccacccttagcctggcccttccagtgccctgtcttagacctggcgccacttcacacgaccagccaggcccagggccccgggcatcctccctggcaagtcctcccatcccctgccattggtcttcgtgctcctggtgagcctccgacccaggctgtcccctgactgctgccgtcctggtttgagcccctcctgctctggccgtcctccacacggagcccacatgaacttgtagatctgagtctggccacatccccactgcaggaatgccctagctggctccccacaccacacctgcagagtggcccggctggcctgggtgccctggcctgctctcctgacttagctctatcctcaaggccccctctggcccttctcctgccggctcccatttgaccgtcacctcccctcctccaggtagctttctgcatccctcctggatgcaggtgcccccagcctgccgccaggcaccggggctgtactgtcacgcatttatccctccctgtggcccggggcccacctgtcggggccacacagctgtggtggtcaccaagtttctaggtgctgggtgttctcaccagtgatgtagatatgtggtcctcagaaggcttgagacaggcagcaccaccccatcttaaaaatccggagagcgaggctcagagccagcggtgcctggggagccactgatgagagagaagtggcagagagggggcgccgctggtctgctgggcgctcggcatctttatgggagaacgcacaccccttgtgactgcagtcagtgggagccaagccggggagcggtacctctgtctagctgccggcctgtctctgcagcccccaggcccccttctgttcgcagcgtgccctggacttcagggagagcagggaagctgagccccacccgctgtgggagtacccatgccgcagcctctccgagccctggcagatcctgacctttgacttccagcagccggtgcccctgcagcccctgtgtgccgagggcaccgtggagctcagaaggtgggtgcagagagggctggggggcagggaggggctgctgcttgcccttggagttctcacccccgtggtgagcacagctggcctgggagacgctgacacgtggagggggtattcgtcctccccacaaccttgcccttccctgtcagagtggccctgcgcgtgtggtggttcccacggtcctgtgtgtgccactggtggaggagccaggaagggctctgctccccctctacagctgaggctcccttgttggatcacagctcaggaagatgggagcttacttcctgtggtcaccgatgcaccattttcctgaaccctcctgggagctgaagcaggtcagggtcagcaagtgctgcttgcgtccagggacgggcagccctgtcctgctccggccctcaccccaccctcgcccgaggagtgacttctcctggaagcacctcccaactcggggcaggcagccaggcagggcgggcgccatcacctgagctcccagggttgctgtctggggcatcagaggggccttccggccttcagtgccaggctgtgcctcaagctcccccagaccctgcagccacaccggccctgccccatgtgtggcccggctgcagggctcgggttggctcaggtgggggcttggctgcggctcttctggctggggtttttctgaggaacgtttatgtaactgcagcactaggaactcccggcagggcaggaaggaagtggggaagaccacaggtttctggaaagccgcaggagctgcagctgttcccccgctgcctcttgtgtgactacttctgctgggcccccctctccttgacaggcccgggcagagccacgcagcggtgctatggatggagtaccacctgaccccggagtgcacgctcagcactggcctcctggagcctgcagaccccgaggtagtgcctgcgcaccgggcccagtgtgcgtgcagaccctgagagcaggcgccgcctggggaggcctccctgcccccatgctctgggtgtttctgtcacaagttcttcgggccagatgatgacccctcagtggtcctgggccatctggcccctgagcagcttctctctgctgcgagctgcctgggctggaggctggctaggaaggaggctcaggtgccagggagccctcaccatcttcctgctcttcttcctacaggggggctgctgctggaacccccactgcaagcaggccgtctacttcttcagccctgccccagatcccagagcactgctgggtggcccacggactgtcagctatgcagtggagtttcaccccgacacaggcgacatcatcatggagttcaggcatgcagataccccagactgaccactcttgagcaataaagtggcctgagggctggg

SEQ ID NO: 15755 - DNA, 31701 bp, Homo sapiens
agaaggtttccggttccggtgtaacgttcgggctccgtctcaggggctgaagtttgtgaggtgagtagtggccccgggcccacagagggtaattccagtccgcgccactgtggccggggactcagtccaaggggaggaccgaagcgggagggttcagcgggaaggagtgtgaaaggagtacctggtttggtgggagaagaggttggaatgagattgttgagaggaaaagggcgggggcgggaaggagaccgggttgggagaccagctctggggtgaggagtttaggtagaacaaggtagagtaagagactggttggagtgacggagagagtaaaaatgaagattagcgggggagtggggggctgcagagggaaactcaggttgtagcaaacaagagcacggagtaaggaattccttctgaagactggatttggattctgctgcctgctcattgagaggagagatcattgtacctcgctttccttccgcacccccactacccccgcacctcgcagttattgttgagcatttgattagtgacaaggctaattaccgtttgaaacttttttatccattggctgtttagtttgcacgtcatcttatggaggtaacagtggcacctcatttattgctttgggctttcaaattgcttatactttctagcctatcattcaattctagtggaatataagacccgttaaggtgaggactcttgttagttttgctcactgttttatgtatccaccgcacctagtacattgcttgacacttagtagttactcaataaatatttattgaatgaattaggatgtaaatatggcagtactcattttgtaagatggtaaactgtggctccaaagaattacttaacttgcccaagggcttgtaaatggtggggctcagtgtcccaactgtttctgtgtgaactcttgttttcactttctatggcatctggatatgccgcttttgtgcaatacatgtgtaatatgtagaaattggtacgctgtatgtctactcattgtggggtaatagaaccaccatagaattactcacgtaacttgtcactgaggcagaaaatctttcagtcttagtttcatcacttcaatctactagcttcctttggatataccaaaagtgagtctatttggcatcaagtcttatagactctagtatagaggctaaacttaccaagaatgtagaagttaatcagactggattttttggagaaaagatgtcttaaaacatcttgaaagatgattcccagatctttgataagtggcactgctgggaatagctgagcttggaaattgaggtcagtcaatttattgactcccatttagacaccttttttttttttccccgggacggagtcttgctctgtcgcccaggctggagtgcagtggtgcgatctcggctcactgcaacctccgccttccatgttcaagggattctcctgtctcagcctccagagtagctgggattacaggtgcaggtcaccacgcccagctaatatttgtatttttaatagggatgcggtttcaccatgttggccaggctggtctcgaactcctgacgtcagataatccacccgccttggcctcccaaagtgttgggattacaggcgtgagccaccgcacctggcttttttttttttttttttttttttggagacacagtttcactctgtcgctcaggctggagtgcacatgattttggctcaccgcaacctccgcctcctgggttcaagtgattttcctgcctctgcctcataagtagctgggattacaggtgcccaccacctcacctggctaatttttgtatttttagtagagacaggtgcagtgggtcacgcctgtaatcccagaactttcggaggtcaaggtgggcagatcacttgaggtaaggcattacctggccgatatggtgaaaccgtgtctttattaaaactacgaaattggccaggcgtggtggtgcatgcctgtagtcccagctacttgggaggctgaggcaggagaatcaagtgaacccaggagatggaggttgcagtgaaccaagattacgccactgcactccagcctgggcgacggagtgagactctgtctcaaaataaaaatgagggtattcttttctgagctgaaggatcatcaagtcagctgatggagaccctgtagattgaacatgataattacctgtatgcagaattcccactgggatgaatatgaccacagagaaatgtgacagaacattctttttttttttttttgagacggagtcttactctgttgcccaggctggagtgcagtggcgcgatcttggctcactgcaacctctgctgcctgggttcaagtgattctcttgtctcagcctcccgagtagctgggattacaggcgcctgccaccatgcccagctaaatttttttgtagtttttagtagagatggggtttcaccatcttggccaggctggtcttgaactcctgacctcgtgatccacctgcctcagcctcccaaagtgctgggattacaggcgtgagccaccgcgcccggccagaacattcttaaagatcatgagatttaatttaatatctaagatgactgacctggataaaccctcttttacttgcataccttaaaagaagggaatcctacataagtcagggttgggttagggaatgcctgcctggaagtaggaagaatggaaaagctggcctctggatgggcttttttagttctgttttagtgttactaggtttgcaagtccttgttgatatgacaggatcaagaaagaagctagaactaatttctcagacttagcttattcacagagtttgtttattccgcagatttcattgatcaacttaagagttagaattaaaaatcaaatgggatctctttctgctttgagatatggttcttggggaaaatatttgccttcaaatgagttggaaaaacttgtctagggattgagaatagggctggggaatgcattcctgatgtactaaccatttccctggatcactttagtcttttttttttttgtagagagagtcttgctttgtcgcccaggctggagtgcagtggtgcgattttgacttgttgcaagctctacctccctggttattcccctgcctcagcctcccaagtagctgggattacaggcacatgccaccacgcccagctaatttttttgtatttttagtagaggcagggtttcaccatgttggccagactggtctcgaactcttgaccccaggcagtccatccaccttggcctcccaaagtgctgggattacaggcatgagccactgcacccagcccactttagtcttttcttattctctaacttgtctcttttttttttttaggtgtagtattgagtcctgtttgagctattgttctctttttcctgaaaaatggcactgtcaaagagggagctggatgagctgaaaccatggatagagaagacagtgaagagggtcctgggtttctcagagcctacggtggtcacagcagcattgaactgtgtggggaagggcatggacaagaagaaggcagccggtatgtacctttctgcatcttttatcttaacatatagggtgaccccaaacactgctttgaacttcctcaaaattctctctgttgggaacatctaaaaaaatggcaggccatattttattttcacctgtattatagtgaaaataggctaaataataatttgctttttctcttaattgcttattttttatgttatttatgatagattttaaatcttcgtttggctaccatactgagtcacctaagttagatttacttaggaagtatgcttaagtcagataggcatattcagattcagactgaacatctcaacatacaaaaatctttatgaaatacatgaaaaagcttgaaggaggtagattttgttaatggtaggcttctacaacttgctatttgggaaaggtgagggtggttattcatctcaaacttgatgttcaaggtaaacaggttgctctaactgcaccacttcccacgccaaaaaattataactattttcacctcacagggcaaggtcatttagtgtaagagagatgggaatcctacaaaaaacttaaaatttgtttcactcctgggaataaaattccagtgttggtacctgttataggcctagtattagactgtgtactcttacctttccaaccctaccaccgcctttcttcctgtcagatcatctgaaaccttttcttgatgattctactctccgatttgtggacaaactgtttgaggctgtggaggaaggccgaagctctaggcattccaagtctagcagtgacaggagcagaaaacgagagctaaaggtaggttacaatttactgtctaatgagctcaggactgttttgaatggtaacagagttgctgagcttaccagttcacacgttgatatcctctatttagagcagcaaatgttcaagagaggtacttagacattagagtaggagagatgaattagtgtcatcaccatctgaactacctctaagttcatgggttgaaatatccaaagaaataattggcagctttgtctttttttagataacaggagttttgattctcatgtttctccatatttcctttttttccttcttactgttacttataaactgattgctctaagattttatctttgatttatttgaggcctaataagttgttttagaatgtgactccactggtacctgagctgtacacctcattgttgcctctttgtagaggtttctctgcaatgcacttgtagatagaataccaaaaaataactattatttattatattcttgagagcttaccatttgctctatggcatattgctggtcctctgctgccatgagtgaaacacttggaggagttgtcagtacccccttaactactacactttttattctgtagttgccgactgatcctggcctctttcagtattagcagtatcaagtagcctatttttctactcatttcccagtatctctctttaggagaaaaaaaaaagttctgtgactcctatcaaaccttccaaagttcttctgataccttggctatcccattacttttcctgagggaaaagagtgaataagtaatgtctgcttggtcccctggccaggctatggaactaaaaaaaaaagcagagagatttgtgccctttgtgtttggagcattgtagggtggtcagagaaggagagatagtccttgccttaaaacaatttgtaatttgtcaggcagtgtggcatgtgcctgtaatcctagctacttgggaagctgaggcaagaggatctcttgagcccaggagttacaatttagaagaggcaggggtatcacaaaatatatattcacgtattataaaatctaagtagcagtttcatgtaaattttagggttggttatagaatttcagacctatgttgaattttgttatatttaaggtggaatgattgatccacagtatacacagatctgtacagtgaagattatgtcacgatagggcatacttctttttttttttcctttttttttttctaagggtgagtctcactctgtcgcccaggctggagtacagtagcgcaatcttgactcactgcaacttccacctcccaggttcaagtgattctcctgcctcagcctcctgagtagctgggattacaggcacatgccaccatgcctggctaatttttgtatttttagtagagacggggtttcatcatgttgatcaggttggtctcgaactcctgacctcaagatctgctcgcctcggcctcccaaagtgctggaattacaggcatgagccactgcgcctggccagtagggcatacttctgtatgagtgctgagggcatgctgtgaatgaagtgactacattgggtgggattaataaaaatggcttcttgaaggaggtgtctagatagccttgggatacgggtcccatttttggtccattcaggtccccaccccacacaatatattatgggagagtcctttttcttgaactgtaggagttccaggaagcgctcgcccctggccgaggatatgtccttgcaaaacacgagccctcctagtgaagaggggatgtcacccaaagcctaccaccggtgtgtacatttgctttttcccattgtcccttccagttggccactctcggtcctgttaaattcaccttgcaaattagtcatcatatttgagtttccattgtttgatgaaaacaaagtgttaatggggattactgaagaagaaagagaaagcccctgtcctggaagagcttagacttagttgggaaaactatactaacattgaaatacttaacacttggcaaacagaatatcaacaatgtaatttaacctaatatgaaccaagctcttacacgctaagagaatgtgaaacaaaagtttaatcagagtgggataggttataatgaggaaaacttcttggaggaggtgagttttaggcaggatttggaacaggggttgtggaaaagttgagagaaatcattataaatgtgagcagtagcatttgcaaagaccttgagatgggaacatttataagaacatgggaatgaaatttgtttgactggattaggagaatgttgaagttgggtgagatggagagtctagtagaccctgcttctggcaggtggctatttgcaaggttgtgtcatattcccctgggaatagccagaaaatgctggtaggggctaggataattcttcccttctccccacggggagggatacagcttttctttcatcttgggttcccttaggaggtgtttggtgatgactctgagatctctaaagaatcatcaggagtaaagaagcgacgaataccccgttttgaggaggtggaagaagagccagaggtgatccctgggcctccatcagagagccctggcatgctgactaagctccaggttagtgattagggactggaagcaaagtggttttgtgagttgaagaagcaaaaggtgcatgggtctgtatttattgtggaattttttttttttttttttttttgaggtggagttttgctcttgtcacccaggctggaatacagtggcgcgatctcagctcactgcaacctccgcctcccgggttcaagcaaatctcctgtctcagcctactgagtagctgggattagaggcacccaccaccaagcctggctaatttttgtatttttagtagagatggggtttcaccatgttggccaggctggtcttgaactcctgatgtcaggtgatgcactcaccttggcctctcagagtgctagaattacaggagcgagccactgcgcccggctaattttttgtatttcttttagtagagacagggtttcaccatgttgggcaggctggtcttcaacttctgacctcaggtcatctgcccaccttcgcctcccagagtgctgggattataggcgtgagccagcgtgcctcgccttattgtgatcttgatttgaattagtgtttagcatttggggtaaacttttttttttgagatagagtttcactctgttgcccatgctggagtgtagtggcgtgatctcagctcacggcaacctccacctcccaggttcaagcgattctcctgcctaagcctccggagtagctgggactacatgcgaacaccactacgcctggctaatttttgtatttttagtacagatggtattttgtcatgttggccaggctgctctggaactcctggcctcaagtgatctgccacctcagccgcccaaatggctgggattacaggtgtgagccaccatgccaggccagcatttgggaaaattttatttcctgctttatgttttagcgttctttgatttgaccaggagtattctaggtaagggtattgaaattgccatttactgtggcaagcaaagtgtgttatgtacattatttgcctaattacctatgtcgttgagtcattgagaaaattaaatgaaatgatcagaactcatcttaatgacagaggagactctccaaacataatgcaaagaagatataatccactgataaataattttaagttgactttatttttttttaacaggaagtatttgtgttttttcaattggcattgttaaataataccacataagtgtttcttttaccatttaatatttgaggggggtaatagaacatatacagaaatatgggtgggtggatttgcatatatgtgatatttacagaaggaaagaaatggattttttttgtgtgtgtgtgtgagatgttctctctgtcactcaggctggagcgcagtggtgcgatctcggttcactgcagcctctgcctcccaggttcaagtgattctcctgcctcagcctcctaagtagctgggattataggcatgtgccaccacgcacggctaatttttgtatttttagtagagacagggtttcaccatgttgaccaggctggtctggaactcctgacctcaagtgatctgcctaccttggcctcccaaattgctgggattataggcgtgagccaccgtacctagcctgtttttgtttttcaggcaaggtctcacttttttgtccaggctggagttcagtggcgagatcttggcttactgcaacctctgcctcccgggcttgagtgatcctcccaccttggcttcccaagtagctgggactacaggtcaccatgcctggctgatttttgtattttttttaaagattgagttccaccatgttgcccaggctggtcttgaactcctgggctgaaatgatcctcctgcctcagcctcccaaagtgctggacttacaggcgtgagctaccacgcccagccaattattttcttttttggggggtgggggatggagtcttgctctgtcacttaggctggagtacggtggcgcgttctcggctcactgcaacctctgcctcccgggttcacgccattctcctgcctcagcctcctgagtagctgggactacaggtatgtaccaccatgcccgactaattttttgtatttttagtagagatggggtttcaccatgttagccaggatggtcttgatctcctgacctcgtgatccacccgcctcggcctcccaaagtgctgggattacaggcatgagccaccgtgccaggcccaatgatgttttttatggagaatggggatggacgtattcacaacatatccttttgttatgtttctttcttttttttttttgagacggagtctcactctgtcgcccagagtggagtgtaatggcgctatctcggctcactgcaacctccgcctcccgggttcaagctattcttctgcctcagtcccttgagtagctgggattacaggcacgcgccaccacgcctagctaatttttttgtatgtttagtagagacggggtttcaccatgttggtcaggctggtctcgaactcctgacctcgtgatccgcccggctcggcctcccaaagtgctgggattacagacgtgagctgccaggcccagcctgtaatttttcattttattttattttattttttgagacggagtctcgctcttgcactgttgcctaggctggagtgcaatgccgtgatctcagctcactgcaacgtccgcctcctgggttccagcagttctcctgcctcagcctcctgagtagctgagattacagaacgtgcatcaccatgtccagctaatttttgtatttttagtagagatggggtttcaccctgttagccaggatggtctcgatctcctgacctcgtgatccacctgcctcagcctcccaaagtattgggattacaggcgtgagccaccacgcccagccctgtaatttttaatttttttattttctttctttctttacttatttagagatggagtctccccctgttgtccaggctggagtgcagtggcatgatcttggctcactgtaacctccaccttctggattcaagcgcttctcctgcctcagcctcctgagtagctggcattacaggcgcccaccaccacacccggctaatttttgtatttttactagagacggtgtttcaccatgttagccaggctggtcttcagctcctgacctcaagtgattcgcccacctcagcctctcaaagtgctgggattacaggcgtgagccaccatgcctgacccttccgtaatttttgaattttgaatatatcacctattcaagaaaaaatgttaaagacaaatgtttaaaaatatcttgaagcagtttaagaacaggtctgttttgcaaaatgtaagaggagttgtttggccataccctcaaagcttatcattctgaacttctttaggacagaaggggtttatagagactagggagcaggtctttgcaccatcgtctcttgtttcccaaactagtagttcaagtactaatatcatgattttttaaaaaaaattaagtataggctgggtgcggtggctcacacctgtaatcccagcactttgagaggccgaggtgggcggatcacgaggtcaggagatcgagaccatcctggctaacagggtgaaaccccatctctactaaaaatacaaaaaattagccgggcgtggtggtgggcgcctatagtcccagctactcgggatgctgaggcaggagaatggcatgaacccgggaggcagagcttgcagtgagccaagatcgcaccactgcactccagcctgagtgacagagcgagactccatctcaaaaaaaaaaaagaaaattaagtataatattttgtgtaggttctgttaggtttgcatgcattatttaagtggttaacactagacctgtaaggtaggtactgttttcttcccccttctagacacttaggaggtttagagactaagttccttatccaagataacaaaggcattaagtggcagagttaagattcaaactcaggtttctctgactccagagtctcaatcatcacactatattactacctaatatgctaatcttgctttaggaacatgggttgaaaaattccagtgctcacttatcttgactaaattttttgcactgtggtgcaggcagaatgtggtatagtcattcaaaacattttaagtgtctagacctgagagccttgtgggtttaaaaacctgaatgggagaagtaagaaggagaaattaacagtttttcaatttttttcctggagagcagatcaaacagatgatggaggcagcaacacgacaaatcgaggagaggaaaaaacagctgagcttcattagcccccctacacctcaggtattgtgtctagattactctgaacagaataatctttggcacagaatttcttgccatccactcaaaatgagagactagaagaggtgactacatgtttcacttcataatcatctgctacagtctaccatgatgtgtgtgtatatctgtgtgtatgtatgtgtgtttgtctgcctgtcttaattcctctgatttctttttctctatctcacagccaaagactccttcttcctcccaaccagaacgacttcctattggcaacactattcagccctcccaggctgccactttcatgaatgatgccattgagaaggcaaggaaagcagctgaactgcaagctcgaatccaagcccagctggcactgaagccaggactcatcggcaatgccaacatggtgggcctggctaatctccatgccatgggcattgctcccccgtgagtgtctatttcatggaataccttttcatttctgaagtttgagaagcaataaatacctttgaatgttactgatctggctgggcgcagtgcctcaggcctgtaatcgtagcactttgggaggctgaggtaggtggatcacctgaggtcaggagtcaggagttcgagaccagcctggccaatatggtgaaaacccatctctactaaaaatacaaaaattagccaggcgtggtggtgcatgcctgtaatcccagctactcgggaggctgaggcaggagaatcgcttgaacacaggaggcagaggttgcagtgagctgagatcgtgccactgcgtgggtgacagagggagactccggctcaaagaaaacaacaaacaaaatattactgatcctctttttccacagaacctagatcatttctcacagtttcatatttcttaggtgtgattgattaaccagttgaattttttctcgtcttccctgttggagggtttattatcttcttatgatttatataactgagattaaggttattcatctaatgttggagctaggagtatagccaggtttccttcctggtttcaaactcagatttatccattaaaccacattgtgtgagactagatctgaggttcctctgcaactggtcaaagatgttacattttttttagcatctacagttggtctggcatcccatgagtgacataagaattcagggataaggaaagataggattataaattcatataatttataaactcatttcatttggttgtcctgtatactgaaatatccactttgatatttttaatcaagatactattggcagggcgcggtggctcacacctgtaatcccagcactttgggaggccgagactggcagattgcttgagctcaggagttcaagaccagcctaggcaacatggcaaaaccccatctctctaaaatatacaaaaattagccaggcatggtagagcatgcgtgtagttccagctacttaggaggctgaggtgggagaatttctttgggcctgggaggttgaggttgcaatgagctgtgattgtgccactgtactttagcctgggcagcagagtgagaccatgtctcaaaaaaaaagatggtattgctcactgatgagattgttccctagaattattttattgtcctttttgttgttgttgttgttgagagggagtctcactctgtcacccaggctggagtgcagtgatctcggctccctgcaacctctgcctcccaggttcagtagctgggactacaagtgcccgtctaaattttgtattttttgtagagatggggtttcactgtgttgccaaggctggtcttgaactcctgggctcaagccatccacccgcctcagcctcccaaagtgctgggattacagtgtgagccaccacacccgtccatccaaataactcttatagagaaggcactgcagcctcaacttcctgggctcaagtgatcctcctcaacctcctgagtaggtgggaccacaggtatatgccaccgcacccagctaattttaaattttttgttgagatgcagtctccttgtgttggccagactggtctttaactcctgggctcaagtgatccctctgccttggcctcccaaaatgctgtggttccaggcttgagccaccacgcctggctttattttgttttttgcttgccttaatgttccatacaggatttatttctttgcgggctatttttcaggaaggtggagttaaaagaccaaacgaaacctacaccactgatcctggatgagcaagggcgcactgtagatgcaacaggcaaggagattgagctgacacaccgcatgcctactctgaaagccaatattcgtgctgtgaagagggaacaattcaagcaacaactaaaggaaaagccatcagaagacatggaatccaataccttttttgacccccgagtctccattgccccttcccagcgccagagacgcacttttaaattccatgacaagggcaaatttgagaagattgctcagcgattacggacaaaggtatctggcttagagtataacacagaatttggaaaaagttaagaagctgacaagaaaacattgttaaatctctgtgttctaggaaattagataaataggtcatttaaagcagcagtcctcaacctttttggcaccagggacttgtttcatggaagataatttttcccctggagtaaggatggtttcgtgatggttcaagcacatagcatttattgtgtactttattattattatttttttcgagatggagtgtcgctcttgttgcccaggctggagtgcaatggggcgatctcggcttgctgcaacctttgcctcccaggttcaagtgattctcctgcctcagcctcccgagtagctgggatcacaggcatgtgccaccacgcctggctaattttgtatttttggtggagacggggtttctccgtgttggtcaggctggtctcgaactcctgacctcaggtgatctgcccactttgtcctcccaaagtgctgggattacaggcgtgagccaccgcccccgccttttttttttttgggcggggagggggatggagtcttgcactgttacctgggctggagtgcagtggtacagtctcagctcactgcaacctctgcctcctgggttcaagcaattctcctgcctcagcctcctgagtagctgggactgcaggcatgcgccgccatgcctgacgaattttttgtatttttagtagagacagggtttcactatgttggcccggctggtcttaaactcctgaccttgtgatctgcctgccttgacctcccaaagtgctgggattataggcgtgagccactgtgctggcctatttctattattattttattgtaatatatgatgaaataattatataactcaccataatataaaatcactgggagccttgagcttgttttcctgctgaaatggtcccatttgggtgtgatgggagacagtgacagatcatcaggcattagattctcataaggaatgtgcaacatagccccctcacatgtacagttcacaatagggttcgcgctcctctgagaatctcatgccaccgatgatctgacaggaggtggagctcaggccataatgcaggtaatagggagcaatcgtaagtacagatgagactgttggcttgcctgctgctcacctcctgttgtgcagcccagttcctaaaagactgttgggttggggacccctgatttaaagcaatgaatactttgaaaaatgtgctggacaagatggctcaagcctgtaatcccagcgctttgggaggccgaggtgggtggatcacgaggtcaggagttcaagaccagcctgcccaacatggtgaaaccccgtctctactaaaagtacaaaaattaaccgagcgtggtggtgggtgcctgtaatcctagctacttgggaggctgagtcaggagaatcacttgaaactggaaggcagaggttgcagtgagctgagatcgcaccactgcactccagcatgggcaaaagagcgaaactccgtctcaaaaaatatatatatatatttattaatataatacataatttttttagcagattttacttcctaattcgtttctacataagtggaaatattatgaaattgagtttgaaaattctccacatacaactaagtggagggaaacaatttgaaacattctgagtgactaaggaaggcttgcctgtagttaaaatttaatgagacagtacacctggagagttgaattgattgtatattgaatgacctttgccgcctttttatcctctcaaagtgaggttttcataaaattccttttttttttttttttgagacggagtctcgctctgtcacccaggctgcagtgcagtggcacgatctcagctcactgaaagctccgccttccaggttcatgccattctcctgcctcagcctgctgagtagctgggactataggcgcccgccaccacgcccggctaatttttttgtatttttagtagagacggggtttcaccgtgttagccaggatggtctcgatctcctgacctcatgatcctcccgcctcggcctctcaaagtgctgggattacaggcgtgagccaccacacccggccataaaattctatttctgcgtatttactgcaggcatatactgtggagtgcagggaggggttgaaggtgagatctatgtatatgaactaaataaaggataaaataaagcagaacaactcctttctaagctttcagaaattatgaacttgttgcgttaggtgtaaagagttcaacggggaagtgttttaaaatttgggattcttggccgaggtgggcgaatcactaggtcaggagatcgagaccatcctggctaacatggtgaaaccacttctctactaaaaatacaaaaaaatgagccgggcgtggtgatgggcgcctgtagtcccagctactcgggaggctgagtcaggagaatggcgtgaacccgggaggtggagcttacactgcactgcactgcagcctgggtgacagagtgagactccgtctacaaaaaaaaaaaaaaatatttgggattctggccgggcacagtggctcatgcctgtaatcccatcactttgggaggccgaggcgggcagatcacctgaggtcgggagtttgagaccaggctgagcaacgtggagaaaccccatctctactaaaaatacaaaattagctgagggtggtggcacatgcctgtaatcccagctactgaggaggcttaggcaggagaatcgcttaaacctggaaggtagaggttgctgttagccaagaccatgccattgcactccagcctgggcaagaagaacgaaactccgtctcaaaaaaaaaaaaaaattgagattctacacattctgttttctatgactccaatttatctttctgtcttggattatcttgtttttaggctcaactggagaagctacaggcagagatttcacaagcagctcgaaaaacaggcatccatacttcgactaggcttgccctcattgctcctaagaaggagctaaaggaaggagatattcctgaaattgagtggtgggactcttacataatccccaatggctttgatctgtgagtttgttttagtacctttttaaaaaaacagtttttaatcagctgagtttaagactcaagttaataccttttagtaaagctatggttttagtgggaaggatggtactcattcattaattaaaatttttaaatccaagagagataagtaactgtacacaaggtcctgttattttttttttttttttttttgagagggagtctcgctctgtcacccaggctggagtgcagtggcacgatctcagctcactgcaacctccacctcccgggttcaagagattctccttgaattctccttgaatctcagcccctcaagtagctgggactacaggtgtgtgccaccatgcccatctgctttttgtatttttgatagagacagggttttgccatgttggccaggctggtctcgaactcctgacctcaggtgatccgcccaccttagcctcccaaagtgctgggattacaggcgtgagccactgcacctggccaagctcctgcatttgtaagtgatgtatcatatatataggctgtttttagcttttggggttaatgtaggataaccagggacacaatctacaaaagcaaagtctagaattctttttgctctgttacacattgttgcctgtttttagcattattttccttaattacattcttttgctacgtattataggtgtttacatttcctaaagatctcattgtgatagagcaaggattattagttggtaggtgagataatagtaaatatagcatataaggctgggctcggtggctgacacctgttattccagcactttgggaggctgagggctgaaggattgcttgagcccaggagttaaagaccagcttgggcaatatggtgagacctcgtttctacaaagattaaaaaaaaaaaaaaagtagctgggcatggtggcttgtgcctgtagtcctggctacccaggaggctgatgtgagagaatcacttgagcccaggagggtctgtgctgcagtcagctatgatcatgaccactgcactctatcctggacaacagggtgaaactctgtctcaaaaaaaaaaaggatataagacacatttgaagagctttaaatatatctgctccatccattttttttttttttttcctgagacggagtttcgctcttgttgcccaggctggagtgcagtggagcaatcttggttcaccacagcctccgcctcctgggttcaagtgattctcctgcctcagcctcccaagtagctgagattataggcatgcaccaccacgcctggctaatttttggtgtttttagtagagacgaggtttctccatgttggtcaggctggtcccaaattcccgacctcaggtgatccacccgcctcagcctcccaaagggctgggattacaggcatgagccaccacgcctggcgttttttttttttttttttttttttaagacagagtctcactctgttgcacaatctcggctcgctgcaacctctgtctcctgggttgaagcagttcttctagctcagcctcataagtatccgggactacaggcaaataccaccacacctggccagtttttatatttttagtagacaagagtttcactatttggccaaactggtctcaaactcctgacctcaggtgatccacctgccttcatctcccaaagtgctgggattataggcataagccacatcacctggccctgctccatcattctgatacatggctttagtagattttgtcttagcctttcgttgccccttctttgtcagccactgttccagggacttattgtcactaatgagagaacatagcgtctgtcagctgtggcatggtagaaaaaaggttgagaatgattgctgtggagagtgtgttcaaccatagagggactcagttttctcatcatgaaaattatgtgtaatttaactatatattttaggtacctaaatgctattttaggtatatcaagcacaagaacccattatagagagtgggttttttcattgtatttctgagactcctctcttagaatcatctctacccgcatatcgtgttttcttttcttcctacaattttagtacagaggaaaatcccaagagagaagattattttggaatcacaaatcttgttgaacatccagcccagctcaatcctccaggtaatgtatagattcctgaatcaagtctctagagcagcattacccattggaaatttatacagtgaggaacatgttctgtatctatgctgttcaatacaatagccactacccatgtgtaattcttttttttaattcagtttttttcctgacaatagtttgttgtttgaccagtgaacatacattttaagtgcatattcctgtgcttagaatttcatgagacagccaagcatggtggctcatgcctctaatccaaacactttcggaggccaaggcaggaggattgcttgaggccaagaattcaagaccagtctgggcaacacagtgagacccatctcaaggaaaaaaaatttggctgggtatggtggcttatgcctgtaatcactgcactttgggaggctgaggtgggcagattgcttgagctcaggagttcgagatctaggcaacatggcaaaaccccatctctacaaaaaataaaaaatcagccgggcatggtggtgtgcatctgtagtcccagcctcttgggaggctgaggtgtggaggatggcttgagcctgggaggtggaagttgcagtgagctgagatggtgctgctgcactccagcctggatgatactgccagaccttgtctcaaaaaaaaaaaaaaaaaaaaaagaagaaagaaagaaagaaaaaaacccaaaatttcatgaagctttacatttacagttccctggttgttcctaggaaagagccctcagcttgctccttttatagaaccacatgttgttgtggcatccacagctaaatgcaaatgcaagagccaaactcttgggttggtgtgttattagatgcgatatgctccactacccactgtgagggatgctaattccaaagggctttttgttagtttcccaaagttgaaactgggaaacaaagttgcttctattttttttttttttttttttttgaggaggagtttcgctcttgtggtccaggctgcagtgcaacggcatgatctcagctcaccacaacctctgcctcctgggttcaagcaattctcctgcctcagcctcctgagtagctgggattacaggcatgtgccaccacgcccagctaattttgtatttttagtagagacagggtttcaccatgtttggtcaggctggtcttgaactcctgacctcaggtgatctgccagccttggcctcccaaagtgctgggattataggtgtgagccaccgcgcccggccttttttttttttttgagttggagtttcgcttttgtcacccaggctggagtgcaatggcactatctccgttcactgcaactttcacccccctgggttgaagctattctccggccttagcctccggagtagcttggattataggtgcctgccaccacacctggctagtttttgaacttttagtagagacagggttttgccatgttggtcatgcttgtcttgaactcctgacctcaagtgatctgcccacctaggcttcccaaagtgctgggtttaccggcgtgagccaccgcacctggccctaattttgttttctacatttgccaggtatcattgaatgagggggtttaacagcttaaaggaaaacaactaagaacactacttaagaaagataagaggccaggcgaggtggctcatgcctgtaatcccagcactttgggaggccgaggcgggcagatcacgaggtcaagaaatcaacaccatcctggctaacaaggtgaaaccccgtctctactaaaaatacaaaaattagccagacgtggtggcgggtgcctgtagtcccagctactcaggaggctgaggcaggagaatggtgtgaacccaggaggcagagcttgcagtgagctgagattgcgccactgcactccagcctgggcagcagagcgagactccgtctcaacaaaaggaaagataagaatgttttttaaaaacatagccatattgccgggcaccaggcctgaactgattttaatcttactgatcccttattaacgagttttcttcattttctatttaaagtttatacacacacacacacacacacatgttttttgaaatggagtctcgctgtgttgccaggctagagtgcagtggcaagtggcacaatctcggctcactgcaacctccacctcccggattcaagtgattctcctgcctcagcctcccgagtagctgggactacaggtgcgtgccaccacgcccagctaatttttgtatttttagtggagtcagggtttcaccatgttggccaggctggtctcgatctcttgacctcgtgatctgcccacccgtgcctcccaaagtgctgggattacaggtgtgatccaccgcacctggcctcaatatattttttacataaaatgtttataatagagttgggtctcacttggttgtccaggctggtctcgaactcttgggctcacgccatcctcccaccttggcctatcaaagtgctagaattacaggcataagccactgtgtccagcctaaagtttcttttaatgatattgatatttacctaggtttctttaatatttttattgctgtccgggcctggtggctcatgcctggccaacatggtgaaaccccatctctactaaaaatacaaacattagccaggcatggtggcgtgtgcctgtaatcctagctactcgggaggctgaggcaggagaattacttgaacccaggaggcagaggctacagtgagctgagatcgtgccattgcactccaacctgggtgacagagtgagagagagaaaaaaaaaaaatatatatatatatatatgtattcttactgctttggtatactaatatctctgcctgacagttgacaatgacacaccagttactctgggagtatatcttaccaagaaggaacagaaaaaacttcggagacaaacaaggagggaagcacagaaggaactacaagaaaaagtcaggctgggcctgatgcctcctccagaacccaaaggtgcatttctcagtggcctcttctgttaaaaagagtggcaagtttatgtctttaatcctggaggaactttaacatctctgtgtttgagtgatttctgtttctaagaattattcttggggtcctttttctccaagttttctaccatcttttcatattaagataggtcaacacattcattatagaggccatttatggcttatttttaagcatactgatcatacaacactctggttttcctggaagaatacaggtcttgaaattcatggagatagtagttgcagtatttgcgtagactttttatgtacataattcttaatgttttaatttttacaatgaaagtacaggataaaaaacttgaccctgtagttacattctcgttcagcagtattttgactgagcactattatttataagctctttcactagatgctgtgatcagtgtgaaaaatatgaaaggaattaagttccacgtccttcataaattttcagataatgtaaatgcataccaatcttcaacttaattgtgtgaacttctgcaaatgctgaagtgattggatgggattttcaagataggagttattggaggaagtgagtttagagcagagatttgaaataggtaaataatatgaattggtatggaagaaataacaagttactccagctggagaagtgacttcaaagactgattgttgtcctctcttcactgcagtgagaatttctaatttgatgcgagtattaggaacagaagctgttcaagaccccacgaaggtagaagcccacgtcagagctcagatggcaaaaagacagaagtaagtgccatgggattgggtggaaacctcgggcaagtacctttcccaaactcttctggggggtccatatttggagggaggggagagttctccgttgctctctctttccctcagccctgcctctgatcttcaatgcctttctcacttgtggatgtccttcctgtcacgacagagcgcatgaagaggccaacgctgcccgaaaactcacagcagaacagagaaaggtcaagaaaattaaaaagcttaaagaagacatttcacagggggtacacatatctgtatataggtaggtgtccatactgggccaaacttccccttagaattactaaaacattttccaagtgcttgaggcagaatcattgtggcctaaaagcatacctaacaccagttcctactctcttttaatgaccctagtgtggatcaagagctagtaaatcttgtaaaatagcgagagttaatgacttatgtttatggttacccagttcttccctctcaagtcttctttttttttttaccagaatattagttctgaacaagtcaatatacttgttcaggccaagatgtgaactaaagattgtatgtcctttgagaactataaaatatcatcctatttcttttttttttcatctttttttttttaaatggtctgagtttgcttccaacatccatggaagcattacaaattttctttcctccgtagtcatatccttaccctgatgtattgctgtgtttcatcctcactccaaaatgcattttatatgttgtaaatatttttctacctttgtgttgatttaatgtttttattcttttatgttgagtacatgtgtatcttctatttttaaaatgtgcttatttctattaactagttctttattataaaagtggtacattatcacaaaaatagtgaatgcttattaagatttaaaaaattgtctgacaacacagaagaatacttactcaaaatgtctcctttctattctctgatcccttagaaccactctctttaggtaattgctattaacagtttttcacatatcctcctagaaaattttcatgcctatatagtgatcctatatatatattttatttatttatttatttattttgagacggagtttcagtcttgttgcccaggcaggagtgcaatggcgcgatctcagcgcactgcaacctctgcctcccaagttcaagcaattctcctgcctcagcctcctgagtagctaggattacaggcacgcacccccacgcccggctaatttttgtatttttagtagagatggggtttcaccatgttggccaggctggtcttaaactcctgacctcgtgatctgcccactttggcctcccaaagtgctgggattacaggcatgagccaccgcacccagccaagtaatcctatattataagagtctaagggtctagaggacaaaaagtctgtaggtctttacattgtcaagaacaatgagattgtaagtatttttggatgatagtaaatacctctccctgactcttagagtaaactttggttagtaatgtaatggttaatgtaaagtgctagactttgaagaaatgtaagagtgtggaaatatttctagactcatcaactctaccttttaagcattcatctatttgtttactccagaggcctttgtttatagagaggaaaccattttggattcatctttttacttgccactccattcaggcagctgctgatgctaaaatggaagacataactaaactttcccttctccagagttcgaaatttgagcaacccagccaagaagttcaagattgaagccaatgctgggcaactgtacctgacaggggtggtggtactgcacaaggatgtcaacgtggtagtagtggaagggggtgagtctgaaaaacttgagggagactgtccccagacaaccctaggcttagagtgattagcattgtggggagaaaggagaaaaagatcgtattttagtgccatacctgatataatatgctaggtctctgcttctgtgttttttggagtagaaggccctaagatgtggttcctgagattgcttcaactaccacattaatgtctgagctcagaggttctttctaccccatcatcttccacagttctggcaaaattattcttctctgtttccaggccccaaggcccagaagaaatttaagcgtcttatgctgcatcggataaagtgggatgaacagacatctaacacaaagggagatggtgaatgggggttagaggggattaagggggagagctatgggaggtggggatggtgcatctgtccgttcatcttatttcctccctgtgacactcttgataacactagatagtgttcaggaattttagaaagacccgtttagactttgagcctcctagacattcatacaatatttactacatgattatatgcatgaatggtaaagctatttttttgcctatcatttaaggcttttctaccagctggtttctgtgtctgtcctggatctgagtaccggttacatgaatttattcagtatttgaaaattcagcaagcagctaggcatggtggctcatgcctgtaatcctagcactttgggaggctgaggcgggcagattgcctgaggccaggagttcgagaccagcctgggcaaacaacgtggtgaaaccccatatctacaaaaagtacaaaaattagctggatgtggtggcacacacctgtattcccagctactcaggaagctgaggtgggaggatcacttgagcttggggaggtcgaggctgcagtaagctgtgatcgtgccactgcaatccagcctgggtgacagaatgagaccctgtctcaaaaaaaagaaaaagcaaatctagtaagctatacattcatgtgtacagtgtctatattatattattatttgatttttttttttttaaggattgaagccaaaaagatcttcaggtcaaaaaagctctgctttgatcaaactatttcttttgtctgatatatatatatacacacatacacatacatacacacacacacacatacatacacacatgtacacacacatacacatacacacaatacacacacatacatgtacatgtacatactcacacatatgctcttcaacttaatgatggggttagttccaataaacctgagataaattgaaaatattgttaagtcaaaaatgcatttaaggccaggcacggtggctcacacttataatctgagcactttgggaggccgaggcgagcagatcatttgaggtcaggagttcgtaacagcctggccaacatggtgaaaccccgtctctactgaaaacacaaaaattcggggcgtggtggtggacctctgtaatcccagctactcgggaggctgaggcaggagaatcgcttgaacctggcaggcggaggttgcagtaagctgtgatcgcaccactgcactgcagcctaagcgacagagcaagactccatctcaaaaaaaaaaaaatgcatttaatacatctgacctacaggacatcataacagcctagccttccttatactttctcagaatacttagattagcctacagttgggcaaaatcatctaacacaaagcctatttttatctcatgtaagagtattttactgcatattgctagcccaggaaaatctcaaaatttaaaatttgaagtacattttctactaaatatttatcactttcacactatactcaaggcaaaaaattgtaagtcaaggactgtctgtctatatttgaaggccagacattcttctggccatcatactcccattagtgttcattcttctcatctttgaacacctggattagcatttaaaatctgcagagaggcctggtgtgatggcttatgcctgtaatcccagcactttgggaggccgaggcgggtggatcacctgaggtcaggagtttgagaccagcctgacatggtgaaaccccgtctctactaaaaaatacaaaaatgagctgggcgtggcagcgtgcgcctgtaatcccagctactcgggaggcctaggcaggagaatcacttgaacccaggaagcggttgcagtgagctgagatcataccacttcactccagcctgagtgacagagcaagactccgtctcaaaaaaataaaaatataaataaaatctgcagagagttcatcttaagatacctgagaataaaaaatattttgttctacacgtgcatttttttttttttttttttgagatggagtctttgctcttttgcccaggctggagtgcagtggcaccatcttggctcactgcagcctccgcctcccaggttcaagtgattctcctgcctcggcctcctgataagctcggattacaggcacctgccaccacacctggctaatttttgtatttttagtagagatgaggtttcgccatgttggctaggctggtctcaaactcttgacctcaggtgatccactcacctcagcctcccaaagcgctaggattacaggcgtgagccaccacgctggccgataattttgatttggtatatctgccctcctcctccattgggtgaaagttttttgagagtaatatatgatgttgacatatgaagcctgcctcccaaagtgcctaggacaagtttttattcttgactgcttgtcttttatttccttattcccagtacctggtggagctcttgattcataacaagtgctatgtaaatgctaattgtatcaattaatattactgcctacttggagcttcaagtctaatttggggaaaataaagagcaacagaaaagagaacacttggtccaacacataaaaagggtgataatattttagagagtttgggtagacttgaatattatttgtttagaacctgaatctcaagtctaagtctgtaacaagatttctcttccagatgatgaggagtctgatgaggaagctgtgaagaaaaccaacaaatgtgtactagtctgggaggtaggtgatcctttgtaaaacattgtaaaactttagccaactcctgaatatttatactatttgagtggagcaatggaatgtaagatgtaatcagtgaataatgttttaaataatttatgtttctttttggaatccatttttaaatggttggcagtaaattcttcctgatcatctgtttaattaaattcgtgagtatttagtatatgctatctggggaagtgcgtggacagtgctgctggtagcaggaatacaaattctctaccgaaaattatttatttcacagtcatgaatatgagacttggaaacgggaatgaattgttgttggatttacctttggatatagtgaaggaagtactagacttaagaatataaagttaggaggctgggcagtgctgcttattagctgtgcaatctgggcaagacacttaatgtcaaattctgttgccttagctattgttctctatattgtcaagtttttgagaatgaaattagataattatgtgatagtgcttcataaaatgtgactgaatcactcttcaagtggaatattttttatggttatctagttctttaacccctgaagccttcttagagaaccagtattaaaaccagtattaatgttttcatgtttgcttttaggtatagtacatgtatatctttttttgggggcgggggggcggggggcggtatggagtttcgctcttgttgctcttgttgcccaggctggagtgcgatggcgtgatctcggctcaccgcaacctctacctcccaggttcaaacgattctcctgcctcagcctcccaagtagctgggattacaggtgcacgccaccatgcccgactaatttttgtatttatagtagagacagggtttctccatgttggtcaggctggtcttgaactcccaacctcaggtgatccgcctgcctcggcctcccaaagtgctgggattacaggcatgagccactgtgcccagcccctccatttctttttttttttttttgagagagttttgcccttgttacccaggctggagtgcaatggtgcaatctcagctcaccgcaaccaccgcctcctgggttcaagtgattctcctgcctcggcctcccgagtagctggaattacaggcatgagccaccacgcctggctaattttgtatttttagtagagacggggtttcgccatattggtcaagctggtctcgaactcctgacctgaggtccgactgccttggcctcccaaagtgctgggattacaggcatgagtcactgcgcccggccatatatcttctatttttaaaatgtgcttatttctagtatatgtgctgctgaagcgagcagtaaaatgtgcttatttctattaatgaattctttattataaaagtggtacattattacaaaagtagtaaatgtttattaagattagaaacaaattctaattatacagaagagtacttactgagacccagcacagtggctcacgcctataatcccagcactttgggaggatgaggtggttggatcacttgagctcaggagttcaagaccagcctgggcaatatggcgaaaccccgtctctacaaaaaatacaaaaattagcctggcctggtggcgtctgcctgtagtcccagctacttgagaggctgaggtgggaagattgcttcagctttggagtttgaagctgcagtgagctgtgactatgccactgcactccagcctgggcaccagagtgaaaccctgtcttaaaaaaaaaaaagaaaaagtctcaggccaggtgcagtggctcatgcctatactcccaacactttgggaggctgaggtgggcggattacgaggtcaggaattcgagactaacctggccaacatggtgaaacccagtctctactaaaaatacaaaaattagtggggcgtggtggccagtgcctataatcccagctacttgggaggctgaggcaggagaatcgcttgaatctgggaagcggaggttgcagtgagccgagatcgcaccattgcactccagcctgggtgacagtgcgagactgtgtctcaaaacaaaagtctcttcctattcgctgatctcttcagaccagtctttataggtaattgctattaatagtttttcttctgaaggagcaatcaaaaaataaaaattaaaaaaaaaggttttcatgtatcctgccttatcccagattcttcaatttatgcatacaaattagatgataataaccatagtatttgttctctgttttataagttcccacctgcatatttgttatctttttttaatcaacttttttttttagagatagggtcttgctctattgctcaggctggtgtgcagtggcgcagtcatagctcgctacagccttgaactcctagggacaagcaatcctccagtctcagcttctcaagtatctgagacctcaggtccacaccactgtgcctggctaattttttttttttttttttttttttttagaaatggatctcactatgttgcctaggcttgtcttgaactcttagccttgagtgatcctcccacctcagcctcccaaagtgctgggattataggcatgagctactgtgcccagccctaccttcacatatctcagcaccctcatctttcaattttcttctatttatctctgaagagtacttactgaaaaagtcccggcttcttagagaaccagtattaatgttgtaggaatttagttttcaggaattgtctctcatgttcagaaataagccaagttctgctccagcctccttattggagtctactccctgaacgcctcttgaggtattgctttatgactgccattgctgctggtaactttggcaagaatgccattctgcccagtactgtctttttctgttgtaattctctgctggtacctgctcttcttctgttccccgcccccagttgttctttgttgctgggccccaaagcctcctgcttatataaatagtttctggggcctttttgaaggctcagatttagtccttaaggcctggtaggagataagtttatctcattccaccttccatagttcttcctgacttgctgttccacccaggcaccagagcaaataattcctcacttcatttcaaaaaactaaaagccttatgcatatgaattcgtaaaatctcatacaaatatccaaggaggccgggcgcggtggctcacgcctataatcccagcactttgggaggctgaggcgggaggatcacgaggtcaggagatcgagaccatcctggctaacacggtgaaaccccgtctctactagaaatacaaaaaatcagctgggcgtggtagcgggcgcctgtagtcccagctactccagaggctgaggcaggagaatggtgtgaacccgggaggcggagcttgcagtgagccgagatcgtgccactgcactccagcctgggcgacagagcgagactctgtctcagaaaaacacaaatatccaaggaaatggaggtcacaatttttttttaaccataaaatcacgttcagctgggcacatgtctcacaaatgttactaggtcttcttataaaagaatattatctgatttaaataagaaattgaagtgtttttattatatatctcttttctagggtacagccaaagaccggagctttggagagatgaagtttaaacagtgtcctacagagaacatggctcgtgagcatttcaaaaagcatggggctgaacactactgggaccttgcgctgagtgaatctgtgttagagtccactgattgagactactgcaagcccttgcctctcctcccttgcctttgtctcttcagtcctctcacttattctatttcccaaccccctcccacttgtttgtgtgatctcagaactgtgccaagcagacactgggacaaagggagaatatcttgctcccctcctgagtcagcctggtgttgccctttattccccttatgtgcatatgattaaagagttatttttaaacttggtgtgatatttttcacacattcgtaagtattaga

SEQ ID NO: 15756 - DNA, 37959 bp, Homo sapiens
attctcctctgcgcggcctccatctaagatctcttccccttgtccatagcctagatcgagctccctgtgtgcaccgcgcgctgcccgaggcgcgtaagtgggggaggagagcggcttcccccggggtggttctagccgtgggtgtggagcgtgggaaggctcagcttccgggtcgagaacctggggctgcggtggacctgatcctgaggtctcagcgtagagatgctgagtccagaggcctgttctagttcaccagtgcagtgaggggctcagtatccgggcctcccgagaggtgggtaggaaggcggggtacaggaaacttggcaccaacgcgccgggaccccaccgcggtgcggacagccaggtgtccgtggtggcgcttccttggagatgctgcctgcagacaggcgtggggaatctgaagtttgtgttaatagctaaacgaagttgagttgcagggagcgggggacgctgggaagaaatgattgatttaaaaggaatttgacgccgggcatggtggcggcatgcccccatgttccctggaggtcaagcctgcagtgagccgagatcgcacccgtaccacgacactccgtcccgggcgacagagcgagaccctgtcacgggggaaaaaataaaaataaaaatttgacgctcactttagctgagtattgagccttgttataacattgagatagaggtctggcgcggcgtctcacacctgtaatcccagaactttggaaggccgatgcgggaggatcgcttgaggccaggagttctacgccagcctggctaacatagcgaaaccccgtctctactaaaaatacaaaactaggcaggcctggtggcgggcgcctgtaatccccgctactcgggaggcggaggcatgagaatcgcttgaacccagtaggcaggtgtgccggtaagccgacatcgcaccactgcactccagcctgggggacagagcgagaatccatccaaaaaaaaaaaagttataattcacgtacaattaaattcactcccttttttaaaaaaaagtggagacatagtctcgctctgttgcccaggctggagtacagtggcgccgtctcggctcactgcaacgtccgcctcctgggttcaagcgattctttgcttcagcctctcaagtagctggaattacaggcgcataccaccacacccagctactttgtatttttcaccatgttggttaggctggtctcgaactcctcgcccttccaaagttcagggattacaggtgtgagccaccacacccagtctaaattcacccttttaaagtgtgcaattcagtggttttaatatattcacaaggttgtgcaatcaccactattatctaattccagaacatttttatcatccctaaaagaaaccttaaaaccattagcagacacccattatttcctcctactcccagcagcactaatctatgaatttacccattctcagtactgtattatacaatatttgttcttttgtgtttggtttatttcacttcatgattcaaagtccatctatgttgtatgtagcatgtatcaacttcattttttaaataactgaattatttattgtgtggatataccacattttgtttctccatttttgatggatactggtgattttctaggctttctaggtctagtcctccacagaactcgcagtctgaggcacagacatttaaaacttaagtttttggaaactagcatttaactcttgggttgggtcaggtaattcagtggcctcaggtctggtatcgtttagggcagttttttttttgttttttttttttttttgagatgaagtttcactcttgttgcccagggtggagtgcaatggcgtatctgggctcactgcaacctcacctcctgggttcaagcgcttctcctatctcagcctcctcggtaactgggcttacaggcgcatgccactatgcccggctaatttttggtatttttagtagagacagggtttcaccatgttggccatgctggtctcgaactcctgacctcaggtgatccacccatctcggcctcccaaagtgctgggattacaggtgtgagccaccgcgcctgggtgggagttttgtttttttgtttgtctgttgttttttggggggacagagtttctctcagcctcctcggtaactgggcttacaggcgcatgccactatgccaggctaatttttggtatttttagtagagacagggtttcaccgtgttggcaatgctggtctcaaactcctgacctcaggtgatccacccgcctcggcctcccaaagtgctgggattacaggtgtgagccaccacacctgggcgggagttttgtttttttgtttgtctgttgtttttttggggggacagagtttcgctcttgttgcccaggctggactgcagtggcgagatcttgactcactgccacttctgcctcctggattcaagcgattctcctgcctcagcctcccgagtagctgggattacaggtgtgcaccaccacacccggctaattttgtatttttagtagagaaggggtttctccatgttggttacgctggtctcgaactccctacctcaggtgatcctcccgccttggcctcccaaagtgttgggattacaggcgtgagccactgcgcccctctgggagtgttttttaaagtgttctattctcagttcaccacttaccaggccgttaattatcgtggtatcaagcagagaaatgtttgtgtgctggtcttctcagggaggcagaaaccgtcagagattgctgttgtgtaatgtacaccaaaacgtgttatcttgtagtataaacggtgtagttggagatgagtgtatgaaaaatgtaactgagctagctgtgggagagactagttgtgaaaaattttgagtcacccactgtatgctttcccagctatgttcaaataaggtgacactctgccttcctgtttcagctctaaaactgttcataagtgttattttggctgtatacgtagtgccatgtttttttgtatttttgtgcttttggtgattttgctgtttataggggcctccaagaatagaagtgctgtctagcatttccaagttgaaggctgtgatatatcttatagagaaaagataagcttttagattagctttgttcaggcatcacttttgttgttggctgtgagttcatgttactgcatcaacaatatatattaaataagatatctttaaacagaagcacacataaaacaaggttatgtattggcctgttgagtaaccctgtatttcccctgggagcagtggctcagtatttgctagttcagtgttcatgatggctttacaggacataactaccctgaataatgagaactgactgtctcagtagtgcttcaagggcagaaagcctagtggatatttttccatctctgcagcttttagcatttcttcactcaaggcactcatttttaatattgaactggcagttttgatgtggagagaagctaaaataaggctaaaatgctcttcatactatgtgctgagtggggactgtgctgagtgttggggattcagtgattagtgtatggccccgcagttctctaatggctgagtgtgggagtgcagagaaatgatcagtgtgagggaattaatcctatgttcccaccgtgtttttttgttttttttgagacggagtttcactcttgtcgcccaggctggagtgcggtggcgtgatctcggctcactgcaacctccgtctcccaggttcaagcgattctcctgcctcaacctcccgagtagctgggattacaggtacccgccaccgtgcccagctaatttttgtatttttagtagagacggagtttcaccatgttggccgggctggtctcgaactcctgacctcatgatctgcctgcctcggcctcccaaagtgctgggattactgggttcccacaaattttaagacttacttcaggccaggtgtggtggcttatgcctgtaatcccagcattttgggaggccgaggtgggcagatcacctgaggtcaggagttcgagaccagcctggccaacatggtgaaacccctgcctctactaaaagtacagaaaattagctgggtgtggtcgcgcatgcctgtagttccagctactcaggaggctgaggcaccagaatcacttgaacctgggaggtggaggttgcagtgagctgagattgcgccactgtactccagcctgggcaacagagtgtctccccctcaaaaaaaaaaagacatacttcagagtgtggtgagctgcataaggctttagaggtaatgacattttgagatttcaattaaaaattttttttctactttttttttttgagacagagtctcactcttgctcaggctagagtgcagtggtgcgatcttggctcactgcaaccttcgcctcctggattcaagcgattcttgtgccttagcctcctgaggagctgagattacaggcacctgccaccatgcccagctaatttttgtatctttagtagagaagaggtttcatcatgttagccgggctggtcttgaactcctgacctcaggtgatctgtctgcattggccttccaaagtgctgagattacagatgtgagccaccgtgcctggccactttttttctacttttgctaatttttttaaagtttcatgaacattatagtactgtgttcataaatgaaaataaaagaaacttgctccagtcttgttcatcaagccgttcttgaccttcacagtcagaatctcacccatcaccttgtcacatctccctcttgatctgtatatccagagtccacctgacatgcttcttcagccctccacatataataagaaatggttttgtgagccgagattgtgccattgcactgcagcttgggcaacagtgtgagactcctcaaaaaaaaaaaaaaagaaagaaaaatgcttttaggtgataaggaaatggagaagaataaaacatctttgccagtctttacctttttaatatcttgaattcatgatttcttgccatagccactatcctagtccaggctctctcccttctacccctgagttttttttttttttttttttaccatgtttttatttcctctgggaaaacacctatcagaattttgggatcatatgacagatacatatttaatttctttctttcttttttgagacagggtcttcctctgttgcccaggctggagtgtagtggtatgatcatggctcactgcagccttgaccccttcctcgcccccgctcaagtgatcctcccaccacagcttcctgagtagctgggactgccggcatgctccaccatgcccgactaacgttttgctgcttgtagagacagccatgttccctaggcttgtcttgaactcctgagcctcaagcgatccttccacttcagcctcaagtgctgggattacaggcgtgagccaccactcctggctacttaatttctttctttctttttttttgagacagtctcgttctgtcacccaggctggagtgcagtggggtgatctcttctcactgcagcctctaccttccaggctgaagcaagccttccacctcagccccctgagtagctaggactacgggaacattccaccaggcccagctaatttttgtattttttgtagagatggagtttcatgatgttggccaggctggtcttgaactcctcacctcatgcaatccgcctgcctcagcctcccaaagtgctgggattacaggtgtgagcaactgcacccagcgggccccgcccagacctattttcaaaattagaaaaccgtgaggcttctggaagaagatgagaagaatatcttcatgacctgagtgtgtgcaaaggtttcttagggctcaggatgccagagtcacttaaaaaagcaaaaaaaacccaaaaaaaaaaccacacacacaaagataaatatgattgattacatcaaaatgtaatcacagactactctaagaaaatgaatggggaaacacagggacctatttgacaaaagactgatattcaagataaataaagaactaataggccaggcgcggtggctcacgtctgtaatcctggcactttgggaggccgaggcggggggatcacttgagctcaggagttcgagaccagcctgagcaatatagtgaaaccccatctctactaaaaatacaagaattagaattagctgggcgtgatggcacgtgcctgtagtcccagttactcgggaggctgaggctggagaattgcttcagtcaggaagatggaggttgcagtgagccgagattgtgccactgcactccagcctgggcgactgaacaagacttcgtctcaaaaaaccagtagggctccaggcctgggattgggcctctgctgctctactccctggacgtgtggctccgtccttggagtcggcctttggttttcatgaagagtagtgtgcattaacagctgagtggttttatcagcctgtttcctgccaacagtgtatgagagttccagttgctttacatccttgccagcatttggtgttgtcagtcttttgagttattctgatgggtgtggtgtgtcatggtcttaattttagtcctcagtcactaatggtgtttagcactttttcctgtgcccatgacaatgtgcatcttcctttgtgaagtgcctgctcaaatcttttgcccattttacattgggttgtgtgtctttttattattgagttgtagcagttatttatataacctttatatcctggttacctgtcctctgtctggttgcctattcattttcttagagttgtctgatgaacagaagttttacattttgatgtaatcagttttctcttatattttcttttatagttactgctttctgagtcctaggaaatcttggctaccttcaggctgtgaagataatctttcatgttttcttctgtaagttttttttttttttgagacagagtcttgctctgtcgtccaggctggagtgcggtgatggcgatctccgctcactgcaacctctgcctcccaggttcaagcgattctcctgccccagcctcccgagtagctgggattacagacatgcgccaccatgcccaactaatttttgtatttttattagagacagggtttcaccaggttggccaggttggtcttgaactcttgaccttgtgatccacccgcctcggtctcccaacatgctgggattataggcgtgagccaccgtgcccggcctataaattttatagttttagttttatgtttaagcctatcacccatttctagtttaggtgaatggtgtgagatataattaaatattaatttcttttccatatagatatccagtcattccagcaccatttgttgaaaatgctattgtattgcgttttggaaattaagatgactgtacaaatggtaattgatgtctgcactcccttttctgttccattgttcaatccttgtgttagtaccacacttttaattactgtagctttttagtaagtcttgaagtcatgtagttgtaggtcttccaattttgttgttttcaagcttgatgtgaatattctaaatcctctgcatttccatataaatatcagaattatctttaccagttttacagaaaagtctggtaaagttgtgattgggattgcattgaatctatggatcaatttggaaagaaatgacacctaaacagtattgagtcttcaaatatatgaacttggtgcattttccttcttatttaagccttttaaaatttctttttaggccgggtgcagtggcttatgcctgtaatcccagcactttgggagtctgcagcgggcagatcagctgaggtcaggagttcgagaccagcctggccaacatggtgaaaccccgtctctactaaaaatacaaaaattagccaggtgtggtggcaggtgcctgtagtctcagctacttgggaggctgaggcaggagaactgcttgaacttgctcaggaggtggaggttgcagtgagctgagatagtgccattgcactccagcctgggcaacaagagcaaaactctgtctcaaaaaataataataataaaaataaaaattttgggccaggtgtggcggctcacacctgtaatcccagcaatttgggaggctgagccgggtggatcacctgaggtcaggagtttgagaccagcctgaccaacatggagaaaccctgtctctacgaaaaatacaaaatttgccaggcatggtggcgcatgcctgtaatcccagctactctggaggctgaggcaggagaatcacttgaacctgggaggcagaggttgcagtgagccgagatggtgccattgcactccagcctgggcaacaagagtgaaactctgtctcaaaaaaaaaaaattcttttagttctgttttatggttttcagttcagaagtcttatacatattttgttaaattgatttctagatatgtttcttacctttattgtaaaatggagccatcatttgcatcattcattactctgtatgtaatgtgttatcattctctacctgctttcaagattttctctttatttttgttttttagcagtttgtctgtggtgtatctaggtgtcattttatttgtatttatccggagatttattcttgagatttgcagagcttcttaaatctgtaaatttatgtctgtcggccaatttgggaaatttggagctattagttttaaaaatatttcttctgttccattctctttcacttcttctgtatgtgagttcaatttcacttcaattgtatgtgagttagacattttgatattagcccacaggatcctgaggttctttcattcttttcaatcttttttttttctcgaagtttgcatttcgtgagcaggagtgacagtcattcaggatgatttttgagattcctagttcaagagtagttcctattcttttctaggtgtagtcaagtatggcttctaattctactagaaggcttttttgtcggggaggtggttctatgtcctttggctcttacattttctttgtgtctttcacagcacagttttcagagggtaccctttctctttggttttgttttgttttgttttgttttagacggagtcttgctctgtctccaggctggagtgcagtggcgcaatcttggctcactgcaacctctgctcactgctacctctgcctcccgggttcaagcaattctcctgcctcagcttcctgagtagctgggactacaggcacgcgccaccacacccaactaatttttgtatttttagtagagactgggtttcatcatgttggcaaggctgttctccatctcttgacctcgtgatccgcccgccttggcctcccaaagtgctaggattacaggcgtgagccaccgcgcccggccaacagagggtaccctttcattctttttctccttcttcccagaaggcttgcgttttcaagactacctcatcaagttctgcatgtgtttaaaagtgtctctacccgaccttcccttcctccctcccgatttaacggaattctttgttggtgttttcatacttaccgtgagttttctttttcagggtgatattttagttccatcttaggctctccattgtcctcttctctcttctttttttttttgagacagagtctcattctgtcacccaggctggagtgcagtggtgtgatctctgctcactgcaacctctgcctcccaggttcaagtgattctcctgcctcagcctcccgaatagctgggattacaggcgcacacaaccacgcccacctaatttttgtattttcagtagagacggggtttcaccatcttggccaggctggtctcaaactcctgacctcgtgatccgcctgcctcagcttcccagagtgctgggattacaggcatgagccaccgcgcccggtgcgcccagccctcttctctcttctttgcatctctcttcctatctggatccctctttgctgtccttaaagagctgagatgagagattgagaaacatctctacaagaaattgacgtttttctacttatgggtaattagaagcttgtagtattttcagtcttctaagtatgttgaagatatgagacgttggtgattttctttgtttctccggttggttggtctgtgtagtttttggacatgtgtttggatatttggatttatatagctgccataatcttggctatgcaggtagtctttcctgacacttcatcctgaaagatttgaagcctttggacaaattttacagtgggctgggtgcagtggctcacgtctgtaatcccagtgctttgggaggctgggcaggaagattgcttgagcccaggagtttgagaccagcctggacaacatagtgagacccgtgtctctacaaaaaataaaaaatatgccgtgtgtggcgttatacaactgtagtcccagctacttaggaggctgaggtgggaagatcacgagccaaggagtttgagggtacggtgagccatgatcgcctcactgcactgggtggcacagcgagactgtctcaaaaaaaaaatttacaattaatgtctgcatatccttcacctaggttcataaatttgtacttttgctttatctacttgcctttttctctctctctacacacacacacacacacacacacacacacacaattagttgaatgaattgagagtaagttgcagaaaacatgacactttactccaatattgcatcatacaaaatcatacatctagtgataggccattgtcctacagaatcacgatataattatcacactaaccagctgtggtggtgcacacctgtagtctaagctactcgggaggctgaggcagaaggatcacctgagcccaggaggttgtggctgcagtctcatattcatcccatcatcagatttctcccattgtcctaataatattctttatagcttttctttatccctgatccgaaatttcattgaagatcacacagtgcatttagttgtcatgcctcttaagtctttatttatttattatttattttttgagatggagtcttgctctgttacccaaactggagtgcagtggcatgatcttggctcatgcaacctccacccgctgggttcaagtgattatcctgcttcagcctcccgtgttgctgggactacaggtgtgtgccaccatgcccagctactttttatatttttagtagagacgggaattgtaccatgttggccaggctggtcttgaactcctgagctcagatgatccacccgccttggcctcccaaagtgctgggattacaggcgtgggccaccacacccagccttaagcctcttttaacataaaagagttcaccagccattctattttgttttgctttttgagacactgatgctttggagagtccaggccagttgctttgtagatttcaacttgtttgattgtttcctgatgattaggttggtagaaatactacctcaatgatgggaccttcttagtgcgtccatcaggaagcacatgatgtgactgtaattggtgacattaagtttgattccttaataattaaggtggtaactcccaggtttctacattgtaaaggcatcttttgccgccctcctttttattcccaagtagtttatttggagattagtcctttacacagtagaggagcggggaagggagacaggaaaggaaagtttgacaacaaagggtgagttttcaagcctgttgccacgggggaacctaattccactggagaagctcatggcttggtgatgttccacagaggggtcagaaatttagcgtatttcaacaccagctcctgtcaggcaccatttgagggctgctgccagggtggttcaattttctggtgcttacagcttgccataaacaggtgcaaagtagtctggataccaaagaaagctctcaggtaacaagatgcagatgttggcatttggaagtcagaatagggtgcactattgtggtaagagctgaagggatggctgggcgcggtggctcacacctgtagtcccagcactttgggaggatgaggcaggcggatcacctgaggtcagaagttcgagagcagcctggccaacatgacgaaaccccgtctctactaaaaatacaaaaattagccaggcgtggtggtggatgcctgtaatcccagctattcagtaggctgaggcaggagaattgcttgaatctgggaggtgtaggttgcagtgagctgagatcacaccactctgcactccagcctgggtgacagagcgagactctgtctcagaaaaaaaaaaaagctgaagggatgctgagtagagcatccgtagtgtctgctatacctgggtaccctagaacctggagaacctacagcttgaggcaagagcgtatgtgctattattttttcaagaagtgtgctctcaggaagcagaggtaggggaaaggtgagtgaagggagaaggaagattaagtcagttcaagggtgcattttgaagttggttgcccttggtgcaagtacagttggttgcttgttctcctaaagctgtctcccaggaggatgtatacataactgcattccagggcaatccatctaaaggaagggtggacggacccctcagcttctgtatctcactggaaaaaggtttgcttcatggcacattaattcccatagacttctaggttgtgcatgtgtgggtaccaggtgggtcccacagacccttacacctccaaggcaagcagcaagccacgggtgggaagtgataggtacccagtatgagcaggaggtaagggaccgtggggttgtgcctgtgggcagttggttataacccagacgtgtttgatcagcccagtgacagctggagtggacaaagtgaccaagggcctcaaggacacacaaggccaagaagatttgaagtgctgtgtaagatatgcctaatgcatttggattctacctttgtttaacgaatatgcacacataaaaaacacttgaactccttgagcccaggagttcaagaccaacctgggcaacatagtgagacactcatctctaaaaaaattttaaaaaaaattaacctggcatgatagcactcacctgtagtcctgtctactctggaggccgcagtgggaggatcacctgagccctggaggtcaaggttacagtatgctatgattgcaccactgcattccagcctgggtaacagagcaagacgctgtctcttaaattttttttttttttttttttacttttataatggaaaaaccattgtagacagttttaggaaggaaagcagaatagtaagacatctttttcaaagtaaaagagcaaaaaaggcaaaaaatatttcacatttactttatggacaaagataagattgtccttcaataaaagactgaattttttttgtttgttttgttttgttttttgagaaagagtcttgctccattgcccaggctggaatgcagtggtgtggtctcggctcactgcaacctccgcctcccgggtacaagcaattctccagcctcagccccccgagtagctgggactacaggcacgcgccactgcatctggctaagttttgtatttttagtagagatggggtttcaccatgttgaccaggctcgtcttgaactcctgacctcaggttatccacctgcctgggcctcccaaagtgctgggattacaagtgtgagccaccgtgcccggccacaagttgctctttaaatgtgagaagtgttctggcatggtggctcacacctgaggcgggtggatcacttgaggtcaggagttcgagatcaggctggccaacatggtgaaaccccgtctctagttatttatttatttatttatttatttatttatttatttatttttttgagacggagtttcactcttgtttcccaggcgggagtgcaatggcgcaatctcggctcactgcaacctccgccttccgggttcaagcgattctcttgcctcagcctcctgagtagctgggattacaggcatgcaccaccacacccggctaattttgtatttttagtagagacggggtttttccatgttggtcaggctggtctcgaattcctgacctcaggtgatctgccctcctcagcctcccgaagtgttgggattacaggcgtgagccaccacgcccggccctgtctctactaaaaatgcaaaatttagccgggcatggtggcgcacacctgtaatctcagctactcaggagactgaagcagcagattcgcttgaacccaggaggtgaaggttgcagtgagctgagaccacaccactgcagggcagcctaggcgacaagagcgaaacgcttacaaaaaaaaaaaaaaaaaaagattcacaggtgatggtgatgctgctggttaaggaagtgaagtggctttttgctctgtagccttcctgaatgttggggcctcctgctcttcatttgtttcatttctattaagtctcctccctccagctatcttgttagctcctggaaagcatttcagtgattgtggcttctatttctttttgaccccacagtgtccagggtcatgctgcctatatagtagtgagcagtaagttgaggtttttaaaaactttattattattatttttgagatggagtcttgttctgtcacccaggctggagtgcagtggcacaatctcagttcactgcaacctctgcctcccaagttcaagtgattctcctgcctcagcctcccgagtagctgggactacaggcgcctgccaccacatccggctaatttttttgtatttttagtacagatggggtttcactatgttggtcaggctgatctcgaactcctgacctcaggtgatccgcctgctttggcctcccaaagtgttagggttacaggtgtgagccaccacacctggccggtttttttaaactttaaaacagattcacttgatttttcttccctaccccccagcttttttgaggtatgactgacaaaaattgtatatatttagggtgtacaatgtgatgatttgatatgtgaatgcactgtgaaatgattaccacagtcaaggtaattcacatatccaccacctcccagttaccctcttagctagtacaggttgggtattgcttctctgaaatgctttgggaccagaagtgttttggacttcagattttggaatatttgaatatatataatcagatatcttgggaaggggacccaagtctaaacatgaaattcatttgttttcagagcctaaagatgatttttttttttttttttttttgagatggagtctcactctcgcccaggctggagtgccgtggcacaatctcagctcactgcaacctctgcctcccaggttcaagcgattctcctacctcagcctcccaagtagctggaattacaggctcgcactaccacacccggctaatttttgtatttttataaagacatttcaccatgttggccaggctggtctcaaactcctgacctcaggtgatccgcccgcctcagcctcccaaagtgctgggattataggtgtcagtgactgcgtctggctgataattgaatttttctcttggagaagctgaataaactgtgtgttgtgtgcctgcctttttttttgtttttttttttttttgagacagagtcagacactctgtcacccaggctggagtgcgatggggtggtcatagctcactgcagcctcaaactcctgagctcaagcgatcctcccacatcagcctcctaagtagcatagcaccacgcctggctaatttttaaattttttgtagtgatggggttttgttgtctaggctagtctcaaactcctgggctcaagcagtccttctgccttggcctcccaaggtggtaggattataggtttgagccaccatgcctggccattacctgtgttttgactataacacatcatgttggcactcaaaacgttttggattttggagcattttgaattttggatttttggattagcaatgttccacctatagtacattttttgtttgctttcccataaagaattttttgtaattttgattttatagttctaaatgtaatatattcttattgtaaaaatcacctttaatagcaccgccagaatagcaaacatgttaacagaaaggtagaagtagaccttaaagaatcttcagcagcttgagagaccacagctaaccactgaggaactctgttctggattggagcagtgcttagaagcttataaataactcttagggtattgcatagggattctttttttttttttttcctgaaatggagtctcgctctgtcgcccaggctggagtgcagggtgtgatctcagatcactgcaacctccgcctcctgggttcaagcaattctttgcctcagcctcccgagtagctgggattacaggcgcctgccaccatgcccagctaatttttttggatttttagtagagagggggtttcaccatgttagccaggatggtctccatctcctgaccttgtgatccacccacctcggcctcccaaagtgctgggattacaggcatgagccactgtgcctggccgcataaggattctttatgtgatttttcagtagaggctcttgccttttactttaaacattctttgagggttgttttttttttccgctttttatttatatagaggtcaaccagaatcaagatgtctgggactgaggaagcaattcttggaggacgtgacagccatcctgctgctggcggcggctcagtgttatgctttggacaggtaactgtggttccttcatgccgggaaagaatgaggtgaagtgagtaaagttagggcaaggcagtttgtagagcatcgtagtacatgtgtgagcagtacctagtacgtttacctagtacgtgtgtgagcagtacctagtacgtttacctagtacgtgtgtgagcagtacctagtacgttgacgcggtgcgtgcgggggcagtacctagtacgtttacatagtacatgtgtgagctatttgttattggtttttcctttagatgcattttttgggagtcttgtgaactctggagggcattttggaatgttagctatcaaaagactgatagtactggggattagatttagattttaaattttttgtggggggggatagataacatatttgtatgacatcaaattcaaaatgaaactgtgaaaatctccctatttcctattgcccctgtgtgcatgccacccagttctatttcttttttttttcgagactgagtcttgctttgtcacccaggctgcagtgcagtggtgcgatctcagctcactgcaacttccaccctctggattcaagcaattctcctgcctcagcctcccaagtagctgggataacaggcatgcaccaccatggccagctaatttttatatttttagtagagatggggtttaaccatgttggccaggctggtctcgaactcctgacctcaggtgatccgcctgcctcggcctcccaaagtgtttggattacaggcgtgagccaccacgcccgggcttaatttttttgtatttttagtagagatgtggtttcaccatgttggccagggtagtcttgaactcctgacctcgtgatctgcctgcctcggcctcctaaatgctggaattacaggcatgagccaccgcgcctggctccagttgtctttcttggaggcatggaaagttactgggggtcctattccttgtagggacattgtgtgcacagaaaagagtttcttgctttgtccacccaaactccatctttgtctttagcagagagttgtgagtattcatctcatctgagcagggcaagggggacaaaacccaaatcagcaagcagtagtgtgtttctgtttgtgcaggatgggaaattgttgtattggagaaggcgtcaatctctggaaaggacaaatggaagcaaggcttcctacccccgtgctctttccgtacttgcttcctgtgctgacgtcatttacagatctggaggcagaacattttagcttcctaagcttcagaaacatttataaggatggtagcagcagctaaggcagcagttctcaaaatgcagttctcaaaaaccctggggtttctgaagatctttcagagtccagaaggtcaaaattatcttcataataatactatttgcctctttcacactcattgtctcatgagtgaatggtagagttttcagagagtgcatgatatgtggtgatgtcactgctatgatgcctaatggcatgcatgccttaaaagtttctcagttttgattcctaataggatacatagaacccacataaacaaaggttctggggggtctttttaagagtataaagtctccataaaggatggagactcaatgatgtgaggaatggtggaagtgtgaatttaattttcttttttggggttgcagtgccagtacacagcagaagagtaccaggccatccagaaggccctgaggcagaggctgggcccagaatacataagtagccgcatggctggcggaggccagaaggtaggagaattcatgtgcctggaaagcaggcatccataccgcagactccgatggtcttgccagttccctctctgggtcctcagggattcggaagtctgctgttaactgttcctggaggtctcccagtgcccctgggaggggatgggttccagacttcattctcatccgaaggggcctgggcatggtcttgacactcgcataaccgccgtcttaagatttttacatcatctttttttttttttatttttaaagacagggtcttgctctgtcacctaggctggagtccgaccagtggtgtcatctcagctcactgcagcctccacctcccaggctcaagcgatcctcctgcctcagcttcctgactagctgggactacaggcacacgccaccacacctggttaattttttaatgttctgtagagacgacatctcgccatgttgcccaggctgatctcgaactgctgggctcaagtgatcctcccacctcggcctcccaaagtgctgggattacaggtgtgggccaccatgcccagcctttacaccattaaaaaaaaaatgttccttttgccatttgctttttttttttaattaaacactttttaaagaacttatgattgacacataataattgcatatcatttgcttctaattttaacttctgtgtatatttttggtcttccataaaatatgtcaaacagatttgtactttttgcaaactgaattttagcaactgctgggtgagttcctcctcccaacagaccattcgttctcgcgggctccatctagaagatttttgaaataaattcattgagaattttcttgaaaaaaaaattttttttaacagactggttctcactctgtcacttaggctggagtgcagtggcacgatcctagcttactgcagccttgagctcctgggctcaagtgatcctcccacctcagcctcccgagaagaatgtttaaggacagtttatcgaaaaaagtagatgaggaataaattatgtcaattttgattcacatttaagtgtggtaaggaattaacacagcttttccttaaaaacatttgtttttctaggtgtgctacattgagggtcatcgggtaattaatctggccaatgagatgtttggttacaatggctgggcacactccatcacgcagcagaatgtgggtgagtatgctctccagcagtggggacttctgcactgtccagctcctgctgaaagtctgctgtgggtgaggaggtaaggtaggtggactcagctgccagcaggaggaatggttgtggcccagcggtcagtgtcctcttcaacttgctctctttcccactcctagattttgttgacctcaacaatggcaagttctacgtgggagtctgtgcatttgtgagggtccagctgaaggtgaggggatggagtagacctgctgcccggaaggatcagtgggtggtaggagaaggtgagcaggtagggaagtaggtagctggacggggacccaggctccagagttgtgtctcagccagcgttccctagagtggtggaattcaaatactcttgctcatgtgctccctaaaagaatggaaaaactgttctcttgcacatgttcaagctgacacctaaaagttttcaccatatataaaaattgttgcaaaggatgtattttttggcatatggtaaaatctgacattttaaaatacaataattttaccatcactgataagtgtttggaaactcaactttaggcaaagcaggtccttttgttataacattgatgaaaacaaaaatatgttttgttaataagttgtttcacttcaagtcacagttatttaaggtgttaagtgagcacttaccgtaaatctgttgaatcttgttaaatattccagtggactctaaatactatagaggataagatctatcatttatttgaagaaatacaatgaacaagcttttttttaatcattagaaattttacattgttctttctttatctgaactcatatttctattctatttccccactggttttaatcctaatacatatttatggttgaaagtttggctaggcggggtggctcattcgtgtaaccccagcactttgggaggcccaggtggaaggactgcttgagcccagggatttgagaccagcctgggcaacatagcgaaagcccgtctctactaaaaatacaaaaaattagctgggcatggtggtgtatgcttgtagtcctagctactcaagaggctgaggtgggaggatcacctgagcccaggaagtcgaggctgtggtgagctgtgattgcgccactgaactcctgggtggaaaaaaagaaaagttttatcggtagccttactgtgcttctctgcctttgcctgtgtataaaaataaaaatttttggtaaattttcagtgcacttaaggctctaaatattaaaatatttcttttggatttagttatattatagctactgttaacacacaattgaccagacaattgtgtttatggtgaagagaaaacataaatacagcaaaattttgatacttagaaaaattaaagatatgaaatcttgccacaaaaataaaaaatttaaaatataaaatttatggaaaatgtatatcttaatgagatggatggtgctgttttttcttttcagttagtttatatatccatatatccataactgaatattacttacttcttttttttttttgagatggagttttgctcttgttgcccaggctggagggcaatggttcaatctcagctcaccgcaacctccacctcctgggttcaagcgattctcctgcctcagcctcccaagtagctgggattacaggcatgcgccaccccgcccgcctaattttttgtgtgtgttttcagtagagacgcggtttctccatgttggtcaggctggtctggaactcacaacctcaggtgatccacccgccttggcctccaaaagtgctgggattacaggcgtgagccaccgcacccggcctacttatttcttgaatgaacaattcagcattaattctattctgacttatttttctaaatagtactaaaaaatcttgtatctatgagtgagtagctgagaatggaaagaattgtgttatagtgtcactcatttatttgagtgctttctgagttattttttaaaaatcacagagcgctgtcatcaaacattgtatttaattctcaatcagcgaatgatgtgctcaggtccaccttctcttttggtgagaggcaggagctggacgccacctgatttacaaagggtttgctctcccgtccttacagaccattagatccagtgttcaaatcatccctttgtttcatatcccagaggtttttttttttccaagacgtagtctcactctatcacccaggctggagtgcagtggtgcaatctcggctcactgcaacctctgcctcccaggttcaagtgattctcctgcctcagtctcctgagtagctgggattacaggtgcccaccaccacacccggctaatttttgtatttttagtagagatagggtttcaccatgttgaccaggctggtcttgaactcctgacctcaagtgatccacctcccttgacctcccaaagggctgggattacagcgtgagccaccacgcccggcccggccatcccagaggttttttttaccttagggtgatgcacactgataggatttggggtgagtttctaatgtgccctttgtgtgttgggaagttgggaagggaggatcgtcttgacaccttgaccgcaggcacatgtccaggcagcccaggtctaggaagcagcactcgcgatggattctcacccagccttctgcccgtgcccctgtagcaaggccgccaggtgggagagtccggctttgaaccctgctgcttgaggaacaggggagttgtggcacgcctgccgctctcgtgtttgagttcaaactccttttctgcccccaggatggttcatatcatgaagatgttggttatggtgttagtgagggcctcaagtccaaggctttatctttggagaaggcaaggaaggaggcggtgacagacgggctgaagcgagccctcaggtgagcgcggggctgggagtctaacctgcgtcatttcagctcttgcttcagagcagatttcgattttttttggaagaggtaacacatccacatggttcaaaaatccaagcagcgtggaaggtaattctcacccctgccctggttcctgtctgccgttttcccactttcgttagtattttttcaatgtttctgtttcaggcttcccttgctgggagtaagtggtagaatcctgtactctctcttctccgtgcactcagtcatgtgtgccggaggccttcccactcctactgcgagtgcacagacagcaccctcctctccgtgctcctcagcagtcctccgctacgcacaggtagcatagttaacgtagttacacagtcacgcagatgtccgtgttagtccatttatgttgctatacaggaataccagaggctgggtaatttataaataaaggaggtttgattggcttatgattctgtggactgtactggaagcctggtgccagcatccacttctgctgaggcctcaggaagcttctaatcatggcagaaggtgaagagggaacgtggagagagagggagcaagagagagaaggaaggagtcccaggcttatttatttattttattgttgtttttcattttttgagacagggtcttgctctgttgcacaggctggggtgcagtggtgccgtcatcgctcagtgcagccttgaactcctgggctgaagtgatcttcccgcctcagcctcccgagtagctgggatcacaggcacataacaccacccccagttaattaaaaaaaaatttttttttttttggagagacagggtctccctttgttgcctaggctggtctcaaactcctgggctcaagtcatcctcctgccttgtgcctcccaaagtgccgggatcacaggcatgagccatcatgcccagcccccacactcaaaaccaccagatctctcatgagctgagtgagaactcactcaacaccaaggggatggcactaagctgtttatgaggaatccagccccaggatccagtacctcccaccaggccgcaccccccggcattggaggtcacgtttcaacatgaaatttggaggggataaacatccaaaccatatccgtgtctttgagaattgaagtgaattgaaccagaaaaacctatgagttctgtgggggagtccgtagatcccaagttaagaactctggtcatgggaggttgtgcccttgagcccccggtccccaagtgtgtgttgcctactcctgctgggaaattggagcagcctttggggggaaaaaaaagaaaaactctctgcagtttgttctccatgtcaggaggtggctggtgggttttgtgaatggcgccgtaatcttttcatactcatcttctctgtgagggcagggacttgtgtcttgtcctcactgcagtattctcagaaactaacacagtgcaggaacatgctagatgcttaccagacatcaatggggaatgcatgttagggtccacttcctctgctgctcctgagaagcaacctgtacaaaagttgtaattctattctctgatattcatgtgtaacaattcttaaccctgtttcacctttttttctcttgcccttaggagttttgggaatgcacttggaaactgtattctggacaaagactacctgagatcactaaataagcttccacgccaggtatatcagacatggatgagtggagtgaagataatgcggcaaactcttgtgtgtcatgggttgagtatttggaggatgcaaggagaaaaagtgaggactcagctctttagagggtcgggaatgttgatttcagatttcgaatgttagagacagcaggaactaatcccaacattttccttttttctaaagtacatcatgtgggccggggaccgtggctcacgcctggaatcccagcactttgggaggtggaggcaggtggatcacaaggtcaggagatcgagaccatcctggctaacacggtgaaaccctgtctctactaaaaatacaaaaaattagccgggcgaggtggtgggcgcctgtagtcccagctactcgggaggctgaggcaggagaatggcgtgaacccgggaggcagagcttgcagtgagccgagatggcaccactgcactccaacctgggcgacagagccagactccgtctccaaaaaaaaaaaaaaaaaaaatcacaccatttgacaagaatgtgaggtctagagaatttgtgtacgtgtaggtagtgaactgtggttgggggtagtctgtgaagcctcaaagcaagcacacagccctctgcagcaccactgtccttcccagacactcccagcctcgctgttgagccttctttcttttccttagttctggtgtcattacatgtctgatgtcattacaatgtcatttacatgtccattatttctgtcaatacctataacgtgatctgagcctttgcctttggagaatggggtctgtggtggggcagccctggagtcacactgccttgccatgagtggcttctggagtgttcctcctgcctcatctgctctccgaggtccctgccatgtcgctccccagggcagcattcccatcctgtgcctgagggattcttgtcctcatggagccccacaaggtgtgtgtcactgggcatctgtaaaaactcctttaaaaaaatcatttttaaacattattggattcagtttgctaatattttgttagacttttttttttgagacggagtctcgctctgtcgcccaggctgaagtgcagtggtgtgatcttggctcactgcaacctctgcctcctgggttccagcgatgctcctgcctcagcctcctgagtagctgggattacaggtgtgtaccaccacgcctggctaatttttgtatttttttagtagagacggggtttcaccatcttggtcaggctggtctcgaattcctgacctcatgattcgcctgcctcggcctcccaaagtgctgagattacaggcgtgagcccccgcgcccggcctttgttaggcatttttgcatctatgtttatgagagatattagtcaagttttctttttctttttttttttttgagatagtctcactctgtcgcccaggctggagtgcagtagtgtgatctcagctcactgcaacctctgcctcccgggttcatgccattctcctgcctcagcctcccaagtcgctgggactacaggtgccagccaccaccatgcccagctaatttttttatttttagtagatggggtttcgtcctgttggccaggctggtcttgaactcctgacctcaagtaatccgcctgcctcggcctccgaaagttttgggatgacaggcgtgagccaccgcacccggccttttctttttttaaattgtagtaaaacacatcacattttaactatttttagtgtgtggtcgagtagtgttaagtgtattcccattgttgtgaaattgatctgcagaactaagaccctgcacccgtaaaacaagaactccgcatttccccctttcccagacccttgtaactacttccactttctttcctttttttttttttttaatttattttatgaaagatgaggtcttgctctgtcagccaggctggaatgcaggagtgccatcataattcactgcatccttgcactcctgggcccaagggatcctcctggatcctcctgcctcagcctctcaggtggctgggactacaggtatgtgccagtgcacctagctaatttattttttaaacaattattactattttttttgtagagacagaatttctcagggctggtcatgaactgctgggctcatgtgatcctcctgcctcggcctcccaaagcgctgggattgcagcgtgggccactgtacctggagccagctaattaactttttttgggggcttttttttttaagaggtgagttcttgctatgttgctgaggctggtcttgatctttttttcttttttaaaaaattaggttaggcgctgtggctcctgcctataatcctagcactttgggaggccgaggtggttagatcacttgagcctaggagtttgagaccaccctggccaacatggtgaaaccctgtctctactaaaaaatacaaaaatcagctgggcatggtggtcagcctgcctgtaatcccggtggtcagcctgcctgtaatcccagctcttctggaggctgaggcatgagaatcgcttgaacctgggaggtggaggctgcagtgagccaagattgcactactgcactccagcctgggagacagagtgagattctgtctcaaaataataataataaaatataaaaataaaatacttttttgtgtgtggtcatggagttttgctattgcccaggctagtctcaaactcctggctacaagcgatcctcccactcagcctccttaagtgctgagattataggtatatgtgtctactttctgtttctgtgaatttgtctactctggatacctcatataaatggaatcacataatttttgctttttgtgactggcttatttcacttagctagcattaatgcctttaagattcatccatgtagtagtgtgtatcagaattcccttctttttgtggctgaatattctgttgtatatatagaccacattttgtttatgcattcatttggtgatggggatttgggttgctttcaacctcttggctattgtgaataatgctgctatgaacgagggtgtgtaactctctttgagatcttgctttcaattcttttagacatattctgaaggggattgctgggtcatggtaatcctatttttaatttttcgaggagctgccacactgattttcatacagttgccccattttaccattccaccaacagggcacatgagttcagatttttctaaatcctaaccagcacttgttattttctgagtttttggttttttttttttttttttttttaagccaacctaatgggcgtgatattttattggggttatgatttgcatacccctgatgattagtgatgttgaccatattttcttttttgagacagaatctcactctgttacccaggctggagtgcagtggcacaatcttggttcactgcaacctctgcctctgggttcaaacaattctcctgtctcagcctcccaagtagctgggactataggcgcctgccaccatgccgggctaatttttgtatttttagtagagatggggtttcaccatgttggtcaggctggtctcgaactcctgacctcaggtgatccgcccgccttggcctcccaaagtgatgggattacaggtgtgagcccccgcacccagccaaccatattttcatatgcttgttggccatctgtttatcgtctttggagagatgtctattcaagtcctttgtcattttattttgttttattattttaatttaatttcttttattcatctcatctcatctcatctcatgacaagatctcgccctgtcacccaggctggaatgcagtggtctgatcatggcttggctccctggagcctcgacatcctgggcttgagtgatcctcccacgcaggctggagggcagtcgtgtgatctcggctcactgcagcctctatatcccagactcaaatgatcctcctgccttagcctcccaagtagctgggactacaggcatttgccaccatgccaggctaatttttttattttttgtacagaatacaaaaaattttaccgtgttgcccaggctggtctcaaactcctggcctcaagtgatccacctgccttggcctcccaaaatgctgggataacaggcgtgagaaacccatatggcccaactcctacttttattgagctttttcgtattgtttttgtattctctctttcacttatgtttgctgtcatctttttagaatttcctttcttctagctttgggtgtaactttttttttctagttctttgaggtatagcgtagatttgagatcttttttttttaactatgtgtgtaacttccctcttacgacttctttccctgcaccccagaagtttggtaggttgtgttgtagtatcatttgtctctgggaattcttctaagttggcttgttacatttcctttgactttaagagtgtggtgtttaatttctactgatttgtggattttccagttttctttttgctgttgatttctagtttcattccattgtgattgaaaagatactttatatgatttcaatcttgaatttgttaggacttgttttgtggcctaacatgtagtctgtcttggagaatgttccatgtgtacttgagaagaatgtattttctgctattggtgggtggaatgttatgtatatgactgttaggtccagttggcctatagtattgttcaaatactctatcgccttattcatcttttgtttggttgttttatctattattgaaagttgagtagtgaagtctcctactattattgtgttgcttttatttcaccttacaatcctctcaaagtttgcttcatatatttaggacctctggtgtttggtgcataaatatttataattgttatatcttcttggtgaattgacattcttttttttttttttgagacggagtctcactctgtcgcccaggctggagtgcagtggcggtgcgatctcagctcactgcaggctctgcctcctgggttcacaccattctcctgcctcagcctcctgagtagctgggactacaggcgcccgccacctacgcccggctaattttttgtatttttagtagagacggggtttcaccatgttagccaggatggtctcgatatcctgacctcgtgatctgcccacctcggcctcccaaaatgctgggattataggtgtgagccactgcacctggctgacattcttatcattatataatactctcgtctcctataacaattttttttttttttttgagacggagtcttgctctgccgcccaggctagagtgcagtggtgcgatcttggctcactgcatcctttgcctcctgggttcaagcagttctcctgcctcagcctcctgagtagctggaactacaggtgcgtgctaccatgcccggctaattttttttttttttgagacagagtttttgctcttgttgcccaggctggggtgcaattgtgtgatctcggctcactgccatctctgcctcccaggttcaggcaattcttctacctcagcctcccaactagctaggactacaggtgtgtgccaccacacccagctaattttttgtattttgtagagagggggtttcaccatgttggtcaggctgatcttggactcttaacctcagatgatccgcccacctcggcctcccaaggtgttgggattacaggcgtgagccaccacgctgagcccagatttttttttttttttttagacagagtcttgctctgtcgcccaggctggagtgcagtggcgctatcttggctcactgcaacctccgcctcccgggttcaagcgattctcgtgcctcagcctcctgagtagctgggactacaggcgcccaccaccacacccaactaatgtttcgtattttttagtagagcggggttttgctgtgttggccaggctggtctcaaactcctgggctcaagtgatcaatccacctgccttggcctcccaaagttctgggattacaggtgtgagccactgagcctggccccaaatttctctttttttgttgttgagacggaatttcactcttgtcaccgaggctggagtgcaatgttgtgatcactgcaacctctgcctcgtgggttcaagcgattctccagcctcagcctcccaagtaactgggattacaggcgcccgccaccatgcccggctaatttttatacttttagtagaaatggggtttcgccatgttggccagggtgatctcaaactcctgacctcaagtgatccacctgcctcagcctcccaaagtgttgggattacaggcatgagccaccatttcctaagtgagcacagctgttcacctcccagatagagaatcagacctttaccagcagcccagaagccccattttgccctcttccagtcactgccttgctttccttttttcaaaagtaactactatcctgtcttctattctgacttccatggattattttttcctgtttttgaactttatatatgtaaagttcacaaatggaattgtactgtaagtggaattgtacagttcatattttaagaaaattgaccgaagtatgaaaaagaacatatagacaggttagacgagtgcacgtatcatccatgctcagcttgatgaattttccaaccaaacacatccacacagccaacatctgaatcaagacactgccagtaccgagaaggcccagctgtgttccttgcagtcactgccatcccctgccctccttcccactctgagcaaaccgcttttaacaacacagattggccgggtgtggtggctcactcctgtaatcccaccacttgagaggccaaggaagaaggattgcttgagcccaagagttggagaccagccaggacaacatagtgggaccctgtctgtacgaaataaaaataaaaataaaaataaaaattagctgggcctggtggtggcgcctgtagtcccagctgcttgggaggctgggctgggagaatcatttgagcctaggaggcccaggctgcagtgagctgtgattacgccactgcactccagcctgggccacagagcgagaccctctctcaaaaaacaaaacaaaaaacaaagaaagccaccaatttgtttttattgttatgtacttttttggaatcctacagtttgaactctttgtatcttacttgaattcagcatggttgtgagattcattcatggtacgagcagcagtttcattgctgtataattttcttttgcatgagtatgtggcaatttatttttctagtcttttcttagtagacattttggtttttgtagcttgtggctgtttcgattagagatgctgttagcattcttttgctgtacagttgcactcatttttgttgggaattattgggggagaagataggtacgtgtttagttttagtaggttcttcccgttttcctgtatggttgtattaattcacaccccacgtggcattgcgtaagttccaattgttctgtatctttgacagcacttggtatcgccagtctttcatatttttcaaagctcgtttcttttttttgagacacagtcttgctctgtcgcccaggctggagtgcggtggtgcgatctccgcccactgcaacctctgtctcccaggtttaagtgattctccctgcctcagcctcccgagtagctgggattgttggtgtgtgccaccatgcccagctaatttttttttttttttttttgtatttttagtagagacaggctgttactcaggagttccttcgattttttttttttgtatttttgtatttttgccattttggccaggctggtcttgaacccctggactcaagtgatctgcttcggcttgccaaagtgctgggattacaggcatgagtcaacgtgcctggccaaagctcatttctttttaaactactcatttatctttcaatgtagacatgaaatctgcactataattttcattttcaggtcaaaatgtaatcatcttaatccctcatattcaaacaattattccatcagcatcagttttatgaattgagagatgttttcccaagtaaaaatgttctggatttctgtaggaatccgtgtggaaatgaaaccatttgccctgtgccacgcagcacaggactgtcccttctcatgttgatgagatgcagagcagccccgttctggaagattccttgcagccttggctggcagccggcgtccgtgcctcccaagggttcttccctctgtcgtttgaagggttcttcgtgatgccacagcgtgcccgaggctccctcagtgacgagcgcgatttgcaggggtggccctggcagaaagggttgggaaggtacagacctccacagagactgtgtgtgctcatttccgtggaaaaaggacaaggaggcagcaaagacagacccagcagcccaggaaagattcaaatgcgattttacagaacatctgccctaagtcaaaaccaaagaaggattcctttttatcaaaacttcactaacacagaacatgaaattgtttggctcctcctgctcatggagttacaggacctagaaggcgtgatggatggaggatgtcaaatgcgattttccaggaatcgcaatctgtgagtcagggagaagcagcggagggcaagagccagttgaaggaatttgtttttcttctttccttctagttgcctcttgaagtggatttaactaaagcgaagagacaagatcttgaaccgtctgtggaggaggcaagatacaacagctgccgaccgaacatggccctgggacacccacagctgcagcaggtgacctccccttccagacccagccatgctgtgataccggcggaccaggactgcagctcccggtatgcggcctaagtcccctcctttcctctgcggcccctcctgtgtcacggggctgcctccactcaggcctccagagccagccagccgtgcgtgtcctcccagcagccgcggctgttgctcaggagcccgtcctcgccgccgccctctcatgcagaagcctgagctcatccgccgtggagagcgaggccacgcaccagcggaagctccggcagaagcagctgcagcagcagttccgggagcggatggagaagcagcaggttcgagtctccacgccgtcagctgagaagagtgagggtgagcgaggggtgggagcagggccctgggaggcgtctgcaggaggaagtgtagccgcagggtcttctgattctctgcggtaaccctgggccggctccaaaccaggcctcgctgggacttctctcaagctacacgcaggagagatgagcccaggaaattcagatatttaaatctgctgtacattttcccgtttctaaagacaatgatttcttttttcccccgtggaactaagtgggccttgataaaatcttctagaattagaaatttcagggtaaagaacttttttttgcttcgaatgctttggccatctctacattagaaagccttggccgggcacggtggctcatgtccgtaatcccagcactttgggaggccaaggtgggcggatcacgtgaggtcaggagtttgagaccagcctggccatcatggcgaaaccccgtctctattaaaaatacataaaaattagccaggtgtggtggtgcatgcctgtggtcccccctactcgggaggctgaggcagaattgcttgaatccagaaggcagaggttgcagtgaaccaagatcgtgccactgcactccagcctgggcaacagagtgagaccctgtctcaaaacaaaaacaaaacaaaaaaaaaacaagccttgtgtttctgagatatcttcgaatacaaggcaaaattgggattgagaataacgggaacttttggcagattatttatcaactttagtttatttcagagtccagattgagtgggaatagtgatacagatgccttctttctttcttctctgtctccccacctgttctctcctgcccatccagcggtaggtagtccttactcagagagtggaaacagagaaagggcttgtctcagacccatcgagcttttgcccagtttttccctacaaattgtgaagcagattcacagaggacttgcttcatggttggttcattcatatgcccctcagcaccgacaggctgaaattaacataaaaaccaaaacagaaccacttcctgtcctgtggatatccttactgttgagttattgcaggtgtttagcttcttaaccattgcagaagctcccgggtagattgtggaggaagctgccctccaggcctttcctgccccttggcagacaacccgagccattgttattttaatccatttcacacatcagattttggctgaagattttgtttgttggtttgttttcagacagggtcttgctctgtcacccagcctggagtgcagtggcgggatcagggttcactgcagctttgaccttcctgagctcaagtgatcctccttcctcagcctcctgagtggctgggactacaagtgcatgctaccacacccgctgatattttattttttgtagaggtggcgtctcgaattcctggtttcaagcgatcctcccaccttggcctcccaaagtgctggggttacaggtgtgagccactgtgcctggtcagattttagtttaagattttgtttgagcaagggttatggctgttaacaagcgagccagacactggattagatggcctgtgagaaaccttttacttttgctgtgaaaggagaaagaaacttgtttttcccactggtgagaagaattcaaaccacagacagatctgtaggtaggactgggactcgggaagctgaagttctttttactggcagaagcagcgcagccctaagcggtgttgtgcttcggagagtgttccctctaacaagaggggagtggacccacgctctgaaatcccatgcagtgatgtgatgatgacttgtcctttctctcctctgtgaaccgtagcagcgcctccggcccctcctgtgacgcacagcactcctgtaactgtctcagaaccactcctggagaaagacttccttgcaggagtgactcaagaattaatcagtaaataccttgaaatgcttgtaagctactgtgctgtatgtttctagtagccacagaataccttttaggcgacataaaaatcctcattttcgtgtggttttgttgagggggttctggctgatagcatatgtccagttcctctttggtcctaaccaaagggaagtgtacttttagggggaggggagagaaattccaaaaactttcagaaggtactgaagacatggaatttctgagggccagtttttccagtgctttctgtgagaatacttcattatttgctgatgacgcacttttccttgacctctgtagagactcttgaagacaactctgaaaagtgggctgtgactcccgatgcaggggatggtgtggtcaagccctcgtctagagcagacccagcccagacctctgacacattagccttgaacaaccagatggtgacccagaacaggactccacacagcgtttgccaccagaaaccacaagcaaaatctggatcttgggacctccaaacttatagcgctgaccaacgcacaacaggtagcagagaggtgtttaggcacaaaaattaaggggagatcctagctttaattctgggaatttttgaggaaggatgacatttcatttaaagtttgatagaatcgggaacttctattagggaatggtactgcaagtagaacagaattgatttaagagccagaacgtttcctttgggctcctgacttcaggtgcagcccttttcagctcctgataatagcaggaagcggaaacgactgcatggagagctgtccctcccagcagcaggtctgtcatgagcacgaggccacttggtctaggagaatcatctgccttcctcctaacagtaattctcattcttgggcttagtctaaattaggatcattaatataatccagaaatcattagctgtcagtttattttaaaattatggcagctacatttaagccattttgtcttccataggaaactgggaatctcataggaagagccaggacatgaagaaaaggaaatatgatccatcttaactgaggctcaggccacataattggactctgtcacaaagggactttggaaaactactttttggtcatgaaattgttcatcgctgctggagaatgaacgtcattgcgatttatcttgcttcattctgaaccttatcaagaggatctgactgagagcccactgcagttagagctgagcacttttgaaaagcttgtccatcactctagtagggagaggctctggacagatgaataccttttcttcggcttgtgaggcttcccactatttattactgaactattatgttaatgaagatggacattttaggaatcaccaatggctccttgccctcaagcaatataggccagacttggtcctaagcacctgcctcagcaattgtctacattcagttgttttgcataacgtctgccttctttcctttacggtccatgcctttaatgttgcccacattaagcactgtggatcacgacaggaaaaaggttggagcagtgcttttcactactttgtatcaatccaggctacaatcttcatttaatataaataatttatggatttatgacattacaatcctgcattgtttcaagactgacattttttcctaaggaaggaaataatcatctaagaccacgaaaaaaggctgttttttgtttttttttttttttttttttttgagacggggtctggctgtgttgccctgactggagttcagtggtgcaaacacagctctctccacaacctcttgggcccaagtgatactcccacctctgccttacaaaatacagggattactggtgtgagccactgtgtctggccagaaaaggcatttttgagaaagcaaatcgtataccttattaacaaaatagaatatatatatattgcttatctgaaatgcttgaaaccagaattgttttgcattttttgaatatttgtatacacataatgagaccttggggatgggacccaagtctgaacgtggaattcacctgtgtttcgtgtatatgcctcatacacataattttgtgcatgaaacagagtttttgtataagaagatacactgcagctgaagagggctgggtttttttttctcttagggtcgctgcataaactgttgtatgcctggtgctttgcgacttgtcacacgaggtcacgtgtggaattttccacttctggcatcacgtcagtgctcagaaattttctgatctcagagcatttcaattagggatgctcaaacgcaactgtttctacttccccatttcaggtgtgagatgtaacccaccttgaccataaattggcttttcatagtgctcagatgtttcataattcttcccccaaaataatgaagtttgcagtttaacaactttttttttgagagggggggtctggctctgtagcgcaggctggagtgcagcggtgccatcttgactcattgcagcctccgcctgccaggattcaagcaattctcctgcctcaggctcccgagtagctgggattacagacacccaccacgacgcccgactaatttttgtatttttagtagaggagacggggtttctccatgttggccaggctggtctcaaactgacctcaagtgatctgcccacctcggcctcccaaagtaaaaagtactagaattataggcatgagccattgcgcccag

SEQ ID NO: 15757 - DNA, 77509 bp, Homo sapiens
gttccctcccaggatcgacatgcacttggatcattgcagtttctgggcctgctgtcatctcccccttcagtacttcccacatatgactaccaactgttagacgatgtgctgctgccagaccagcctttcatttcttggacatccggctatttacccaggaaaagtcatcctttgactatttttcatgacctttctcatctgactcgtgatctgcccatcttgttactccctagcagtgtggtaaggtaagagaaaattcaactaggagtcaatagatatttctgttctcattctcccactgtctacttgtgtggcctcaggcaattcattctacttgtggtcttacttaactgtaaagtgaggtttgaagtaggtgtctgagatacatcatgtccttaaaatatgtggatctggagaattaagttgctaagcgctatgttatacacggaaatactgtcctaacacagattcagatttttgttttttattttttgccaccacactggcaaaaaatattatttcctgccctgctccagttatcttttttaaaacctacgtttaggatttttgattaaagctagctaaccgagcacatgtatttactgtctcttcttcctgagaccccataaaatgatgataaataaaagtgatacaaaatagaaaatgagaagggggacatcggaagataatttttttttatttgacatgcaaaaagtaagtgtggtctgacaaaataaaatggagaaaagcataatgtagaatgggtgtagagggtgctgtagaaaggaaggggacctgtcagcccagaagtgctttagggagacggagatttggagataactaccagacagagcaagagtgagaagcagagttgagaccagggagactaaataaaggtctatataaggaagagcagaaccctccctatatctcagatacaatatctaggcatttatccaggctaaaattaagcactctgataatctggggagatttgggttaactgagtattgaagggcctaagagtaaagtattctttattctagcacaatagctggtttcctacccacccactttaaagtgtagttgggcaagttggcaggaacttcctgctatggtttggatatggtttttttgtctctaccaaatctcatgttgaaatttgattcccagtgtgatagtattgggaggtgggtcctgatgggaggtgtttgggtcatgggggcagattcttcatgaaggacgtggtgtcattcttacagtagtgagttctcacacttgcgaaactatgttggttatcaggagaatggatttgttccttggagagtggtttgttgtaaagccaggactcacctcgggtttgatttctctttgcatgtgcacagacacttttccttgaccttctccgccatgtcttgatgcagcacaaaaaccctcaccagaactgagcagatgctagtgccttgcttcctgtacagcctgcagaattgtgagctaaacaaacccgttttctttataaattacccagctgcaggcatgcctttatagcaacataaaatagactaagacacctcccaagttcacaagactccccatcagcattccaactgcctcatacgtatgaacagacaactaagtgttattaggtatttaagaaaagtctccaacatggactgtgggggcagataaacagaaacttcagagaatttagaaaggaaaacctaattagtatactaggatactcagatgaagtaacaatccaaggtttaaaaatagatcttgaaatttaaaataaattgccaaattataaattcaattaaaatattgaaagataaagtcactgaacttttaaagaaaatagaagaagcctgggcaacataatgagaccccatctctttaaaaatgttttaaaacttagccaggtatggtgatgcgcacctgtgttcctagctattcaggaggctgaggtgtaagtattacctcatcctgggaggtcaacggagcagtgagccaggatggtggtgctgcaccccagcctgggtgacagagcaagataccttacttcaaaaaagaaaagaaaatagggctgggtgcagtggctcgcgcctgtaatcccaacactttaggaagctgcaccccagtctgggtgacagagcaagagaccttatttcaaaaaagaaaaaagaaaatagggccgggtgcagtggcttgcgcctataatcccaacactttaggaggccaaggcaggcagatcgtttgagcccaggagtttaagaccagcctgggcaacatggcaaaaccctttttctacaaaaaaatacaaaaataagtcaagtatggtggcatatgcctgtaatcccagctactcaggtggctgaggtgggaggatagcttaagcccaggaggcagaggttgcagtgaactgaaataacaccactgcactccagcctgggcaacagagccagatcctgtctcaggaaaaaaaaaaaaaagaaaacaataaatatacaaaggggtggaaattgtgagagaaaataagataaagaattagttcaacaggactaatattatgtgaaaaagagaaaacaaagttaatgaaggacagaaaattattgaaaaaataatgcaagacaatttcctagaactgaaagaatccactagtgcagaaccaaaagaaaaaaaaaattcaaccatgtgaaatgtttgaactctaaatataaagaagattctaagtttccaaagaggaaaaaaaggagcccataaaaggacaaaaatcaaactggcgggctgggcacggtggctcacacctgtaatcccagcactttgagaggctgaggcgggtggatcacgatgtcaggagtttgagaccagcctggccaacatggtgaaacctcgtctctactaaaaatacaaaaattagccaggcatgatggcgggcacctgtaatcccaactactcaggaggccgaggcaggagaattgcttgaatccgggaggcagaggttgcagtcagccgagattgtgccattgcgctccagcctgggcagtgagcaaaactccatctcaaaaaataaaaataaattttaaaaaagagttacttaaatgtgtgctcaagcaaaatgagggagaaatcagggtatctgacaacatccagtaatcactagatccaattcaggaaaacagtaaagggaagtcccaggaacttagttagattggaacagaagggtaggagttctgggagagaaaacgcccggaaaagagagaattaaacagaataatcagttactatgataaaaaaaaaaaaaaaaagcttagaagatgctgcttttaggggtttcaacttttacacccaacctattaatgaagcatagtcttgctatcgttaaaacagtttaggctcagtaggtcacatctgtaatcccagcacttctggaggctgagacaagaagatcgcttgaggacaggagtcagagaccaccccagacaacacagcgagaccctgtctctacaaaaaaattttaaaaattagccgggaatggtggcacacacctgcagttcttagctacttgggaggctaaggcaggaggatcccttgagcccaggagttcaaggctgcagtgcactataatggtaccactctccagcctgggcaacagggtgagaccctgtctcaaaaataaaaacaaaagcaggctggatgtggtagttcactcctgtaatcccagcactttgggaaactgaggcagaaggattgcttcagcccaggagttcaaagccaacctgggcaacataacgagaccctgtctctattttaaaaacaaggccaggtgcggcggctcacacctgtaatcccagcactttgggaggccgaggcaggtggatcacctgaggtcgggagttcaagaccagcctgaccaacatggaaaaaccccatctctactaaaaatacaaaattagccagacatggtggcacatgcctgtaattccagctactcaggaggctgaggcaggagaatcacttgaacctgggaggcagaggttgcagtgagctgagattgcgccattgcactccatcctgggcaacaagagtgaaactctgtctcaaaaaaaaaaaaaggccaggtgcgttagctcatacctataatccagcactttgggaggccaaggcgggtggatcaccaggttaggagttcgagaccagcctgcgcaagatggtggaatactaaaatacaaaaattacaaaaattagttgggcgtggtggtgggcgcctgtaatcccaactactcgggaggctgaggcaggagaatcgcttgaacctgggagccggaggttgcaatgagcaagactccgtctcaaaataaataaataaataaatgttttttaaaaaaagtggtgcttgaacaattgaatatcacatgcaaaagaatgaagttgaacccatacctcacatatatgaaaattagttcaaaatgaatcaaagacctaagtgtaaagcttaagctaaaatactcatagaagaaaatataggtataaatcttcatggctttggattaggcaatagtttcttagctgtgagaccaaaggacaagtaacaaaagaaaaaaattgagaccaggtgcagtggctttatgcctgtaatctcagcactttggtggggccaaggcaggagggtcacttgagccaaggagttcaagaccagcctgggcaacataaagagacccccatgtctgcaaaaaatttgaaagattagctgggtgtgttggcatgcacccatagtcccagctacttgtgaggctgagacagaaggattcctcgaacccaggagatcaaggctgtggtgaaccatgattgtgccactgtactttagcctaggtgacagaccaatatcctgtctccaaaaaaataaaattaattggacttcatcaaaatataaaacttttgtattggccaggcatggtggctcacgcctgtaatcccagcactttggggggccgaggcaggcggatcacaaggtcaggagatcgagaccatcctggctaatactgtgaaaccctgtctgtactaaaaatacaaaaaattagcctggtgtggacaggcgcggtggctcacgcctataatcccagcactttgggagactgaggcgggcagatcacaaggtcaggagattgagaccatcctggctaacacggtgaaactccatctctactgaagaatacaaaaaattagccgggcatggtggcgggcgcctgtagtcctagctacttgggaggctgaggcaggagaatggcgtgaagccgggaggcggagcttgcagtgagccgagatcacgccactgcactccagcctgggcgacagagcaagactccatctcaaaaaaaaaaaaaagtcttttgtattattcagccttaaaaaggaaggaaattctgacatatgctacactgtggatgaaccttaaagaccttacactaagtaaaataagccaatcataaaagtatagatcttatatgattacattcatatgaggtacctaaagtagtcaaatttatagagacagggccaggcacggtggctcacatgcatataatcctagcactttgggagcctgaggcaggtggatcacctgaggtcaggagttcgagaccaacctggccaatatggcgaaatcccatctctactaacaatacaaaaaaattagctgggtgtggtggcaggcacctagaatcccagctattcgggaggatgaggcaggaaaatcgcttgaacccgggaggcggaggttgcagtgagccgagattgcatgacttcactccagcctgggcaaaagggcgaaactctgtctcaaaaagaaaaaaattcatagagacagaaagcgtaatggtggctgccagaggacagagggagggggaagagggagtgtttaatgggtatagagtttccgtttgggaagaagaaacatttctggagaagataagggtgatgtctgcagatcattgtgaatgtacttaatgccacagaactatacactgaaaaatagttaaaatagtaaagtgttatgttacttacattttaccacaataaataaatattttaaaacttatgtgcatccattacactgttaaagactgaagtatattcctccaaaattcatatgttgaagccctaactcccagtgtgactatatttggagatgaggccctgaagagataatgaaggttaaataagtcataagaatggtatctaacccagtaggactggtgtccttataagaagaggaagagataccagtgacaaacatcagagaaaaggtcctgtgcagatccaagaagatgcagccggccgcgtgcggtggctcatgcctgtaatcccagcactttgggaggccaaggcaggtggaccacctgaggtcaggagttggagaccagcctggccaacatggagaaaccctgtctctactaaaaatacaaaaattagctgggcatggtggcgggcacctgtaatcctagctacttgagaggctggggcaggagaatcatcacttgaatctgggaggcagaggttgcagtgagctgagatcacgccattgctctccagtctgggcaacaagggatgctccgtctcaaaaaaaaaaaaaaaaaaaaaaaaatcttcaggaaaaaacaacctgctgacaccttgatcttggacttccagattccaaaattatggcaaataaatttctgttgcttaaaccacccaaactgtattattttattatggtatccctagcagaataatgtagacttttatgccaagaagtggagtgctgctgtaataaatactttataaatgtggaagtaactcaggaactggataatgggtagagagtgaacgagttttgaggtgcgtgctggaaaaagcctgattgagccgtgtgcagctgctcacacctgtaatctcagcacttcgggaggctgaggcgggcggatcacttgagatcaagagttcgagaccagcctggccaacgtggtgaaaccttgtcttcactaaaaatacaaaaattagccaggcctggtggcacacgcctgtaaccccaactactggggaggctgaggcaagagaatcgcttgaacccgggaggtggaggttgcagtgagccaagatcatgctactgcactccagcctgcttgacggagtgagactctgtctcaaaacagaacaaaaattagcaggcatcgtggtgcgcacctgtagtcctagctactcagggcaggggcgggcgggggtgtggggctgaggtgggaagatcacttgagcctgggaggtcgaggctgcaatgagccgtgatcccaccactgcgctccagcctatgtgacagaacaagaccctgtcccccccgccaaaaaaaaaaaaaaaaaaaagtctagattgtcttgaagagattgttggtaggagtaaggaataaaggtgattctggggaggtctcagacggaaattaggaacatattatcggaaagtgcgggaaaggccatcctttcttccacaaagaatttggccaaatggtgttctagtgttttgtggaaagtgcaggttcaaagtgataaatttggttatttagctgaggagatttctaaccaaactgttgaaggtatggcctagcttcttttggttgctttagtaaaatgtgggaagaaagataaactgagggaattattaagcaaaaacaaaacttgaagatttgaaaaattctcagtatttcatagagattataggtgcaatttacaaatttattcagctttctcagcgcaagccaggaagagagatgagattataccagcataaacactgtcatcttggactaaaggggacacaggacagaaggaaagaaggctgtcgtaattctgggatcctaaaggatgaggcaacagagttatctggctgtgaacacatgttaccctttaagaaaagggaagactgatcccaaaggagattcagttagcaacaaggctgccattcgaactgcaggcccagaagatacaggtctggggagctaagatgtctcctcagttccagaaagtcaagctgctgccatccagtgcctcagaggcatggctgctacccaggaccaatagggccaacgtggtgatgctgcctcccccgtggccctagaaggcaagcctgctaatccactgggccaggagggcagagcgtcaagccaaagacaattattcttcagccttaaagttcaacagaatttgccttgctaggttttattttattttattttattttattttattttatttatttatttattgagacagagtctcactcattctgtcgcccaggctagagtgcagtggctcagtttcagctcacttcaaccttcacctcctgggctcgagcgattatcctgcctcagcctcctgagtagctgggattacaggcgcgcaccaccacgcctggctaaagtcttactaggttttgaatttgcttgggacccatgtccccatgtccctgtcttctttccattttttgcctttggaatgggaatgtctgttctatgcttgtcccactattatactcaggaagtacataactggcctggtttcatacattcacagtcagaaaggaactttgccgcagaatgactcatatctcaagtatcacccacacctgatttggataatatttattttgggtttttattattgttgtggtggtggttgtggttgttgttgttttgagatagggttgcactctgtcacccaggctggagtgcagtggcacaatcttggctcactagaacctccgcctccctggctcaagtgatcctcccacctcagcttcccaagtagctgggactacagccacttgcccccacatctggctaatttttttttttttttggtagagacgggggtttcaccatgttgcccaggctggtcttgaactgctgacctcaagctatctgcccacctcagcctcccaaaatgctgagattacaggtgtgagctaccacacctggctatgatttagatgatatttaaatgagcctttggacttagagttgatgctgaaatgaggtaagacttttgcggctgttgggatcaggataaatgcattttatatgtgagaaggacatgaactttgggggtccagaggacagaatattatggattgaattgtattcccccaaaactcatgttgaagtcctaatccccagtgaggtcatacccagtctgtggtattttgttatggcagccctagccaagtaatacagacactgtcaagaaagtgaaaaggcacccaggcgcggtggcatggtggtgcatgcctgtaatcctagctactcaagaggctgaggcaggaggcctgaacccaggaggcggcggttgcagtgagctgagatcgtggcactgcactccagcctgggcaacagagcaagactctgtctcagaaaaaaaaaaaaaagaaagaaagaggctgggtgcagtggctcatgcctgtaatcccagcactttgggaggctgagacaggcggatcacttgaggtcaggagttcgagaccagcctggccaacatggtgcaacctcgtctctactaaaaatacaaaaattagccgggcatggtggcaggcacctgtaatcccagctactcgggaggctgaggcaggagaatagcttgaacccgggaggcagaggttgcagtgggccaagatcgcaccattgtactccagcctgggggacaagagtgagacttcgtctcaaaaaaaaaaaaaaaggaaagacaacacaataggagacattttgcaaatcacatatccgatatttttttttctagcctatataaataactctcttccctccccttccaccccccgctggccaagatggagtctcactctgtcgcccaggctggagtgcagtggcacaatctcagctcactgcaacctccgcctcgcaggttcaagcaattttcctggccttagcctcccgagtagatgggattacaggtgcccaccaccacgcccagcaaattttcgtatttttaatagagacggggtttcatcggcacgatctcggcccattgcaagctctgcctcccaggttcatgccattctcctgcctcggcctcccgagtagctgggactacaggtgcctgccaccacgcctggctaattttttgtatttttagtagagatggggtttcaccgtgttagccaggatggtctcgatctgctgacctcgtgatccgcctgcctcagcctcccaaagtgctgggattacaggcaggagccaccgcacccggccaagagctgccataataaaatactgcaaagtgggtggcttaaataacagaaatttattttctcacagctttagaggctagaagtccaagatcaaggtgctggaaatttggtttattgtgaggcctctcttcctgattgcagacagccatcttctcactgtgtcctcacatggcatattctctgtgtatgcacacacacacacacacgcacagagagagagagagagacggcacatgtggtctggtgtctcttctgacaaggacactagtcttatctgttaagagccccattcttacgtcctcaattaaccttttttttttcttttcgtgagacagagtctcactgttgcccaggctggagtgcagtggcatgattttggctcactgcaacctccacctcccaggttcaagcgattcttatgcctcagcctcccaagtagctgggattagaggcgtgtatcaccacgccatgctaaatctttgtatgtttagtagagacggggtttcgccttgttgccctggttgttcttgaactcctaagctcagacagtccacccacctcggcctcccacagtgctaggattacaggcgtgagccaccatgcctggccgcatcatttaaccttacttacctctttaaaggcccttctccaaatacaggcacattgggggttagggctaaaatctataaatttggggtgagcacaatttcagttcataacaattacctgtgggggtgggtggaattgatgggaatggtaatgagatttccctgagcacacctttttttttaaagttttacattttgaatcatatacatggcttatatctatatctatctgtctgtctgtctatctatctatctatctatctatctacctatcatctactttttttttaagagacggagtctctgtcacccaggctggagtgcagtggtgcaatctcagctcactgcaacctctgcctcctgggttcaagcaattctcctgcctcagcctcccgagtagtttggattacaggtgtgcaccaccgcctcctgggttccagtaattctcctgcctcagcctcccgagtagctgggactacaggtgcacgccgccatgcccagctaatttcttttgtattttagtggagacggggtttcactgtgttgcccagactggtctcaaactcctgagctcaggcaatctgtccaccttggactcccaaaatgctaggattacgggcctgagccacctcacccggccagtttatatatttttaagaacttaattcaaaaatgatgaagcaaatgaacctagttatataaaattgacactatagccacactgaaaaaattttaattcaagttacatttgaacatagtattctgactgcacatccttaattgtatgtagtttaagaactacaaacggccgggcgtggtggctcacgcctgtaatcccagcactgtgggaggccaaggcgggcagatcacgaggtcaggagttcgagaccagcctgaccaacatggtgaaaccctgtgtctactaaaaatacaaaaaaaaaagaaaaattagccgggcatggtggcattatctaaatgtctttggaaagatagtccagaacgaaaggacagttggtgcctctactcaaagggattgaagaaacatgagaccatggaaaactgtatctcagtagccagtctgtgggacattctataagacaactggcctggaatcattaaaaatatcaatcagtgtcaatgtcactgtcattgtagcaaatgttgtcagtgttctgcccatattcactcaacttgatcatttcaatgtcccattcacagctgatgtcccactcataggttttgcatttctttgctcaagggcttaaacccatgtctaaggcagagaattaataccctcccagggggcaaccctcaattagtgactgataaaagtcagtgtataaatattccagctccctcaccctctgagtgagataactctgaaatatatggttacactagttccctgagctccccaacattcccaaagcagtgttcagtggtgactggcttgataacacacgctattgtctgctttctttccctgtctcacttccccgttacctactggtgttgttagagtgggtagataggcagataggagcagggcaggatagggtcccaaagaatgtcagacaactatcaggtgactgccaggcaaatgtcaggcagctggtcaaaggggaggggaaattttcctaataaacaggagacatcttgggcttgtgggcaacaacttcttggtaagaacttgaaatggtggagtttgaccttcctcaggggacatggccaggcaagcatggtaaggtgcaaaatggcagcgtttgacccatatgtgaccttcctctgggggcactagaccaataagggaaaattgccctaagagagcatgcacgtaacttcagtatggcacatgtgcccctcccagatactagcaagacattgcacatgcagcaattagccaacagcctgccaagggggagggacaagaggaagagacgggaaaagtcagaaaatagcaaatctgcgagtcctgagccagcaatcaggcagagtactgaatttttgagttgcctgcttggttccttacatgtgtgcttttatttgcttcagtgaattcttgtttctgccttaaatctacttctgtctcagccaaattcattctcccaagaagacaaggatcgaggactgtggagccaactcagactcgccacggctaacaatgtttcctgggatcgcctcccaaataaactgcttgtacttgaacccttgtctcagagttgactactggaagaaccccagataagacaatctgcgagtagacatgtcagataatgcagttagatatgaatctggaattcagaggagaggctcatgcaatttgcaagtcatcatcaaaaagatgtcatttgttctgtttgtctactgcaggaagacagattaccctaaaatttagtggctgaaaacaactctattttatcgtagcttacaattttgtggattgggaattagagcctgtctcatctgggcaactcttctgttccccatggcatcacctgaggtcactccatggtattcagctaccagacgaactcatctggagtatccaagtattcattcacgctcatatctggcaccttggcagggatgactggaagcctgggctcagctgggactgctgaccatagtacctacaaatggcctcttcagcatggcttcttaaatggctgctcggagctaccaagagacaggaagtagaagctgctagtttcttaagacccagaaatggtacaatttcattcctgccattggtcaaagcagtcacagagccttccaagaggaaacacagaccctcacttctcactgggaagtatgtcaaagagtttggggctttttttttgagaaggagtcttgctctgtcgcccaggctggagtgcagtggcaagatctcggctcactgcaacctctgcctcccgaattcaagcaattctcctgctttggcctcccaagtagctgggattacaggcatgcgccaccacacccggctaatttttttgtatttttagtggagacggggtttcaccatatgggccaggctggtctcgaactcctgaccttgtgattcacctgcctcagcctcccaaagtgctgggattacagacgtaagccactgcgcccagccctggggctgtctttaatccactacaacattgcaaagctgtgagccaggatgagaacgccagaggtatgaatgtggattaaaagtccaagcactgaaactttcaatgtttagagaccagtgagagaaagaaccagcaacagagactcagaactatatcatattctgctgataagccaataagatgataatgataactaagaattgacattggctttagtgatgtagacataattggggaccttgacaagagcagtttactgggggtggttgagttgaaactttgattgtttcaagagagaatggaatgagtggaaagatagtttgtgagtgctagcaattattcagagaatttctgctataaatgggagcaggaggatgtatcaggagctaatgggagaaatgaggtcaacattatttcctatgtagctttctcttatgcccaaattccactggatatcatccacttctggttacttctggtttgggatgtataggtgaaggaatagttttggatcctcctttattacctgttttatttgcataattggacaataactaaacttgctttaaatatctcttaaagcattttaaattcaaatttggagagaggaatatgagagtggtttttggtcattgtttagccatatacaatattgtcttaccttctgcatttgaagtttttgatacctgataaatgtttgtattgtgtagttgaacaagaatttgccacatgaaggtttacagttgtagttttatgttaagttctttacagtagtcccctctcatctttatcccccacttggaactatctacagtagttccaggacccccctcccagtggatgattgaaaccatggatagtaccaaaccctatatacatattatgtttttcctatacatacatacctatgatgtttaatttctaaattaggcggagtaagagatgaacaacaactaataatgtaatagaacagttgtaacaatatactataataagagctacatgaatgtggtttctccctctcaaaatgtgttactgtactcacctatctttggtccatggttgtctgtgggtgactgaaactgcatataaggcaggggactactgtaaccacaggtgttggaaggcagcatagcagagtagttagggtcaggactgcggaggaagactgcctaggttcatattatgatgtaaactctccatgcctcacttttcttatctaatgcggagataataatagtaactcatttgtaaagttattataagtattaaatgagaaaatacatgtaagacacttagagtatcacaggtcatcacttacttagtatgtagtaagtatttgatgaggttagttactattcttattgagcagtgaatcagttaggaatgctttcggctgcaaggaggagaatactgatttacagtggcctcagtgagaagcctgcatttctctcacagagcaggcactgcagaggtaggcagctgctaaaacaggttcctttctacagctccaggggtctgagttggccactcttcagttccctcggacctcccctgttgtttgccacaccaccaatcatcacattctcaaaggcattcaaggcagaaagctgggaacaaggaagggcggagagtttctcttcaggagcctccctcttactagagaagaaaaaaacctgccttttatgggttcttttgtcttgtttttcatgactgtcttcatttgagaaagtcctcaggccaagaaatggaggtgctggcagttggagatcaggctgtccatagcacactgatgtggcacaggcaaggaatatggctgaggcaccaatttgctgctactgctgtctaacaggcattggaagtcttatgtgttcaaaaataaacttctgatttctactcccaaacctgctcttcccacatcttccccgtctcagtaggtggcagctctatttgtccggttactgagaccaaatattagagtcctccttaatttcctctctctcatgcttcacattcagtttattaataaatcctgttgacagcctgggcaatatggcaagaatccatctcacaaaataaataaataagccaggtgtggtggtacgtgcctgtggtccccggttactcgagaagctgaggctgaggatcagttgagcccaggagttgaggctacagatagctatgatcacaccactgcactccagcctgggcatcagtgagagcacatttcttaaaaaaaaaaaaaaaaaaaaaagaaggactgggcgtggtggctcatgcctgtaatccgaacattttgggaggccgaggcgggcagatcacttgagcccaggagtttgagaccagtctgcacaatatggtgagacccctgtctctacaaaaaatacaaaatttagctgggcatggtggcacatgcctgtagtcccagctactcgggaggctggggcaggaggatctcttgagccagggagttggagattgcagtgagccaagatcacaccactgcactccagcctgcgcaacagagccagactgtgtttaaaaaaaaaaaaatcctgtcagatctacctttagattatgtccagaattcaaccactttcatcatctgtatcattactacactgacccaatccaccaacatttcttgcctgtattatttaaaatttctggccaggtgtggtggctcacacctgtaatcccagcactttgggaggcccaggagggtggatcacgaggtcaggagatcgagaccatcctggctaacatgatgaaaccccgtctctactaaaaatacaaaaacttagccgggtgtggtggcgggcgcctgtagtcccagctacttgggaggctgaggcaggagaatggtgtcaacccgggagggggagcttgcagtgagccgagatcgcgccactgcactccagcctgggcgacagagcgagactccgtctcaaaaaaagaaaagaaaagtttcctaactggtttttgtgttttcttcccctttccccccatgatttaaaagctaggttatattctgtcactttcttgcacaaaattctccaatgacttccagtctcactcggagtaaaatccaaattcttaggatggcctataatgtcctacaaaatttgccccctcattgactctttgacctcatctgctagtctcctagctcattctgctccagttgccccaatttccctactgttcccccaaccatgccaggtgtgcccccacctcaagagcggccctttttttttttttttttttttttgagacggagtctcgctctgtcgcccaggctggagtgcagtggtgctatctcagctcactgcaacctcggcctcctgggttcacgccattctcctgcctcagcctaccgagtagctgggactacaggcgtccgccaccacgcccggctaattttttgtatatttagtagagacggggtttcaccgtgttagccaggatggtctcgatctcctgacctcgtgatccgccctcctcggcctcccaaagtgctgggattacaggcgtgagccaccacgcctggcctaagagcgacccttctaatgggcacagttttctgccaggttgcctcaaggcttgcttccttacttccttcaggtctcacatgtcaccatgcctgagccttccctggtgcccctatgtgaaacagccattttctcatgcactttctgtccccatatcctgttttatttttctccacctgatatactatatgtgtatttatatatatatgtgtgtgtgtactatgcttgcttatcttcagtctcccccactgaaatgtaagttccatgagagaagactttcttgtattacctgtttcacccctagtgcttggaacgtaataggcacttgaagagcatttcctgaatgtatacataaacaagcaatattgcatgttagcgttgcctcaagatttgtgcttattcctcccatattttgtgattaattcccctctacctactcccaaaatgagattattaaatcaaaaggtaaaggtactttgggaggccgaggcgggcggatcacgaggtcaggagatcgagaccatcctggctaacacggtgaaaccccgtctctactaaaaatacaaaaaattagccagccaaggcagcgggtgcctgtagtcccagctactcgggaggctgaggcaggagaatggcgtgaaccccggggggcggagcctgcagtgagccgagatcgcgccactgcactccagcctgggcgacagcgagactccgtctcaaaaaaaaaaaattccaaatagctttcaaaaacaaagcaattatgtggagagtatcatacgagttatacgttcttgttaggcattgtacttttaaactttttcacaaattttatagaaaagactagcaaaatttattatctttccatatttatttacaaccaataatagtagttttgaataaataattaattttttaaagtatttaaaaaacggaaatcttgaccaaaggctttctcaggtttattcacctttttggctgtgatctgaccatggctgcctgtaaccaaaggtgaacttactaaccccgctctgcacactgctgcttattttcctccgttaagtgcaatacctgcctccccagttcacgattctaagtcctatatattagcttatctttatatcttagttatataattctcacactagaggaaaaggcagtcttttctggctcaatgactatgtctttaaaaaaaaaaataccatgcccttccccacaatgttttcagtatcctataataatatgaaacaaaacaaaaggttgattaaaggaacgtacatattggttgcatcatagtcaccccaagggaaatattaggccccaatggaagtaaagacatataggttccttttcttctccaaccaaaggagcttgctgctcagagttcaaaatctatattttgcatatagattatctatattttatctttgcatatgcaatgataaaattccatggaaaaaaatggtgacatatgcacataaatccacttctatatacatacattttgactcttagaaacagctactatataacacaatcaagtatcgatttatttcctgtctctctctctctacgtatatatttggttcaaaatatatgtatttggttcaaagtctcagcaagggatgtacctggctttggttattgatgagaagagtaattaatagaacattccctttgctgtgataccctacccaaaatagctcggttgttggttcactttcttcagatacctccttgtctcatggaccgcctacttactcccaaatgccattctgaacaaccatttgtaaccacctcctcccaaatgccctctcccaactgcctttctaaatcaatgtttcactgtcctaatttcttactgttctttgcagttgtcattttaacctaagagctaattatctttgccaaacaccattcctaataggccaaactttcaaactgaaaaaagaatcttaggaagtcttttggtaaaaataaatgttcccttatttttggttattagtattttgttttttattttaaactatggatagcttcttgactgcctaagattgtgctacataaatatccagtaaccaccctaatcagcaaaatgagataataaaacaatcccaaaaggaatgtgagtaggactaaattatgactttttttttttttttttttttttgagatgatgtcttgttctgttgcccaggctggagtgcagtagtgccatctcaacttactgcagccttcacctcctgggttcaggtgattctcctgcctcagcacccccctgccccacccaggtagctgggatcacaggcacctgccaccacacccggctaatttttgtatttttagtagagacagggtttcgcatgttggacaggctggtctcgaactcctgacctcaggtgatccaccacctccgcctcccaaagtgctgggattataggcatgagtcaccgcgcccagccctaaattatatcaccagaaatggagtgggatatatgaagacaatgtgtctcacttcacactgacgcaaagtctgtcaacagaacagaagcaagaattcctgaattaagttatcaccagtatatatggaatgctgtctgataaacctctttacatagtttcttcattttacttttcccagattttgtacttcactcttaatatcgtatacacatactaaaatctttttttttttttaagagtcagggtcttgctctgtcacccaggctggagtgcagtggtgtgatcatagctcactgtagcctcaactcctgggctcaagatatcctcccacctcagcctcccaagtagctgggactacaggagcatgacagcatgcccggctaatttttaaattttatttttgtagagacaggggctccctgtgttgcccaggctggtctcaaacttctgggctcaagtgatcctcctgcctcagcctcccaaggtgttggaattacaggcttgagccaccatgcccagcttaaaattcttgtaatgagaacaactatggtcaaatgtaataaattgtgattatatatataataaaataagtaaaatgtctatttcatataatttatatgacaaatataatacaattagtgcagccccaccaaagtctcatctaaataaaattattgactattatacttttggtatgaatcagttctcattgtgagaatgttaaataattctttgactggtgttcctgggatgcaaatatatgtagttgttcctcagtatctgtggtggattggttccagcaccccctttcaaaaccaaaatctgcagatacagttgctgatatgaaatggcatagtatttgcatataaactacgtacatcctcctgtatactttaaatcacctctagattattgtaatatctaatacaaagtaaatgctacgtatattgttatactgtattgtttagggaataatgccaagaaaaaacagtctatacatgttcagtacagatgcagccatccattttcttgtccaaatattttttatctccagttggttgaatccattgatgcagaaaccacggatacggagagctgactctgtgtgtgtgtgtgtatactcaccaattctttatttattcaacaaatatttattgaatttctactatgtgtgaagcatagttcacgatcctggggatatagtagacaagctccttgccttattgagctcacattcttatggggaagggcaggttcagggccttctcagatctttgctgggcatgcacacagccctatgcatatgctgctttgtggattcccacaatgagttgaagcttttcaaagctcctagggacgtaccattctctggcttttccttttgagctttaggttagccttttgtttgccctaatatcacccactactcaggcaggaatgaagtcaaacaattgtcttgaaatattttcaataaatgcctctggagaaaagggtttttatttttttagccctggataagatcctggttaggttaaataaaggcagccttgcaagtggggtcttcccgggaagcaccagacagacaaataactacagtaccatgagaatgaagctttgaaggtgctctaaccccattctgccttatctagtggctgccaggttcctggggtcaccaggattgtggactgttggcttccaaggctgccagggagctggagaaagggggatggaaataggatagttaaaatgccacaaacctctttgtttttactaagattcaaccatttgtcttgataaatgcctcccagattgctgcaagcaagcctttggttaatttccagagttctgataaacttaatactatcaatttttgtcagttttgtacttgcttttatggaggaaagaattgtgggagtttctttgtcattttcactgctaacactcatagggatgaatcttacaaacttaatgtcatggaatgaaatgggaaaggcataaaatagtacatagggcataattccatgaatataaagctcaaaaataggccagacacagtggctcacaccagtaatcccagcactttgggaggccgaggtgggaggacagcttgagcccaggctggagagcagaggtgcgatctcggctcactgcaacctccccctcctgggctcaggtgatcctcccaccccagcctctcaaatagctgggactacagacgtgtaccaccacacccagccacaaaaagtttttttaattagctgagcatggtggcctgcatctgtagtcacagctactcaagaggttgaggagggaggatcgttggagccagggaagtcgaggcttcagtgaactttggtcgcgccactgaacttcggcctgggtgacagagaccctgtcacacacccacaaaagttcaaaaacaggtaaaactaaatgacataggcagggatgtgcatataggtgataaaatgctaaagaaaatgaagaacacaataaccgtaaaatccaggatggtgcttcttgagaattgggaaggggtacccactagccacctagtgagctaggtgatggttacgtgggcagtaatttcacacctatttgttaaattgtacttatatgttttgtgaactttttttttttttttgagacaaggtcttgctctgtcacccaggctggatgagtgcagtggtacaatctcagctcactacaacctccgtctcctgggctcaagcgatcctcccacctcagcctcccaaatagctgtgactacaggcaggcgccaccatgcccagctaatttttatattttcagtagaaacggggtttcaccatgttggccaggctggtctggaactccctaccttaaatgatctgcccacctcggccttccaaagtgctgggattataggcatgagccactgtgtccagaccacatttctttatgtgtattatatttcacaataaaacattttaaaattaaatagatacttcatttataatttgcaccaagcaggaagtgaacacattccacccacacagaactcagttgtatgccatcatatttaactacagcacagggaaaaataaggaagtgtagccaaaatagatttttttttttaccttgtgacgcaacagtaaaatagatgttataatatctacgcgttcaaaggagagcctcgccggccttatttaaaggctatttatttttattaatgtctaacatacttggtcttctgtttcctcagtagacagtaaactcctcaatattatttgagctcctaggacagatccgtgtctgttttgcttacaatagcatctctagcacttagccgattgtaagtgctccataatcattaaatcaagaatgactgacagcaaattaggaaaaaagggaaaaagttgatgtaagcaagtgcactgactgtaagtcaggaatggaaaaaaaaaagccaatagaaggcgaaaacaaacagaaaaccatgagcattagaatggagtaacggcttaaacaagttatcttttctcatataaaaaaatggaggtggcatggcagacttttgtattatcaggagcccaggctcccatctttctgcttgaccatcctcagttcatggtttctagtctcgaggtcacctcagggtccaagatggccatgaatattccattattatatccaggaataaggaagtcaagtaaaggggagcacaacatattaaggtgatttccagaagttccatacaacacccctatttacatattgggcccatcgcggtggctcacgcatgtaatcccagcacttagggaggctggagtgggaggatctcttgaggccaggagttcaagaccagtctggacaacataacaagacctcaactctactaaaaaatttttaaaaattaaccagttgtggtggcacatgcccgtccagaggctgagttgggaggatggcttgagcccaggaggttgaggctgcagtgagccatgatcgtgccactgcactccagcctgggtgacagagggagatcctgactcaaaaaacaaacagccaggcacagtggttcatgcctgtaatcccagcactttgggaggccaaggcgggaggatcatgaggtcagcagttcgagatcagcctggccaacaggcgaaaccctgtctctactaaaaatacaaaaattagccaggtgtggtggtgcatatgtgtaatcccagctacttaggaggctgaggcatgaaaaatcacttgaacctggaaggcggaggttgcagtgttctgagatcgagacagtgcactccagcctaggcaatagagtgagactctgtcttgaaaaaaaaaccaagcaaacaaacaacaactacaaaaataaaaaaaccccaaatacatcttattggccagaacatagtcacctgttcaaatgtaaatataaggaaagtagggaaatacagtctcttatcagggcagctaatactggggattctgttcactagggaggaggacagatcagatttggtaggcagcattagcagggaggaggacagatgagatttggcgggcaacattagcctctgccacagggagaatttgatcagaagcaaatagatgaacctgtacgcatcaagaggttctgagtacagcataactctaatacataacaatacaaagcagtcgtacttgttaataatgcaaattctgagacatcaagaaaaatattaaattacatgtaccaatcttctgtaaagaaagcaaagatgtggccgggcacagtggctcacgcctgtaatcccagcactttgggagtcgaggtgggcggatcaccaagtcaggagatcaagaccaacctggccaacatggagaaaccccatctctactaaaaatacaaaaattagccgggcgtggtggtgcgcacctgtactcctagctacttgggaggctgaggcaggagaatcgcttgaacccaggaggcagaggttgcagtgagccaagatggcgccattgcactccagcctaggcaagagagtgagactccgtctaaaaacaaaacatcaaaaaggaaggaaggaaggcaggcaggcgggcaggcaaagatgagtataatacattttctgaagaagtgtatccaaaatattgaatattgaaaacttagagcacatagaggctggggaggtaggccacatctgtagccccagcacgttgggagtcccaggcaggaggaacacttgagcccaggaatttgagaccagcctgggcaacataaggagacatcatttctataaacataaaaaaattagctgggcgtagtgcatgcgcctgtggttccagctttttgggaagctgaggtgagaggatctcttgagttcagaaggttgaagctgcagtgagctgtgactgtgccactgcactccagcctgggcagcagagccgctattgtctgtcatccaggttttgcagtaggaatctgattgttttttttgtgttgttgttgttttgagatggagcgcagtggcacgatctcagatcaccgccacctccacttcctgggttcaagtgattctcctacctcagcctcctgagtagctgggattacaggcacacaccaccacacctggctaatttttgtatttttagtagggacagggtttcgccacattggcctggctggtctcaaactcctgacctcaggtgatctgcctgactcggcctcccaaagtgctgagattacaggcataagccaccacccccagcataattagtcttcttgtttaacatctttccccccacctttcttttcaacatagcagccagcaaaatcctcttaaaacttacatagataaacatcactcttctgctcaaaacccctcagtggccttccttctcagagtaaaaccaaagtcacatcgcctaaatgccttgtctgaaccccaaaccttcctgatctcacctgtgcttgcctcctggtgcctttgactcaagccatttcctactcatgttgtacctccgacactccagacgtgctccatgctgttccctctgtctggaacactcttccccccttgcactgtgcccttctcactcatttcattcagttatttgcaaatgtcacctgatcagagaggccttccctaagcaatcgctccatttgaaagagtaccgctgccctcgtcactctagttctgctgcatttttcttttctttctttttttttttacttgccgataattttattgcttacgtagaacatccaagagtatttaatgataaatagaacccccaaagtttcagacaattatttggtacataatccatacataaaaatgagttgccttcctctatgccagaagccaacagttagaatatataattttataaaaattctatttatagtatcaacaaaaatttttaaattcctgatagaaaatataaagacatgtaaagtattcataaagaaaattataaatccttattgaaaggaatcagtggaaagctataccatatttatggatgggataattaaaaatcattaatttgatatcctgcatttttctttatagcatttacttctaccagccacactctaaatttgtttacttgcttatcatgtctatcatgtctctgtctcctggaatataagctccaagccgggaacttgttttgtttcttgctctattctcagttcctagatcagtacctttcacatgggagtggattaataaatatttatttaatgaaggatgaatgaacgaatgaatgagaggtattaacactgtttactctgctacaggagtccttggctaaaaagattgagaatcagtaagctatagaacactctatgcaaaacgaaaaccacccatacttttcacatggaagcataagacagttttaactaaataaatgaaaacttttcttcaaaaaaaaaaattactcttctacttttgtttcagtatttcatttacactccttaaatctagtaagaattaggcagccaggcacagtggctcatacctgtaatcccaccactctgggagaccaaggcagaaggattgtttgaagccaagagttcaagactatcctgggcaacatggcaaaacgtcatctctataaaaagtgtaaaaaattccaacagagttaaaatgtaaaagtgaaaagtataaaaaaattaggcatggtggcacatgcctgtgatcccagctactcaggaggctgaggtgggaggatggctagagccagggaggtagaagttgcaggaaactgagtcatgccactgcactccagcctgggtgacagagccagaccctgcctcaggaaaataaataaatagatagataaataaataaataaggcatgcaaacatactcaaatatctgtcttaaaaaatgtcttccttgggccaggtgcagtggctcacgcctgtaatcccagcactttgggaggccgaggcgggtggatcacaaggtcaggagatcgagaccatcctgcctaacaagatgaaaccctatctctactaaaaatacaaaaaaaaaaaaaattagccaggcgtggtggcgggcacctgtagtcccagctactcgggaggctgaggcaggagaatggtgtgaacctgggagcggagcttgcagtgagccgagatcaggccactgcactccagcctgggcgacagagcaagactccgtctcaaaaaaaaaaaaaaaggaaagaaagcgtggcagatggggccacctctaactcctcattgtgcattctctcgattctactcatgcttccaggaaactgctcttattagaattggtaagataatcttgttccttactggtggtcacttctccatctttattttccctgcctcttgtcaatgtcctacacagtagaccatttatcttacttgaaacattttcttctctctgcttctggagtaaaatactgtagtagtttgctagggctgccataactaaatactacagactgggtggctttaagaacagaaatttgttctaaaggctagagtctaagatcaaggtgtcagcaggtttggtttctcctgaggcatctctccttggcttacagatggccaccttctcacatggcttctcacgtggcttctcacatggcttttccactgtgtgagcacatccctctagtgtctctctctctctcttttttctttcttttttagatacagggtctcactctgtcatccaggctgcagtgcagtggattgatcttggcttactgcaacctctgcctcctaggctcaaccgagtctactgctccaacctcccgagtagctgggattacaggtgcatgccaccaaaccctgctaatttttttgtatttttagtaaagacagagtttcgctatgtgggccatgctggtctcgaactcctggcaacaagtaatctacccacctcagcctcccaaagtgctgggaatacaggcatgagccaccaccgtgcccagccatagtgtctctctttgtgacaaaatttcctcctcctttaaggacaccagtcaggttagattagggcccaccctaatgcttcatttcaacatttcaacttaattatggcttcaaatgctctatttccaaatatggtcacattctgaggtattggacattaggggttcaacacatgaatttgggaggaacataattcagcccataacaagtaacttcctggctttcttctttacctcactggccctttttttttttttttttttttttgagatggagtctcactctgtcacccaggctggagtgcaatggcactatctcggctcactgcaacctctgcctcccaggttcaagcgattctcctgcctcagcctcccaagtagctgggattacaggcgcctgccaccacgcccagctaatttttgtacttttagtacggggtttcaccatattggccaggctggtcactcctgacctcaggtgatcggcccgcctctgcctcccaaagtgctgggattacaggtgtgagccactgcacccggcccctctttttcaattttctttgcttatttcttctctgtcttgcctctatgtgttggagtgctcaggactcagtgttggggctccttctctttatactttactcttacctactcccatggcttcagatagtatctgtgtaccaatgacttctttatgtatatttctagctctgctctgctctatgtcctgacttctgattcacatattaagttgacattttcatctggatgcctaacaggtaacatattaacatatttgaaacagaactttggttgggtaaggtggctcacatctataatcccaacactttgggaggctaagaaggggggcatcgcttgaggtcaagagttcaagaccagcctgggcaacatagcaagaccctgtctttacaaacaacaacaacaacaaaaatagggtgtggtggcatgtgcctatagtcccagctactcagaaggctgaggtaggaggattgcttgagcccaggagtttgaggctgcagtttgctatgatcgagtgcagctccagcctgggtgtcagaacaagcaaacaaatccaagaaaatcagacctctccatttcttctaaacctgctcctgcctctgtctttcctacttcagtaaataacaccaacatttactcggttactcaagtgaaaaacccaggtattatccttgattcctttctttaccaccattatccaaactatggtcaagtccaacagtttggatcctctatagattctctgtgaacacattttccatatctgttattttctttccaacttcactaagctaccatctctcagctcctagctggtgcccctgcatccacacatttccctacaatccattctccgtacaacaaccagagtgatgtttctattcagatcagggcatttccctgcttgaaatctcgaaagtgcccttggtcctttatggatggtccaccttataggggtcccataaacttaaacccccaaatctttaccctggcttataaggcctgtgccctccctccctacatcttgtacaaatctccctttgacccattaccgaaactccttcccacctctggacctttgtatttgctgtgcccagtgttaaaataattgaatttggagaacatcaggctgaaacagcttcagggccatgggtttctcagtaagcaaactaaagcccatgtaaagggtgaaacttcagcttaaccacccagaagccagcaaccaaccctaactagggactttactgatcagaaacttccaactcacctttaactagagactttccaatgtaaccaatcaaatatgttgtctttgtcttgcttctgagaacaccttatgaaggttttgctcttgcacatttccctagtggagcactggacttcttggattctggtgccccctgattcatgaaccactgtctgctgaaatacacttttgaaaatttaaatgtacgaagtttatctcaacatccgccagaactgctcttcccccagccttagccatgattggctttttcttgtcacgcagttatcgacataaagtcattgtcgaacatctcatttaacgtcaccataacctgtgacctgctattttattgtaagctccgtgacagtatagactttatctccttcattcacaaatgtattcttagtgcttagaacaatgctcactcctgataggggctaataaatatgcattaagtgaataaaattatagatttaaccataataaggtagtatagctaagaggcactgcaatcagccttggatttgagagtccctaaccttgccaattacttcacatctctaaaatgcagttttctaactgtgaaatagagatgatactagtgccggttcttagaatccttttgagaactaaatgagataatgcataggaagccctcagcactcggttgagtaaacagttaatcttagcattattcttacttttttagaactctcctgtgaaagtattaagtcatatgcctaaatgcacctttctctggtgggcggagtgacagcgcctggatcagtagtacagctgctatcacacaatagccaaggacaggaaacagaaagaatactttatcccctgaggatcgcaggggaattcaaagacacacaatgttatgactaaatttggaagctggccgagttactaataccaccatagggtgcttgaggaaaatgcccccaacctcctcaagccagcctccatcctagctgagtgccccacccaccgccacttgtagaagggcctctgaatcgccacacgcaccctgcaggacccagatccttcccatttcagcctgtgttccacgtgaagcacaccataggctgccagacacttcattgcctggcccagaccatcagtattctgtggccagcagcattttccaaaaatggctgtaacaacagcactggttctgcatgttcttctttcacatgacttcaacagtctcccagtgagaggtgaggctatgttttcttctcaggctaggtcataaaaggcaatgcaggctgggtgggcacagtggctcatgcctgtaatcccagcacaatggaaggccaaggcgggtggatcacttgaggtcaggagttcgagaccagcctggccaacatggtgaaaccccgtctctactaaaaatacaaaaattaaccgggtatggtggcgagcgcttataatcccagctacttgggaggctgaggcaggagaatggcttgaacccaggaggccgagtttgcagtgagccaagatctggccattgcactccagcctgggcgacaaaagcgaaaccctgtctcaaaaaataaaataaaatagaaggcaatacagctttctgacattctcccggaatgctcactcttagaactcagtcatgcaccctgagaaatcccgtctgcggagaggcccacatggagaggagccccatgttcctcccagccccggagcccccttacctctgggctgggagcagcacctccttgctggccacgcgagtgagccatcctgaagaacagatcctgcagcccccagtcaagccactggctcttgccacaggtgcaggggcgagaccgccctggtgagcactgcccacaacgagattcagcaaaacaaatgatgattccatctccagaaaaatattcctggtaacaaagtaggaaattaatatgcgtaaagcccattttggctaatgcctaagccaaatggcaattctttttttgttttttattatttatttatttttgagatagggcctcactctattgcccaggctggagtgcagtggcgcgatctccactcactgcaacctccgcctcctgggctcaagtgattcttgtgcttcagcctccaaagtagctgggaccacaggtgtgtgccaccacagccagctaaaattgttttgtatttttagcagagatgggttctcactatgttgcccaggatgatctcgaactcctggactcaagtgattgacccgccttggcctcccaaactgctgagattacaggcatgagccaccgtgcccatacaaaatgacaattcttttttttttttttttttttttttgagacgaagttttactcttgttgcctaggctggagcgcaatggcatgatcttgggtcactgcaacctcctccgcctcccgggcttaagcgattctcctgcctcagcctcccgagtagttgggattacaggcgcccaccaccacgcccagctaattgtttttttgtatttttagtagagacggggtttcaccatgttggccaggctagtctcgaactcctgacctcagatgatccacctgcctcggcctcccaaagtgctgggaatataggcatgagccactgcacccagcctcaaaatggtaattcttaataagtgaaaattttatttccttcttttcttatttggcttttttaaacaactgaaatctgaaggtagttggcccagataaggacttttgtctgcatggaatttttatgcttctctccttttatcaggtgggttcattgtaaggtgtggaagtgaaaaagaatgcaattaacattacagaaacatctattaaatgtcagatattgtgtgctttatatctcatctaataactataatcttataactcatctaatcttcccacaactctaactagtagatgttatttattctcactttaagaatatggaaatggggccaggcgcggtggctcacgcctgtaatcccagcactttgggaggccgaggtaggcagataacctgaggtcaggagttcaagaccagcctggccaacatggtgaaaccctgtctctactaaaaatacaaaaattagccaggtgtggtggcgggtgcctataatcccagctacttgggaggctgaggcaggaagatcgcttgagcccgggagacggaggttgcagtgagccaatatcacaccactgcactccagcctgagtcaagcagcaagattctgtctcaaaacaaaacaaaacagaatgtgtttagctataagtaacagaaaacccaatcaacagtgttttcatccataaggatatttactgttaacaaaaggattagaaataagagattccagaatttgcactgtggttcctatcaggagtagctatacaatttgtggggcccaatgcaaaataataaaacagggccccttgttaaaaatgattaataacttatagcagcatagaacattgaaccaagcacagggttgttctaagtgctgaggcctatacgacaggttcagaggctgaacctggttctaacgacgtcagaattatgggttggcttctgaaattttcttgtccctgcttattgcgttggaagatggctgtcgtagtgctaaacagaagaggatgaacaaaaaagttcccagaagacttccacttgcattctattggccagagctgagtcatgtggctgccccttgttcaagggagtataggaaggggagtagcaggcaaagggaagtaaattgctacaatgaacttagatcaatccagatttaagctctacagaagagtacattgggctgggcagccaacatggtgaaaccctctctctactaaaaatgcaaaaattagccgggcatggtggcgcatgcctgtaatcccagctactagggaggctaaggcaggagaattgcttgaacctgggaggtggtggttgcagtgagccgagatggtgccactgcactccagcctgggcgcaacagagcaagactccatctcaaaaaaaaacaaaaaaaacaaaaatgcccaggtgcagtggctcacacctgtaaccccagcactttgggagaccgaggcaggcggatcacaaggtcaggagctcgagaccagcctggccaatatggtgaaccccgtctctaacaaaaatacaaaaaattagctgggcgtggtggcgtgtgcctgtagtcccagttactcgggaggctgaggctggagaactgcttgaacctgggaggcagaggttgcagtgagttgagattgcgccactgcactatggcctgggcgacagagtgagactccgtctcaaaaaaaaaaaaagaaagaagaagaagaacagtacgttgctgtcccaaatcagggttctgttagcaagataatgggttggggtcatggccattgactaagcatcactgtatcttctacagatatctttacacagtcggcacacactaaaccttcctatatcctgtggttcattcaaattggattatactgtaaacatactcttaatttcttgcccttgcattcttacttatgctttgtcctctatttagaagtcatcatacataggattttgtatgcatataaatcttacccatacttggcagtctattgaaaatgtcatttctgtcatgaagaattatgtggttcccccaatagggtgcaattgtcccacctcttaaatccttaagaatacttacctttaaattctaattaatgtgtttatttaccttatcacccctgtagtgaatattgttttgtctgcctagcacttagtaaggcatcttgctaattgggccataataatgggcatgcaacccaatccagtgagtcagagtctttctctgtaatttttcaaattggatctagggaaaagaatcccctttcctcactggtcacagaattaaaaagttgcataactggaatgctttagatatgtccctaatgtatccctaaccaatgccatgtatcaaggaaaattctaaatgaaagatccaattaaaaagagtactctatcaaggcttaatttagaattttgatagaaaaatgtaagtcagtatttttgcaacctacaaccagaaagagattttaaatacaattttaaaaggattaatcaataaggaaaaatatctatgactgttattacattttttggggggtgggggatgaagtcttgctctgtcgcccaagctgtagtgcagcagcacgatctcagctcaatgcaacctccaccacccgggttcaagcaagtctcatgcctctcagcctcccgagtagctgggattacaggtgcgtgtcaccacacctggctaatttttgtattttttgtagagacagggttttgtcatgttggccaggctggtctcaaactcctgacctcaagtgatccacccacctcggcctcccaaagtgctgggattacaggcgtgagccaccgcgcccagcctgttattgtaaaaaatttaaggatttctgtttaggaaatgacactatggacaaagttaataagcagctaacagagtaagagaagatatttacaaagtcaaaatctgacaagagattaatatctagaatttcaaagaataccttcacatcaacaagaaaaaggtaatgactacatacagaaatgggtgaatgatatgaacagccaattaaaaaaccagaaaaccaaaaactgagcatgcacaggaagtgcttaaaatcattagtaatcagaaatataatttttttaaaaaagataacatttcacactcattacactgccgaaagttgtgaatcagcatgatgtcaagaattggcaggggtgtggacatacaggaaccctcatgcaagggcggtggagagcaagctgtcattactcaggcaaataaaatagacgtctgtcacccaacggttccactgctgtgtgtacggaacgctctcacacagtttataaaggaacatgtaggaatatgttcactgtagtattatttatgatgttcacagtggggaaggtagatgggcgaaatatggtggatgtacaccatgggaaatgctgtggcaggcaggcacgatggattagaaatcacattgtgttagtttcctaaagccattgtaacaaattaccacaactgggtggcttaaaacatcagaaatttagcttctctcagttcttgaggctctaagtcccagattaaagaacttggcacggccatgttatgaagtaaataatactacagtggatatgttcatgtatgtcccttcgtaaattgtatgaggactttttgtacacaggagtggaatcactgggtcgtagacatacactttatttgactaagtaatgacagcttgctctcacagcaggggaggatacttccttgcctcttccagtttccggtggcctcatgttctttggcttctggcataatgactgcaatctctgcctccatcttcagagggctgccttccttctgtctttgtctctgttttcttatttttatttttattttttttgagactgagtctcactctgtcgctcaggctggagtgcaatggcacaatcttggctcactgcaacctccacttccgggttcaaacaattctcttgcctcagcctcccgagtagctgagattaaaggtatgtgccaccatccccagctaatgtttgtatttttagtaaagacggggtttcaacatgctggccagggtggtctcaaactcctgacctcaagtgatccgcccccctcccaaagtgctgggattacaggtgtgagccacctggcccgggcgtctcccttccctccctccccctcccctccccctctcccccctcccctcccttccccttccccttttcccttcccccttcccctcccctcccctccccttcccctcccttcccttctcttccgttccctttcttttgagacagagttttgttcttgtcgcccaggctcaagtgcaatgactatatctcggctcactgcaaactccaccttccaggttcaagcaattctcctgcctcagcctcccaagtagctgggattacaggcacccaccaccatgcccagctaatttttgtatttttagtagagacggggttttaccgtgttggccaggctgatctcgaactggccaggctggtcaaggcgatcctctcgtcttgacctcccaaagtgttgggaggtgtgaggcaccgaacccagcctgttttcttataacagcaattatattgaagagggtctatcctgaattgagtatgacctcatcctacttgattacatctacaaagacccctctctaattaaggtcacattcacaagtactggaggttataatttctacctgtctttttgaggaacacaattcaacccacaacaaagaatagcaggaactatttttaaaatgtagtttttagagctgagcatggtggtgagcacctgtagtcccagctactcaggaggctgaggcaggaggattgcttgagccctggagtttaagacaagcctgagaaacatagtaagaacccctctctaaaaaaaatttttttaattagccaggcatagtgtcatgcacctgcagttccagcactttgggaggccaaggtgggagaattgcttgaggctaggagttcaagaccagcctgagcaacatagcaagaccctgcctccaccaaaaaaatgtttttttacttagctgggcatgtagcctctgtaatcctagctacttaggagactgaagcaggaggatcacttgagcccaggcatttgaggttatagcgagctatgaccgtgccactgcaccatagcctgggcagcagagtgaggtgctgtctcttagaaaaaaaagtttttcataaaaaaaaagaaaacaatataatatatacaataacatgcaggtaggtaactttaaaatacatttaccccaaaaattatgtttcagaatttataaaattcagctaaaggagttcttagaggaaaatttatagtttaatagtttaaatgcctttacttaaaacaaaaaaaggttaaaatcataagaaacaaaaagaaagaaaagtaaagtaaacctaaagtgagcagaagaaaggaagtgatgaagataacaatgaaaatcagtgaaacaaacaaatggaaaaacaattgtagtaattaataaaaccatgagctggttctttgaaaagacaggtaaaattaataaacatctagctggactagtgaaaaaaggagaggacacaaattaccaaaatcagaaatgaaaggacacaacaaagaaaacaacagagtgagagaaaatatttgcaaaccatatatccaataaggggttactatcctattctaaatatgtgaagaaagcaaacaactcatagcaaaatcagatcacacgactaaaaagggggcaaagggcaccaggtgcactggtttacacctgtaatcccagtgctttggaaggctgagacaggagaattgcttgaggccaggagttgtgaaaagcctggacaacatagaaagaccttgtctctacaaaaaaattttagattagccaggtgtggtgacatatgcttgtagtcccagctacctgggaagctgaggtgggaggatcacttgagcccaggagttagaggttgcagtgagccatgattgcagcactgcagtacagtctgggcaacagcttgatagcttgagaccctgactctttaaaaaaaaaatcatttatcaaaagatgacatacaaatgatcaacaggttcataaaaatgctcaatattggctgggcacagtggctcacacctgtaatcccagcactttgggaggctgaggtgagcagatcacctgaggttgggagttcgagaccagcctgaccaacatggagaaaccctgtctctactaaaaattccccagaggctggggaataaggggctgggggagataatggggagatgaagatgttggtctcagggtacaaagttaacagttaaacaggaggaatacaattttgagatttattgcacagcatagtgactatagttaataataatttattgtatatttcaaaatttctaagagagtaagttgaaaatatctcgccacaaaaagaatgataagtgggctaggtgcagtggctcatacctgtaatcctagcactttgggaggctgaggcaagaggatcacttgaggcgaggagttcaagaccagcctgggcaacatagcaagaccctgtcgctacaaaaacttttttttttttttttgagacggagcctcgctctgtcgcccaggctggagtgcagtggggcgatctcggctcactgcaggctccgtcccccggggttcacgccattctcctacctcagcctcccgagtagctgggactacaggcgcccgccaccacgcccggctaattttttgtatttttagtagagacagggtttcgccatgttgcccaggctggtctcgaactcctgacctcgtgatcagcccgcctcggcgtcccaaagtggtgggattacaggcctgagccaccacgcccggccccaggggacattctagaggggacttcgccccccaagccgcacttctccatttccctgcggtcgtcgctaaccgaaggcgccatccggtgacgactggatgtgcgcggcggtggtgagaggccgcgagaaccaccaggtccaccgctgcctcggcccgggcggaatctgggaaggtctctgacaaccattcatcctcagattttcccaattgtgcatgggtgggcgggccccgcatcctaatgggcactgggcatgtgaagtgtgaaccacccgggcctaactagccgctgaaggcctgacgaaaccgccaggcccaccagggggcagcagagatccgacggccgcggaccgagggaagctggcgggaagtaggaggcagagggcgcgcagggaagcggcagggcgagcggctcagaacgtaaaagccagcaccgcgcctccaggttgctttacggctgccgcagaaggctttgcggctcttttcccctccgacttgatttacggttccttctctggtctgtgtttttttttttccccctccggcgctgggcgtgggttcggaccttcttcccagagacgctcgcgcacccttcccattctcctctgcgcggcctccatctaagatctcttccccttgtccatagcctagatcgagctccctgtgtgcaccgcgcgctgcccgaggcgcgtaagtgggggaggagagcggcttcccccggggtggttctagccgtgggtgtggagcgtgggaaggctcagcttccgggtcgagaacctggggctgcggtggacctgatcctgaggtctcagcgtagagatgctgagtccagaggcctgttctagttcaccagtgcagtgaggggctcagtatccgggcctcccgagaggtgggtaggaaggcggggtacaggaaacttggcaccaacgcgccgggaccccaccgcggtgcggacagccaggtgtccgtggtggcgcttccttggagatgctgcctgcagacaggcgtggggaatctgaagtttgtgttaatagctaaacgaagttgagttgcagggagcgggggacgctgggaagaaatgattgatttaaaaggaatttgacgccgggcatggtggcggcatgcccccatgttccctggaggtcaagcctgcagtgagccgagatcgcacccgtaccacgacactccgtcccgggcgacagagcgagaccctgtcacgggggaaaaaataaaaataaaaatttgacgctcactttagctgagtattgagccttgttataacattgagatagaggtctggcgcggcgtctcacacctgtaatcccagaactttggaaggccgatgcgggaggatcgcttgaggccaggagttctacgccagcctggctaacatagcgaaaccccgtctctactaaaaatacaaaactaggcaggcctggtggcgggcgcctgtaatccccgctactcgggaggcggaggcatgagaatcgcttgaacccagtaggcaggtgtgccggtaagccgacatcgcaccactgcactccagcctgggggacagagcgagaatccatccaaaaaaaaaaaagttataattcacgtacaattaaattcactcccttttttaaaaaaaagtggagacatagtctcgctctgttgcccaggctggagtacagtggcgccgtctcggctcactgcaacgtccgcctcctgggttcaagcgattctttgcttcagcctctcaagtagctggaattacaggcgcataccaccacacccagctactttgtatttttcaccatgttggttaggctggtctcgaactcctcgcccttccaaagttcagggattacaggtgtgagccaccacacccagtctaaattcacccttttaaagtgtgcaattcagtggttttaatatattcacaaggttgtgcaatcaccactattatctaattccagaacatttttatcatccctaaaagaaaccttaaaaccattagcagacacccattatttcctcctactcccagcagcactaatctatgaatttacccattctcagtactgtattatacaatatttgttcttttgtgtttggtttatttcacttcatgattcaaagtccatctatgttgtatgtagcatgtatcaacttcattttttaaataactgaattatttattgtgtggatataccacattttgtttctccatttttgatggatactggtgattttctaggctttctaggtctagtcctccacagaactcgcagtctgaggcacagacatttaaaacttaagtttttggaaactagcatttaactcttgggttgggtcaggtaattcagtggcctcaggtctggtatcgtttagggcagttttttttttgttttttttttttttttgagatgaagtttcactcttgttgcccagggtggagtgcaatggcgtatctgggctcactgcaacctcacctcctgggttcaagcgcttctcctatctcagcctcctcggtaactgggcttacaggcgcatgccactatgcccggctaatttttggtatttttagtagagacagggtttcaccatgttggccatgctggtctcgaactcctgacctcaggtgatccacccatctcggcctcccaaagtgctgggattacaggtgtgagccaccgcgcctgggtgggagttttgtttttttgtttgtctgttgttttttggggggacagagtttctctcagcctcctcggtaactgggcttacaggcgcatgccactatgccaggctaatttttggtatttttagtagagacagggtttcaccgtgttggcaatgctggtctcaaactcctgacctcaggtgatccacccgcctcggcctcccaaagtgctgggattacaggtgtgagccaccacacctgggcgggagttttgtttttttgtttgtctgttgtttttttggggggacagagtttcgctcttgttgcccaggctggactgcagtggcgagatcttgactcactgccacttctgcctcctggattcaagcgattctcctgcctcagcctcccgagtagctgggattacaggtgtgcaccaccacacccggctaattttgtatttttagtagagaaggggtttctccatgttggttacgctggtctcgaactccctacctcaggtgatcctcccgccttggcctcccaaagtgttgggattacaggcgtgagccactgcgcccctctgggagtgttttttaaagtgttctattctcagttcaccacttaccaggccgttaattatcgtggtatcaagcagagaaatgtttgtgtgctggtcttctcagggaggcagaaaccgtcagagattgctgttgtgtaatgtacaccaaaacgtgttatcttgtagtataaacggtgtagttggagatgagtgtatgaaaaatgtaactgagctagctgtgggagagactagttgtgaaaaattttgagtcacccactgtatgctttcccagctatgttcaaataaggtgacactctgccttcctgtttcagctctaaaactgttcataagtgttattttggctgtatacgtagtgccatgtttttttgtatttttgtgcttttggtgattttgctgtttataggggcctccaagaatagaagtgctgtctagcatttccaagttgaaggctgtgatatatcttatagagaaaagataagcttttagattagctttgttcaggcatcacttttgttgttggctgtgagttcatgttactgcatcaacaatatatattaaataagatatctttaaacagaagcacacataaaacaaggttatgtattggcctgttgagtaaccctgtatttcccctgggagcagtggctcagtatttgctagttcagtgttcatgatggctttacaggacataactaccctgaataatgagaactgactgtctcagtagtgcttcaagggcagaaagcctagtggatatttttccatctctgcagcttttagcatttcttcactcaaggcactcatttttaatattgaactggcagttttgatgtggagagaagctaaaataaggctaaaatgctcttcatactatgtgctgagtggggactgtgctgagtgttggggattcagtgattagtgtatggccccgcagttctctaatggctgagtgtgggagtgcagagaaatgatcagtgtgagggaattaatcctatgttcccaccgtgtttttttgttttttttgagacggagtttcactcttgtcgcccaggctggagtgcggtggcgtgatctcggctcactgcaacctccgtctcccaggttcaagcgattctcctgcctcaacctcccgagtagctgggattacaggtacccgccaccgtgcccagctaatttttgtatttttagtagagacggagtttcaccatgttggccgggctggtctcgaactcctgacctcatgatctgcctgcctcggcctcccaaagtgctgggattactgggttcccacaaattttaagacttacttcaggccaggtgtggtggcttatgcctgtaatcccagcattttgggaggccgaggtgggcagatcacctgaggtcaggagttcgagaccagcctggccaacatggtgaaacccctgcctctactaaaagtacagaaaattagctgggtgtggtcgcgcatgcctgtagttccagctactcaggaggctgaggcaccagaatcacttgaacctgggaggtggaggttgcagtgagctgagattgcgccactgtactccagcctgggcaacagagtgtctccccctcaaaaaaaaaaagacatacttcagagtgtggtgagctgcataaggctttagaggtaatgacattttgagatttcaattaaaaattttttttctactttttttttttgagacagagtctcactcttgctcaggctagagtgcagtggtgcgatcttggctcactgcaaccttcgcctcctggattcaagcgattcttgtgccttagcctcctgaggagctgagattacaggcacctgccaccatgcccagctaatttttgtatctttagtagagaagaggtttcatcatgttagccgggctggtcttgaactcctgacctcaggtgatctgtctgcattggccttccaaagtgctgagattacagatgtgagccaccgtgcctggccactttttttctacttttgctaatttttttaaagtttcatgaacattatagtactgtgttcataaatgaaaataaaagaaacttgctccagtcttgttcatcaagccgttcttgaccttcacagtcagaatctcacccatcaccttgtcacatctccctcttgatctgtatatccagagtccacctgacatgcttcttcagccctccacatataataagaaatggttttgtgagccgagattgtgccattgcactgcagcttgggcaacagtgtgagactcctcaaaaaaaaaaaaaaagaaagaaaaatgcttttaggtgataaggaaatggagaagaataaaacatctttgccagtctttacctttttaatatcttgaattcatgatttcttgccatagccactatcctagtccaggctctctcccttctacccctgagttttttttttttttttttttaccatgtttttatttcctctgggaaaacacctatcagaattttgggatcatatgacagatacatatttaatttctttctttcttttttgagacagggtcttcctctgttgcccaggctggagtgtagtggtatgatcatggctcactgcagccttgaccccttcctcgcccccgctcaagtgatcctcccaccacagcttcctgagtagctgggactgccggcatgctccaccatgcccgactaacgttttgctgcttgtagagacagccatgttccctaggcttgtcttgaactcctgagcctcaagcgatccttccacttcagcctcaagtgctgggattacaggcgtgagccaccactcctggctacttaatttctttctttctttttttttgagacagtctcgttctgtcacccaggctggagtgcagtggggtgatctcttctcactgcagcctctaccttccaggctgaagcaagccttccacctcagccccctgagtagctaggactacgggaacattccaccaggcccagctaatttttgtattttttgtagagatggagtttcatgatgttggccaggctggtcttgaactcctcacctcatgcaatccgcctgcctcagcctcccaaagtgctgggattacaggtgtgagcaactgcacccagcgggccccgcccagacctattttcaaaattagaaaaccgtgaggcttctggaagaagatgagaagaatatcttcatgacctgagtgtgtgcaaaggtttcttagggctcaggatgccagagtcacttaaaaaagcaaaaaaaacccaaaaaaaaaaccacacacacaaagataaatatgattgattacatcaaaatgtaatcacagactactctaagaaaatgaatggggaaacacagggacctatttgacaaaagactgatattcaagataaataaagaactaataggccaggcgcggtggctcacgtctgtaatcctggcactttgggaggccgaggcggggggatcacttgagctcaggagttcgagaccagcctgagcaatatagtgaaaccccatctctactaaaaatacaagaattagaattagctgggcgtgatggcacgtgcctgtagtcccagttactcgggaggctgaggctggagaattgcttcagtcaggaagatggaggttgcagtgagccgagattgtgccactgcactccagcctgggcgactgaacaagacttcgtctcaaaaaaccagtagggctccaggcctgggattgggcctctgctgctctactccctggacgtgtggctccgtccttggagtcggcctttggttttcatgaagagtagtgtgcattaacagctgagtggttttatcagcctgtttcctgccaacagtgtatgagagttccagttgctttacatccttgccagcatttggtgttgtcagtcttttgagttattctgatgggtgtggtgtgtcatggtcttaattttagtcctcagtcactaatggtgtttagcactttttcctgtgcccatgacaatgtgcatcttcctttgtgaagtgcctgctcaaatcttttgcccattttacattgggttgtgtgtctttttattattgagttgtagcagttatttatataacctttatatcctggttacctgtcctctgtctggttgcctattcattttcttagagttgtctgatgaacagaagttttacattttgatgtaatcagttttctcttatattttcttttatagttactgctttctgagtcctaggaaatcttggctaccttcaggctgtgaagataatctttcatgttttcttctgtaagttttttttttttttgagacagagtcttgctctgtcgtccaggctggagtgcggtgatggcgatctccgctcactgcaacctctgcctcccaggttcaagcgattctcctgccccagcctcccgagtagctgggattacagacatgcgccaccatgcccaactaatttttgtatttttattagagacagggtttcaccaggttggccaggttggtcttgaactcttgaccttgtgatccacccgcctcggtctcccaacatgctgggattataggcgtgagccaccgtgcccggcctataaattttatagttttagttttatgtttaagcctatcacccatttctagtttaggtgaatggtgtgagatataattaaatattaatttcttttccatatagatatccagtcattccagcaccatttgttgaaaatgctattgtattgcgttttggaaattaagatgactgtacaaatggtaattgatgtctgcactcccttttctgttccattgttcaatccttgtgttagtaccacacttttaattactgtagctttttagtaagtcttgaagtcatgtagttgtaggtcttccaattttgttgttttcaagcttgatgtgaatattctaaatcctctgcatttccatataaatatcagaattatctttaccagttttacagaaaagtctggtaaagttgtgattgggattgcattgaatctatggatcaatttggaaagaaatgacacctaaacagtattgagtcttcaaatatatgaacttggtgcattttccttcttatttaagccttttaaaatttctttttaggccgggtgcagtggcttatgcctgtaatcccagcactttgggagtctgcagcgggcagatcagctgaggtcaggagttcgagaccagcctggccaacatggtgaaaccccgtctctactaaaaatacaaaaattagccaggtgtggtggcaggtgcctgtagtctcagctacttgggaggctgaggcaggagaactgcttgaacttgctcaggaggtggaggttgcagtgagctgagatagtgccattgcactccagcctgggcaacaagagcaaaactctgtctcaaaaaataataataataaaaataaaaattttgggccaggtgtggcggctcacacctgtaatcccagcaatttgggaggctgagccgggtggatcacctgaggtcaggagtttgagaccagcctgaccaacatggagaaaccctgtctctacgaaaaatacaaaatttgccaggcatggtggcgcatgcctgtaatcccagctactctggaggctgaggcaggagaatcacttgaacctgggaggcagaggttgcagtgagccgagatggtgccattgcactccagcctgggcaacaagagtgaaactctgtctcaaaaaaaaaaaattcttttagttctgttttatggttttcagttcagaagtcttatacatattttgttaaattgatttctagatatgtttcttacctttattgtaaaatggagccatcatttgcatcattcattactctgtatgtaatgtgttatcattctctacctgctttcaagattttctctttatttttgttttttagcagtttgtctgtggtgtatctaggtgtcattttatttgtatttatccggagatttattcttgagatttgcagagcttcttaaatctgtaaatttatgtctgtcggccaatttgggaaatttggagctattagttttaaaaatatttcttctgttccattctctttcacttcttctgtatgtgagttcaatttcacttcaattgtatgtgagttagacattttgatattagcccacaggatcctgaggttctttcattcttttcaatcttttttttttctcgaagtttgcatttcgtgagcaggagtgacagtcattcaggatgatttttgagattcctagttcaagagtagttcctattcttttctaggtgtagtcaagtatggcttctaattctactagaaggcttttttgtcggggaggtggttctatgtcctttggctcttacattttctttgtgtctttcacagcacagttttcagagggtaccctttctctttggttttgttttgttttgttttgttttagacggagtcttgctctgtctccaggctggagtgcagtggcgcaatcttggctcactgcaacctctgctcactgctacctctgcctcccgggttcaagcaattctcctgcctcagcttcctgagtagctgggactacaggcacgcgccaccacacccaactaatttttgtatttttagtagagactgggtttcatcatgttggcaaggctgttctccatctcttgacctcgtgatccgcccgccttggcctcccaaagtgctaggattacaggcgtgagccaccgcgcccggccaacagagggtaccctttcattctttttctccttcttcccagaaggcttgcgttttcaagactacctcatcaagttctgcatgtgtttaaaagtgtctctacccgaccttcccttcctccctcccgatttaacggaattctttgttggtgttttcatacttaccgtgagttttctttttcagggtgatattttagttccatcttaggctctccattgtcctcttctctcttctttttttttttgagacagagtctcattctgtcacccaggctggagtgcagtggtgtgatctctgctcactgcaacctctgcctcccaggttcaagtgattctcctgcctcagcctcccgaatagctgggattacaggcgcacacaaccacgcccacctaatttttgtattttcagtagagacggggtttcaccatcttggccaggctggtctcaaactcctgacctcgtgatccgcctgcctcagcttcccagagtgctgggattacaggcatgagccaccgcgcccggtgcgcccagccctcttctctcttctttgcatctctcttcctatctggatccctctttgctgtccttaaagagctgagatgagagattgagaaacatctctacaagaaattgacgtttttctacttatgggtaattagaagcttgtagtattttcagtcttctaagtatgttgaagatatgagacgttggtgattttctttgtttctccggttggttggtctgtgtagtttttggacatgtgtttggatatttggatttatatagctgccataatcttggctatgcaggtagtctttcctgacacttcatcctgaaagatttgaagcctttggacaaattttacagtgggctgggtgcagtggctcacgtctgtaatcccagtgctttgggaggctgggcaggaagattgcttgagcccaggagtttgagaccagcctggacaacatagtgagacccgtgtctctacaaaaaataaaaaatatgccgtgtgtggcgttatacaactgtagtcccagctacttaggaggctgaggtgggaagatcacgagccaaggagtttgagggtacggtgagccatgatcgcctcactgcactgggtggcacagcgagactgtctcaaaaaaaaaatttacaattaatgtctgcatatccttcacctaggttcataaatttgtacttttgctttatctacttgcctttttctctctctctacacacacacacacacacacacacacacacacaattagttgaatgaattgagagtaagttgcagaaaacatgacactttactccaatattgcatcatacaaaatcatacatctagtgataggccattgtcctacagaatcacgatataattatcacactaaccagctgtggtggtgcacacctgtagtctaagctactcgggaggctgaggcagaaggatcacctgagcccaggaggttgtggctgcagtctcatattcatcccatcatcagatttctcccattgtcctaataatattctttatagcttttctttatccctgatccgaaatttcattgaagatcacacagtgcatttagttgtcatgcctcttaagtctttatttatttattatttattttttgagatggagtcttgctctgttacccaaactggagtgcagtggcatgatcttggctcatgcaacctccacccgctgggttcaagtgattatcctgcttcagcctcccgtgttgctgggactacaggtgtgtgccaccatgcccagctactttttatatttttagtagagacgggaattgtaccatgttggccaggctggtcttgaactcctgagctcagatgatccacccgccttggcctcccaaagtgctgggattacaggcgtgggccaccacacccagccttaagcctcttttaacataaaagagttcaccagccattctattttgttttgctttttgagacactgatgctttggagagtccaggccagttgctttgtagatttcaacttgtttgattgtttcctgatgattaggttggtagaaatactacctcaatgatgggaccttcttagtgcgtccatcaggaagcacatgatgtgactgtaattggtgacattaagtttgattccttaataattaaggtggtaactcccaggtttctacattgtaaaggcatcttttgccgccctcctttttattcccaagtagtttatttggagattagtcctttacacagtagaggagcggggaagggagacaggaaaggaaagtttgacaacaaagggtgagttttcaagcctgttgccacgggggaacctaattccactggagaagctcatggcttggtgatgttccacagaggggtcagaaatttagcgtatttcaacaccagctcctgtcaggcaccatttgagggctgctgccagggtggttcaattttctggtgcttacagcttgccataaacaggtgcaaagtagtctggataccaaagaaagctctcaggtaacaagatgcagatgttggcatttggaagtcagaatagggtgcactattgtggtaagagctgaagggatggctgggcgcggtggctcacacctgtagtcccagcactttgggaggatgaggcaggcggatcacctgaggtcagaagttcgagagcagcctggccaacatgacgaaaccccgtctctactaaaaatacaaaaattagccaggcgtggtggtggatgcctgtaatcccagctattcagtaggctgaggcaggagaattgcttgaatctgggaggtgtaggttgcagtgagctgagatcacaccactctgcactccagcctgggtgacagagcgagactctgtctcagaaaaaaaaaaaagctgaagggatgctgagtagagcatccgtagtgtctgctatacctgggtaccctagaacctggagaacctacagcttgaggcaagagcgtatgtgctattattttttcaagaagtgtgctctcaggaagcagaggtaggggaaaggtgagtgaagggagaaggaagattaagtcagttcaagggtgcattttgaagttggttgcccttggtgcaagtacagttggttgcttgttctcctaaagctgtctcccaggaggatgtatacataactgcattccagggcaatccatctaaaggaagggtggacggacccctcagcttctgtatctcactggaaaaaggtttgcttcatggcacattaattcccatagacttctaggttgtgcatgtgtgggtaccaggtgggtcccacagacccttacacctccaaggcaagcagcaagccacgggtgggaagtgataggtacccagtatgagcaggaggtaagggaccgtggggttgtgcctgtgggcagttggttataacccagacgtgtttgatcagcccagtgacagctggagtggacaaagtgaccaagggcctcaaggacacacaaggccaagaagatttgaagtgctgtgtaagatatgcctaatgcatttggattctacctttgtttaacgaatatgcacacataaaaaacacttgaactccttgagcccaggagttcaagaccaacctgggcaacatagtgagacactcatctctaaaaaaattttaaaaaaaattaacctggcatgatagcactcacctgtagtcctgtctactctggaggccgcagtgggaggatcacctgagccctggaggtcaaggttacagtatgctatgattgcaccactgcattccagcctgggtaacagagcaagacgctgtctcttaaattttttttttttttttttttacttttataatggaaaaaccattgtagacagttttaggaaggaaagcagaatagtaagacatctttttcaaagtaaaagagcaaaaaaggcaaaaaatatttcacatttactttatggacaaagataagattgtccttcaataaaagactgaattttttttgtttgttttgttttgttttttgagaaagagtcttgctccattgcccaggctggaatgcagtggtgtggtctcggctcactgcaacctccgcctcccgggtacaagcaattctccagcctcagccccccgagtagctgggactacaggcacgcgccactgcatctggctaagttttgtatttttagtagagatggggtttcaccatgttgaccaggctcgtcttgaactcctgacctcaggttatccacctgcctgggcctcccaaagtgctgggattacaagtgtgagccaccgtgcccggccacaagttgctctttaaatgtgagaagtgttctggcatggtggctcacacctgaggcgggtggatcacttgaggtcaggagttcgagatcaggctggccaacatggtgaaaccccgtctctagttatttatttatttatttatttatttatttatttatttatttttttgagacggagtttcactcttgtttcccaggcgggagtgcaatggcgcaatctcggctcactgcaacctccgccttccgggttcaagcgattctcttgcctcagcctcctgagtagctgggattacaggcatgcaccaccacacccggctaattttgtatttttagtagagacggggtttttccatgttggtcaggctggtctcgaattcctgacctcaggtgatctgccctcctcagcctcccgaagtgttgggattacaggcgtgagccaccacgcccggccctgtctctactaaaaatgcaaaatttagccgggcatggtggcgcacacctgtaatctcagctactcaggagactgaagcagcagattcgcttgaacccaggaggtgaaggttgcagtgagctgagaccacaccactgcagggcagcctaggcgacaagagcgaaacgcttacaaaaaaaaaaaaaaaaaaagattcacaggtgatggtgatgctgctggttaaggaagtgaagtggctttttgctctgtagccttcctgaatgttggggcctcctgctcttcatttgtttcatttctattaagtctcctccctccagctatcttgttagctcctggaaagcatttcagtgattgtggcttctatttctttttgaccccacagtgtccagggtcatgctgcctatatagtagtgagcagtaagttgaggtttttaaaaactttattattattatttttgagatggagtcttgttctgtcacccaggctggagtgcagtggcacaatctcagttcactgcaacctctgcctcccaagttcaagtgattctcctgcctcagcctcccgagtagctgggactacaggcgcctgccaccacatccggctaatttttttgtatttttagtacagatggggtttcactatgttggtcaggctgatctcgaactcctgacctcaggtgatccgcctgctttggcctcccaaagtgttagggttacaggtgtgagccaccacacctggccggtttttttaaactttaaaacagattcacttgatttttcttccctaccccccagcttttttgaggtatgactgacaaaaattgtatatatttagggtgtacaatgtgatgatttgatatgtgaatgcactgtgaaatgattaccacagtcaaggtaattcacatatccaccacctcccagttaccctcttagctagtacaggttgggtattgcttctctgaaatgctttgggaccagaagtgttttggacttcagattttggaatatttgaatatatataatcagatatcttgggaaggggacccaagtctaaacatgaaattcatttgttttcagagcctaaagatgatttttttttttttttttttttgagatggagtctcactctcgcccaggctggagtgccgtggcacaatctcagctcactgcaacctctgcctcccaggttcaagcgattctcctacctcagcctcccaagtagctggaattacaggctcgcactaccacacccggctaatttttgtatttttataaagacatttcaccatgttggccaggctggtctcaaactcctgacctcaggtgatccgcccgcctcagcctcccaaagtgctgggattataggtgtcagtgactgcgtctggctgataattgaatttttctcttggagaagctgaataaactgtgtgttgtgtgcctgcctttttttttgtttttttttttttttgagacagagtcagacactctgtcacccaggctggagtgcgatggggtggtcatagctcactgcagcctcaaactcctgagctcaagcgatcctcccacatcagcctcctaagtagcatagcaccacgcctggctaatttttaaattttttgtagtgatggggttttgttgtctaggctagtctcaaactcctgggctcaagcagtccttctgccttggcctcccaaggtggtaggattataggtttgagccaccatgcctggccattacctgtgttttgactataacacatcatgttggcactcaaaacgttttggattttggagcattttgaattttggatttttggattagcaatgttccacctatagtacattttttgtttgctttcccataaagaattttttgtaattttgattttatagttctaaatgtaatatattcttattgtaaaaatcacctttaatagcaccgccagaatagcaaacatgttaacagaaaggtagaagtagaccttaaagaatcttcagcagcttgagagaccacagctaaccactgaggaactctgttctggattggagcagtgcttagaagcttataaataactcttagggtattgcatagggattctttttttttttttttcctgaaatggagtctcgctctgtcgcccaggctggagtgcagggtgtgatctcagatcactgcaacctccgcctcctgggttcaagcaattctttgcctcagcctcccgagtagctgggattacaggcgcctgccaccatgcccagctaatttttttggatttttagtagagagggggtttcaccatgttagccaggatggtctccatctcctgaccttgtgatccacccacctcggcctcccaaagtgctgggattacaggcatgagccactgtgcctggccgcataaggattctttatgtgatttttcagtagaggctcttgccttttactttaaacattctttgagggttgttttttttttccgctttttatttatatagaggtcaaccagaatcaagatgtctgggactgaggaagcaattcttggaggacgtgacagccatcctgctgctggcggcggctcagtgttatgctttggacaggtaactgtggttccttcatgccgggaaagaatgaggtgaagtgagtaaagttagggcaaggcagtttgtagagcatcgtagtacatgtgtgagcagtacctagtacgtttacctagtacgtgtgtgagcagtacctagtacgtttacctagtacgtgtgtgagcagtacctagtacgttgacgcggtgcgtgcgggggcagtacctagtacgtttacatagtacatgtgtgagctatttgttattggtttttcctttagatgcattttttgggagtcttgtgaactctggagggcattttggaatgttagctatcaaaagactgatagtactggggattagatttagattttaaattttttgtggggggggatagataacatatttgtatgacatcaaattcaaaatgaaactgtgaaaatctccctatttcctattgcccctgtgtgcatgccacccagttctatttcttttttttttcgagactgagtcttgctttgtcacccaggctgcagtgcagtggtgcgatctcagctcactgcaacttccaccctctggattcaagcaattctcctgcctcagcctcccaagtagctgggataacaggcatgcaccaccatggccagctaatttttatatttttagtagagatggggtttaaccatgttggccaggctggtctcgaactcctgacctcaggtgatccgcctgcctcggcctcccaaagtgtttggattacaggcgtgagccaccacgcccgggcttaatttttttgtatttttagtagagatgtggtttcaccatgttggccagggtagtcttgaactcctgacctcgtgatctgcctgcctcggcctcctaaatgctggaattacaggcatgagccaccgcgcctggctccagttgtctttcttggaggcatggaaagttactgggggtcctattccttgtagggacattgtgtgcacagaaaagagtttcttgctttgtccacccaaactccatctttgtctttagcagagagttgtgagtattcatctcatctgagcagggcaagggggacaaaacccaaatcagcaagcagtagtgtgtttctgtttgtgcaggatgggaaattgttgtattggagaaggcgtcaatctctggaaaggacaaatggaagcaaggcttcctacccccgtgctctttccgtacttgcttcctgtgctgacgtcatttacagatctggaggcagaacattttagcttcctaagcttcagaaacatttataaggatggtagcagcagctaaggcagcagttctcaaaatgcagttctcaaaaaccctggggtttctgaagatctttcagagtccagaaggtcaaaattatcttcataataatactatttgcctctttcacactcattgtctcatgagtgaatggtagagttttcagagagtgcatgatatgtggtgatgtcactgctatgatgcctaatggcatgcatgccttaaaagtttctcagttttgattcctaataggatacatagaacccacataaacaaaggttctggggggtctttttaagagtataaagtctccataaaggatggagactcaatgatgtgaggaatggtggaagtgtgaatttaattttcttttttggggttgcagtgccagtacacagcagaagagtaccaggccatccagaaggccctgaggcagaggctgggcccagaatacataagtagccgcatggctggcggaggccagaaggtaggagaattcatgtgcctggaaagcaggcatccataccgcagactccgatggtcttgccagttccctctctgggtcctcagggattcggaagtctgctgttaactgttcctggaggtctcccagtgcccctgggaggggatgggttccagacttcattctcatccgaaggggcctgggcatggtcttgacactcgcataaccgccgtcttaagatttttacatcatctttttttttttttatttttaaagacagggtcttgctctgtcacctaggctggagtccgaccagtggtgtcatctcagctcactgcagcctccacctcccaggctcaagcgatcctcctgcctcagcttcctgactagctgggactacaggcacacgccaccacacctggttaattttttaatgttctgtagagacgacatctcgccatgttgcccaggctgatctcgaactgctgggctcaagtgatcctcccacctcggcctcccaaagtgctgggattacaggtgtgggccaccatgcccagcctttacaccattaaaaaaaaaatgttccttttgccatttgctttttttttttaattaaacactttttaaagaacttatgattgacacataataattgcatatcatttgcttctaattttaacttctgtgtatatttttggtcttccataaaatatgtcaaacagatttgtactttttgcaaactgaattttagcaactgctgggtgagttcctcctcccaacagaccattcgttctcgcgggctccatctagaagatttttgaaataaattcattgagaattttcttgaaaaaaaaattttttttaacagactggttctcactctgtcacttaggctggagtgcagtggcacgatcctagcttactgcagccttgagctcctgggctcaagtgatcctcccacctcagcctcccgagaagaatgtttaaggacagtttatcgaaaaaagtagatgaggaataaattatgtcaattttgattcacatttaagtgtggtaaggaattaacacagcttttccttaaaaacatttgtttttctaggtgtgctacattgagggtcatcgggtaattaatctggccaatgagatgtttggttacaatggctgggcacactccatcacgcagcagaatgtgggtgagtatgctctccagcagtggggacttctgcactgtccagctcctgctgaaagtctgctgtgggtgaggaggtaaggtaggtggactcagctgccagcaggaggaatggttgtggcccagcggtcagtgtcctcttcaacttgctctctttcccactcctagattttgttgacctcaacaatggcaagttctacgtgggagtctgtgcatttgtgagggtccagctgaaggtgaggggatggagtagacctgctgcccggaaggatcagtgggtggtaggagaaggtgagcaggtagggaagtaggtagctggacggggacccaggctccagagttgtgtctcagccagcgttccctagagtggtggaattcaaatactcttgctcatgtgctccctaaaagaatggaaaaactgttctcttgcacatgttcaagctgacacctaaaagttttcaccatatataaaaattgttgcaaaggatgtattttttggcatatggtaaaatctgacattttaaaatacaataattttaccatcactgataagtgtttggaaactcaactttaggcaaagcaggtccttttgttataacattgatgaaaacaaaaatatgttttgttaataagttgtttcacttcaagtcacagttatttaaggtgttaagtgagcacttaccgtaaatctgttgaatcttgttaaatattccagtggactctaaatactatagaggataagatctatcatttatttgaagaaatacaatgaacaagcttttttttaatcattagaaattttacattgttctttctttatctgaactcatatttctattctatttccccactggttttaatcctaatacatatttatggttgaaagtttggctaggcggggtggctcattcgtgtaaccccagcactttgggaggcccaggtggaaggactgcttgagcccagggatttgagaccagcctgggcaacatagcgaaagcccgtctctactaaaaatacaaaaaattagctgggcatggtggtgtatgcttgtagtcctagctactcaagaggctgaggtgggaggatcacctgagcccaggaagtcgaggctgtggtgagctgtgattgcgccactgaactcctgggtggaaaaaaagaaaagttttatcggtagccttactgtgcttctctgcctttgcctgtgtataaaaataaaaatttttggtaaattttcagtgcacttaaggctctaaatattaaaatatttcttttggatttagttatattatagctactgttaacacacaattgaccagacaattgtgtttatggtgaagagaaaacataaatacagcaaaattttgatacttagaaaaattaaagatatgaaatcttgccacaaaaataaaaaatttaaaatataaaatttatggaaaatgtatatcttaatgagatggatggtgctgttttttcttttcagttagtttatatatccatatatccataactgaatattacttacttcttttttttttttgagatggagttttgctcttgttgcccaggctggagggcaatggttcaatctcagctcaccgcaacctccacctcctgggttcaagcgattctcctgcctcagcctcccaagtagctgggattacaggcatgcgccaccccgcccgcctaattttttgtgtgtgttttcagtagagacgcggtttctccatgttggtcaggctggtctggaactcacaacctcaggtgatccacccgccttggcctccaaaagtgctgggattacaggcgtgagccaccgcacccggcctacttatttcttgaatgaacaattcagcattaattctattctgacttatttttctaaatagtactaaaaaatcttgtatctatgagtgagtagctgagaatggaaagaattgtgttatagtgtcactcatttatttgagtgctttctgagttattttttaaaaatcacagagcgctgtcatcaaacattgtatttaattctcaatcagcgaatgatgtgctcaggtccaccttctcttttggtgagaggcaggagctggacgccacctgatttacaaagggtttgctctcccgtccttacagaccattagatccagtgttcaaatcatccctttgtttcatatcccagaggtttttttttttccaagacgtagtctcactctatcacccaggctggagtgcagtggtgcaatctcggctcactgcaacctctgcctcccaggttcaagtgattctcctgcctcagtctcctgagtagctgggattacaggtgcccaccaccacacccggctaatttttgtatttttagtagagatagggtttcaccatgttgaccaggctggtcttgaactcctgacctcaagtgatccacctcccttgacctcccaaagggctgggattacagcgtgagccaccacgcccggcccggccatcccagaggttttttttaccttagggtgatgcacactgataggatttggggtgagtttctaatgtgccctttgtgtgttgggaagttgggaagggaggatcgtcttgacaccttgaccgcaggcacatgtccaggcagcccaggtctaggaagcagcactcgcgatggattctcacccagccttctgcccgtgcccctgtagcaaggccgccaggtgggagagtccggctttgaaccctgctgcttgaggaacaggggagttgtggcacgcctgccgctctcgtgtttgagttcaaactccttttctgcccccaggatggttcatatcatgaagatgttggttatggtgttagtgagggcctcaagtccaaggctttatctttggagaaggcaaggaaggaggcggtgacagacgggctgaagcgagccctcaggtgagcgcggggctgggagtctaacctgcgtcatttcagctcttgcttcagagcagatttcgattttttttggaagaggtaacacatccacatggttcaaaaatccaagcagcgtggaaggtaattctcacccctgccctggttcctgtctgccgttttcccactttcgttagtattttttcaatgtttctgtttcaggcttcccttgctgggagtaagtggtagaatcctgtactctctcttctccgtgcactcagtcatgtgtgccggaggccttcccactcctactgcgagtgcacagacagcaccctcctctccgtgctcctcagcagtcctccgctacgcacaggtagcatagttaacgtagttacacagtcacgcagatgtccgtgttagtccatttatgttgctatacaggaataccagaggctgggtaatttataaataaaggaggtttgattggcttatgattctgtggactgtactggaagcctggtgccagcatccacttctgctgaggcctcaggaagcttctaatcatggcagaaggtgaagagggaacgtggagagagagggagcaagagagagaaggaaggagtcccaggcttatttatttattttattgttgtttttcattttttgagacagggtcttgctctgttgcacaggctggggtgcagtggtgccgtcatcgctcagtgcagccttgaactcctgggctgaagtgatcttcccgcctcagcctcccgagtagctgggatcacaggcacataacaccacccccagttaattaaaaaaaaatttttttttttttggagagacagggtctccctttgttgcctaggctggtctcaaactcctgggctcaagtcatcctcctgccttgtgcctcccaaagtgccgggatcacaggcatgagccatcatgcccagcccccacactcaaaaccaccagatctctcatgagctgagtgagaactcactcaacaccaaggggatggcactaagctgtttatgaggaatccagccccaggatccagtacctcccaccaggccgcaccccccggcattggaggtcacgtttcaacatgaaatttggaggggataaacatccaaaccatatccgtgtctttgagaattgaagtgaattgaaccagaaaaacctatgagttctgtgggggagtccgtagatcccaagttaagaactctggtcatgggaggttgtgcccttgagcccccggtccccaagtgtgtgttgcctactcctgctgggaaattggagcagcctttggggggaaaaaaaagaaaaactctctgcagtttgttctccatgtcaggaggtggctggtgggttttgtgaatggcgccgtaatcttttcatactcatcttctctgtgagggcagggacttgtgtcttgtcctcactgcagtattctcagaaactaacacagtgcaggaacatgctagatgcttaccagacatcaatggggaatgcatgttagggtccacttcctctgctgctcctgagaagcaacctgtacaaaagttgtaattctattctctgatattcatgtgtaacaattcttaaccctgtttcacctttttttctcttgcccttaggagttttgggaatgcacttggaaactgtattctggacaaagactacctgagatcactaaataagcttccacgccaggtatatcagacatggatgagtggagtgaagataatgcggcaaactcttgtgtgtcatgggttgagtatttggaggatgcaaggagaaaaagtgaggactcagctctttagagggtcgggaatgttgatttcagatttcgaatgttagagacagcaggaactaatcccaacattttccttttttctaaagtacatcatgtgggccggggaccgtggctcacgcctggaatcccagcactttgggaggtggaggcaggtggatcacaaggtcaggagatcgagaccatcctggctaacacggtgaaaccctgtctctactaaaaatacaaaaaattagccgggcgaggtggtgggcgcctgtagtcccagctactcgggaggctgaggcaggagaatggcgtgaacccgggaggcagagcttgcagtgagccgagatggcaccactgcactccaacctgggcgacagagccagactccgtctccaaaaaaaaaaaaaaaaaaaatcacaccatttgacaagaatgtgaggtctagagaatttgtgtacgtgtaggtagtgaactgtggttgggggtagtctgtgaagcctcaaagcaagcacacagccctctgcagcaccactgtccttcccagacactcccagcctcgctgttgagccttctttcttttccttagttctggtgtcattacatgtctgatgtcattacaatgtcatttacatgtccattatttctgtcaatacctataacgtgatctgagcctttgcctttggagaatggggtctgtggtggggcagccctggagtcacactgccttgccatgagtggcttctggagtgttcctcctgcctcatctgctctccgaggtccctgccatgtcgctccccagggcagcattcccatcctgtgcctgagggattcttgtcctcatggagccccacaaggtgtgtgtcactgggcatctgtaaaaactcctttaaaaaaatcatttttaaacattattggattcagtttgctaatattttgttagacttttttttttgagacggagtctcgctctgtcgcccaggctgaagtgcagtggtgtgatcttggctcactgcaacctctgcctcctgggttccagcgatgctcctgcctcagcctcctgagtagctgggattacaggtgtgtaccaccacgcctggctaatttttgtatttttttagtagagacggggtttcaccatcttggtcaggctggtctcgaattcctgacctcatgattcgcctgcctcggcctcccaaagtgctgagattacaggcgtgagcccccgcgcccggcctttgttaggcatttttgcatctatgtttatgagagatattagtcaagttttctttttctttttttttttttgagatagtctcactctgtcgcccaggctggagtgcagtagtgtgatctcagctcactgcaacctctgcctcccgggttcatgccattctcctgcctcagcctcccaagtcgctgggactacaggtgccagccaccaccatgcccagctaatttttttatttttagtagatggggtttcgtcctgttggccaggctggtcttgaactcctgacctcaagtaatccgcctgcctcggcctccgaaagttttgggatgacaggcgtgagccaccgcacccggccttttctttttttaaattgtagtaaaacacatcacattttaactatttttagtgtgtggtcgagtagtgttaagtgtattcccattgttgtgaaattgatctgcagaactaagaccctgcacccgtaaaacaagaactccgcatttccccctttcccagacccttgtaactacttccactttctttcctttttttttttttttaatttattttatgaaagatgaggtcttgctctgtcagccaggctggaatgcaggagtgccatcataattcactgcatccttgcactcctgggcccaagggatcctcctggatcctcctgcctcagcctctcaggtggctgggactacaggtatgtgccagtgcacctagctaatttattttttaaacaattattactattttttttgtagagacagaatttctcagggctggtcatgaactgctgggctcatgtgatcctcctgcctcggcctcccaaagcgctgggattgcagcgtgggccactgtacctggagccagctaattaactttttttgggggcttttttttttaagaggtgagttcttgctatgttgctgaggctggtcttgatctttttttcttttttaaaaaattaggttaggcgctgtggctcctgcctataatcctagcactttgggaggccgaggtggttagatcacttgagcctaggagtttgagaccaccctggccaacatggtgaaaccctgtctctactaaaaaatacaaaaatcagctgggcatggtggtcagcctgcctgtaatcccggtggtcagcctgcctgtaatcccagctcttctggaggctgaggcatgagaatcgcttgaacctgggaggtggaggctgcagtgagccaagattgcactactgcactccagcctgggagacagagtgagattctgtctcaaaataataataataaaatataaaaataaaatacttttttgtgtgtggtcatggagttttgctattgcccaggctagtctcaaactcctggctacaagcgatcctcccactcagcctccttaagtgctgagattataggtatatgtgtctactttctgtttctgtgaatttgtctactctggatacctcatataaatggaatcacataatttttgctttttgtgactggcttatttcacttagctagcattaatgcctttaagattcatccatgtagtagtgtgtatcagaattcccttctttttgtggctgaatattctgttgtatatatagaccacattttgtttatgcattcatttggtgatggggatttgggttgctttcaacctcttggctattgtgaataatgctgctatgaacgagggtgtgtaactctctttgagatcttgctttcaattcttttagacatattctgaaggggattgctgggtcatggtaatcctatttttaatttttcgaggagctgccacactgattttcatacagttgccccattttaccattccaccaacagggcacatgagttcagatttttctaaatcctaaccagcacttgttattttctgagtttttggttttttttttttttttttttttaagccaacctaatgggcgtgatattttattggggttatgatttgcatacccctgatgattagtgatgttgaccatattttcttttttgagacagaatctcactctgttacccaggctggagtgcagtggcacaatcttggttcactgcaacctctgcctctgggttcaaacaattctcctgtctcagcctcccaagtagctgggactataggcgcctgccaccatgccgggctaatttttgtatttttagtagagatggggtttcaccatgttggtcaggctggtctcgaactcctgacctcaggtgatccgcccgccttggcctcccaaagtgatgggattacaggtgtgagcccccgcacccagccaaccatattttcatatgcttgttggccatctgtttatcgtctttggagagatgtctattcaagtcctttgtcattttattttgttttattattttaatttaatttcttttattcatctcatctcatctcatctcatgacaagatctcgccctgtcacccaggctggaatgcagtggtctgatcatggcttggctccctggagcctcgacatcctgggcttgagtgatcctcccacgcaggctggagggcagtcgtgtgatctcggctcactgcagcctctatatcccagactcaaatgatcctcctgccttagcctcccaagtagctgggactacaggcatttgccaccatgccaggctaatttttttattttttgtacagaatacaaaaaattttaccgtgttgcccaggctggtctcaaactcctggcctcaagtgatccacctgccttggcctcccaaaatgctgggataacaggcgtgagaaacccatatggcccaactcctacttttattgagctttttcgtattgtttttgtattctctctttcacttatgtttgctgtcatctttttagaatttcctttcttctagctttgggtgtaactttttttttctagttctttgaggtatagcgtagatttgagatcttttttttttaactatgtgtgtaacttccctcttacgacttctttccctgcaccccagaagtttggtaggttgtgttgtagtatcatttgtctctgggaattcttctaagttggcttgttacatttcctttgactttaagagtgtggtgtttaatttctactgatttgtggattttccagttttctttttgctgttgatttctagtttcattccattgtgattgaaaagatactttatatgatttcaatcttgaatttgttaggacttgttttgtggcctaacatgtagtctgtcttggagaatgttccatgtgtacttgagaagaatgtattttctgctattggtgggtggaatgttatgtatatgactgttaggtccagttggcctatagtattgttcaaatactctatcgccttattcatcttttgtttggttgttttatctattattgaaagttgagtagtgaagtctcctactattattgtgttgcttttatttcaccttacaatcctctcaaagtttgcttcatatatttaggacctctggtgtttggtgcataaatatttataattgttatatcttcttggtgaattgacattcttttttttttttttgagacggagtctcactctgtcgcccaggctggagtgcagtggcggtgcgatctcagctcactgcaggctctgcctcctgggttcacaccattctcctgcctcagcctcctgagtagctgggactacaggcgcccgccacctacgcccggctaattttttgtatttttagtagagacggggtttcaccatgttagccaggatggtctcgatatcctgacctcgtgatctgcccacctcggcctcccaaaatgctgggattataggtgtgagccactgcacctggctgacattcttatcattatataatactctcgtctcctataacaattttttttttttttttgagacggagtcttgctctgccgcccaggctagagtgcagtggtgcgatcttggctcactgcatcctttgcctcctgggttcaagcagttctcctgcctcagcctcctgagtagctggaactacaggtgcgtgctaccatgcccggctaattttttttttttttgagacagagtttttgctcttgttgcccaggctggggtgcaattgtgtgatctcggctcactgccatctctgcctcccaggttcaggcaattcttctacctcagcctcccaactagctaggactacaggtgtgtgccaccacacccagctaattttttgtattttgtagagagggggtttcaccatgttggtcaggctgatcttggactcttaacctcagatgatccgcccacctcggcctcccaaggtgttgggattacaggcgtgagccaccacgctgagcccagatttttttttttttttttagacagagtcttgctctgtcgcccaggctggagtgcagtggcgctatcttggctcactgcaacctccgcctcccgggttcaagcgattctcgtgcctcagcctcctgagtagctgggactacaggcgcccaccaccacacccaactaatgtttcgtattttttagtagagcggggttttgctgtgttggccaggctggtctcaaactcctgggctcaagtgatcaatccacctgccttggcctcccaaagttctgggattacaggtgtgagccactgagcctggccccaaatttctctttttttgttgttgagacggaatttcactcttgtcaccgaggctggagtgcaatgttgtgatcactgcaacctctgcctcgtgggttcaagcgattctccagcctcagcctcccaagtaactgggattacaggcgcccgccaccatgcccggctaatttttatacttttagtagaaatggggtttcgccatgttggccagggtgatctcaaactcctgacctcaagtgatccacctgcctcagcctcccaaagtgttgggattacaggcatgagccaccatttcctaagtgagcacagctgttcacctcccagatagagaatcagacctttaccagcagcccagaagccccattttgccctcttccagtcactgccttgctttccttttttcaaaagtaactactatcctgtcttctattctgacttccatggattattttttcctgtttttgaactttatatatgtaaagttcacaaatggaattgtactgtaagtggaattgtacagttcatattttaagaaaattgaccgaagtatgaaaaagaacatatagacaggttagacgagtgcacgtatcatccatgctcagcttgatgaattttccaaccaaacacatccacacagccaacatctgaatcaagacactgccagtaccgagaaggcccagctgtgttccttgcagtcactgccatcccctgccctccttcccactctgagcaaaccgcttttaacaacacagattggccgggtgtggtggctcactcctgtaatcccaccacttgagaggccaaggaagaaggattgcttgagcccaagagttggagaccagccaggacaacatagtgggaccctgtctgtacgaaataaaaataaaaataaaaataaaaattagctgggcctggtggtggcgcctgtagtcccagctgcttgggaggctgggctgggagaatcatttgagcctaggaggcccaggctgcagtgagctgtgattacgccactgcactccagcctgggccacagagcgagaccctctctcaaaaaacaaaacaaaaaacaaagaaagccaccaatttgtttttattgttatgtacttttttggaatcctacagtttgaactctttgtatcttacttgaattcagcatggttgtgagattcattcatggtacgagcagcagtttcattgctgtataattttcttttgcatgagtatgtggcaatttatttttctagtcttttcttagtagacattttggtttttgtagcttgtggctgtttcgattagagatgctgttagcattcttttgctgtacagttgcactcatttttgttgggaattattgggggagaagataggtacgtgtttagttttagtaggttcttcccgttttcctgtatggttgtattaattcacaccccacgtggcattgcgtaagttccaattgttctgtatctttgacagcacttggtatcgccagtctttcatatttttcaaagctcgtttcttttttttgagacacagtcttgctctgtcgcccaggctggagtgcggtggtgcgatctccgcccactgcaacctctgtctcccaggtttaagtgattctccctgcctcagcctcccgagtagctgggattgttggtgtgtgccaccatgcccagctaatttttttttttttttttttgtatttttagtagagacaggctgttactcaggagttccttcgattttttttttttgtatttttgtatttttgccattttggccaggctggtcttgaacccctggactcaagtgatctgcttcggcttgccaaagtgctgggattacaggcatgagtcaacgtgcctggccaaagctcatttctttttaaactactcatttatctttcaatgtagacatgaaatctgcactataattttcattttcaggtcaaaatgtaatcatcttaatccctcatattcaaacaattattccatcagcatcagttttatgaattgagagatgttttcccaagtaaaaatgttctggatttctgtaggaatccgtgtggaaatgaaaccatttgccctgtgccacgcagcacaggactgtcccttctcatgttgatgagatgcagagcagccccgttctggaagattccttgcagccttggctggcagccggcgtccgtgcctcccaagggttcttccctctgtcgtttgaagggttcttcgtgatgccacagcgtgcccgaggctccctcagtgacgagcgcgatttgcaggggtggccctggcagaaagggttgggaaggtacagacctccacagagactgtgtgtgctcatttccgtggaaaaaggacaaggaggcagcaaagacagacccagcagcccaggaaagattcaaatgcgattttacagaacatctgccctaagtcaaaaccaaagaaggattcctttttatcaaaacttcactaacacagaacatgaaattgtttggctcctcctgctcatggagttacaggacctagaaggcgtgatggatggaggatgtcaaatgcgattttccaggaatcgcaatctgtgagtcagggagaagcagcggagggcaagagccagttgaaggaatttgtttttcttctttccttctagttgcctcttgaagtggatttaactaaagcgaagagacaagatcttgaaccgtctgtggaggaggcaagatacaacagctgccgaccgaacatggccctgggacacccacagctgcagcaggtgacctccccttccagacccagccatgctgtgataccggcggaccaggactgcagctcccggtatgcggcctaagtcccctcctttcctctgcggcccctcctgtgtcacggggctgcctccactcaggcctccagagccagccagccgtgcgtgtcctcccagcagccgcggctgttgctcaggagcccgtcctcgccgccgccctctcatgcagaagcctgagctcatccgccgtggagagcgaggccacgcaccagcggaagctccggcagaagcagctgcagcagcagttccgggagcggatggagaagcagcaggttcgagtctccacgccgtcagctgagaagagtgagggtgagcgaggggtgggagcagggccctgggaggcgtctgcaggaggaagtgtagccgcagggtcttctgattctctgcggtaaccctgggccggctccaaaccaggcctcgctgggacttctctcaagctacacgcaggagagatgagcccaggaaattcagatatttaaatctgctgtacattttcccgtttctaaagacaatgatttcttttttcccccgtggaactaagtgggccttgataaaatcttctagaattagaaatttcagggtaaagaacttttttttgcttcgaatgctttggccatctctacattagaaagccttggccgggcacggtggctcatgtccgtaatcccagcactttgggaggccaaggtgggcggatcacgtgaggtcaggagtttgagaccagcctggccatcatggcgaaaccccgtctctattaaaaatacataaaaattagccaggtgtggtggtgcatgcctgtggtcccccctactcgggaggctgaggcagaattgcttgaatccagaaggcagaggttgcagtgaaccaagatcgtgccactgcactccagcctgggcaacagagtgagaccctgtctcaaaacaaaaacaaaacaaaaaaaaaacaagccttgtgtttctgagatatcttcgaatacaaggcaaaattgggattgagaataacgggaacttttggcagattatttatcaactttagtttatttcagagtccagattgagtgggaatagtgatacagatgccttctttctttcttctctgtctccccacctgttctctcctgcccatccagcggtaggtagtccttactcagagagtggaaacagagaaagggcttgtctcagacccatcgagcttttgcccagtttttccctacaaattgtgaagcagattcacagaggacttgcttcatggttggttcattcatatgcccctcagcaccgacaggctgaaattaacataaaaaccaaaacagaaccacttcctgtcctgtggatatccttactgttgagttattgcaggtgtttagcttcttaaccattgcagaagctcccgggtagattgtggaggaagctgccctccaggcctttcctgccccttggcagacaacccgagccattgttattttaatccatttcacacatcagattttggctgaagattttgtttgttggtttgttttcagacagggtcttgctctgtcacccagcctggagtgcagtggcgggatcagggttcactgcagctttgaccttcctgagctcaagtgatcctccttcctcagcctcctgagtggctgggactacaagtgcatgctaccacacccgctgatattttattttttgtagaggtggcgtctcgaattcctggtttcaagcgatcctcccaccttggcctcccaaagtgctggggttacaggtgtgagccactgtgcctggtcagattttagtttaagattttgtttgagcaagggttatggctgttaacaagcgagccagacactggattagatggcctgtgagaaaccttttacttttgctgtgaaaggagaaagaaacttgtttttcccactggtgagaagaattcaaaccacagacagatctgtaggtaggactgggactcgggaagctgaagttctttttactggcagaagcagcgcagccctaagcggtgttgtgcttcggagagtgttccctctaacaagaggggagtggacccacgctctgaaatcccatgcagtgatgtgatgatgacttgtcctttctctcctctgtgaaccgtagcagcgcctccggcccctcctgtgacgcacagcactcctgtaactgtctcagaaccactcctggagaaagacttccttgcaggagtgactcaagaattaatcagtaaataccttgaaatgcttgtaagctactgtgctgtatgtttctagtagccacagaataccttttaggcgacataaaaatcctcattttcgtgtggttttgttgagggggttctggctgatagcatatgtccagttcctctttggtcctaaccaaagggaagtgtacttttagggggaggggagagaaattccaaaaactttcagaaggtactgaagacatggaatttctgagggccagtttttccagtgctttctgtgagaatacttcattatttgctgatgacgcacttttccttgacctctgtagagactcttgaagacaactctgaaaagtgggctgtgactcccgatgcaggggatggtgtggtcaagccctcgtctagagcagacccagcccagacctctgacacattagccttgaacaaccagatggtgacccagaacaggactccacacagcgtttgccaccagaaaccacaagcaaaatctggatcttgggacctccaaacttatagcgctgaccaacgcacaacaggtagcagagaggtgtttaggcacaaaaattaaggggagatcctagctttaattctgggaatttttgaggaaggatgacatttcatttaaagtttgatagaatcgggaacttctattagggaatggtactgcaagtagaacagaattgatttaagagccagaacgtttcctttgggctcctgacttcaggtgcagcccttttcagctcctgataatagcaggaagcggaaacgactgcatggagagctgtccctcccagcagcaggtctgtcatgagcacgaggccacttggtctaggagaatcatctgccttcctcctaacagtaattctcattcttgggcttagtctaaattaggatcattaatataatccagaaatcattagctgtcagtttattttaaaattatggcagctacatttaagccattttgtcttccataggaaactgggaatctcataggaagagccaggacatgaagaaaaggaaatatgatccatcttaactgaggctcaggccacataattggactctgtcacaaagggactttggaaaactactttttggtcatgaaattgttcatcgctgctggagaatgaacgtcattgcgatttatcttgcttcattctgaaccttatcaagaggatctgactgagagcccactgcagttagagctgagcacttttgaaaagcttgtccatcactctagtagggagaggctctggacagatgaataccttttcttcggcttgtgaggcttcccactatttattactgaactattatgttaatgaagatggacattttaggaatcaccaatggctccttgccctcaagcaatataggccagacttggtcctaagcacctgcctcagcaattgtctacattcagttgttttgcataacgtctgccttctttcctttacggtccatgcctttaatgttgcccacattaagcactgtggatcacgacaggaaaaaggttggagcagtgcttttcactactttgtatcaatccaggctacaatcttcatttaatataaataatttatggatttatgacattacaatcctgcattgtttcaagactgacattttttcctaaggaaggaaataatcatctaagaccacgaaaaaaggctgttttttgtttttttttttttttttttttttgagacggggtctggctgtgttgccctgactggagttcagtggtgcaaacacagctctctccacaacctcttgggcccaagtgatactcccacctctgccttacaaaatacagggattactggtgtgagccactgtgtctggccagaaaaggcatttttgagaaagcaaatcgtatacc

SEQ ID NO: 15758 - DNA, 35772 bp, Homo sapiens
tctcttccccttgtccatagcctagatcgagctccctgtgtgcaccgcgcgctgcccgaggcgcgtaagtgggggaggagagcggcttcccccggggtggttctagccgtgggtgtggagcgtgggaaggctcagcttccgggtcgagaacctggggctgcggtggacctgatcctgaggtctcagcgtagagatgctgagtccagaggcctgttctagttcaccagtgcagtgaggggctcagtatccgggcctcccgagaggtgggtaggaaggcggggtacaggaaacttggcaccaacgcgccgggaccccaccgcggtgcggacagccaggtgtccgtggtggcgcttccttggagatgctgcctgcagacaggcgtggggaatctgaagtttgtgttaatagctaaacgaagttgagttgcagggagcgggggacgctgggaagaaatgattgatttaaaaggaatttgacgccgggcatggtggcggcatgcccccatgttccctggaggtcaagcctgcagtgagccgagatcgcacccgtaccacgacactccgtcccgggcgacagagcgagaccctgtcacgggggaaaaaataaaaataaaaatttgacgctcactttagctgagtattgagccttgttataacattgagatagaggtctggcgcggcgtctcacacctgtaatcccagaactttggaaggccgatgcgggaggatcgcttgaggccaggagttctacgccagcctggctaacatagcgaaaccccgtctctactaaaaatacaaaactaggcaggcctggtggcgggcgcctgtaatccccgctactcgggaggcggaggcatgagaatcgcttgaacccagtaggcaggtgtgccggtaagccgacatcgcaccactgcactccagcctgggggacagagcgagaatccatccaaaaaaaaaaaagttataattcacgtacaattaaattcactcccttttttaaaaaaaagtggagacatagtctcgctctgttgcccaggctggagtacagtggcgccgtctcggctcactgcaacgtccgcctcctgggttcaagcgattctttgcttcagcctctcaagtagctggaattacaggcgcataccaccacacccagctactttgtatttttcaccatgttggttaggctggtctcgaactcctcgcccttccaaagttcagggattacaggtgtgagccaccacacccagtctaaattcacccttttaaagtgtgcaattcagtggttttaatatattcacaaggttgtgcaatcaccactattatctaattccagaacatttttatcatccctaaaagaaaccttaaaaccattagcagacacccattatttcctcctactcccagcagcactaatctatgaatttacccattctcagtactgtattatacaatatttgttcttttgtgtttggtttatttcacttcatgattcaaagtccatctatgttgtatgtagcatgtatcaacttcattttttaaataactgaattatttattgtgtggatataccacattttgtttctccatttttgatggatactggtgattttctaggctttctaggtctagtcctccacagaactcgcagtctgaggcacagacatttaaaacttaagtttttggaaactagcatttaactcttgggttgggtcaggtaattcagtggcctcaggtctggtatcgtttagggcagttttttttttgttttttttttttttttgagatgaagtttcactcttgttgcccagggtggagtgcaatggcgtatctgggctcactgcaacctcacctcctgggttcaagcgcttctcctatctcagcctcctcggtaactgggcttacaggcgcatgccactatgcccggctaatttttggtatttttagtagagacagggtttcaccatgttggccatgctggtctcgaactcctgacctcaggtgatccacccatctcggcctcccaaagtgctgggattacaggtgtgagccaccgcgcctgggtgggagttttgtttttttgtttgtctgttgttttttggggggacagagtttctctcagcctcctcggtaactgggcttacaggcgcatgccactatgccaggctaatttttggtatttttagtagagacagggtttcaccgtgttggcaatgctggtctcaaactcctgacctcaggtgatccacccgcctcggcctcccaaagtgctgggattacaggtgtgagccaccacacctgggcgggagttttgtttttttgtttgtctgttgtttttttggggggacagagtttcgctcttgttgcccaggctggactgcagtggcgagatcttgactcactgccacttctgcctcctggattcaagcgattctcctgcctcagcctcccgagtagctgggattacaggtgtgcaccaccacacccggctaattttgtatttttagtagagaaggggtttctccatgttggttacgctggtctcgaactccctacctcaggtgatcctcccgccttggcctcccaaagtgttgggattacaggcgtgagccactgcgcccctctgggagtgttttttaaagtgttctattctcagttcaccacttaccaggccgttaattatcgtggtatcaagcagagaaatgtttgtgtgctggtcttctcagggaggcagaaaccgtcagagattgctgttgtgtaatgtacaccaaaacgtgttatcttgtagtataaacggtgtagttggagatgagtgtatgaaaaatgtaactgagctagctgtgggagagactagttgtgaaaaattttgagtcacccactgtatgctttcccagctatgttcaaataaggtgacactctgccttcctgtttcagctctaaaactgttcataagtgttattttggctgtatacgtagtgccatgtttttttgtatttttgtgcttttggtgattttgctgtttataggggcctccaagaatagaagtgctgtctagcatttccaagttgaaggctgtgatatatcttatagagaaaagataagcttttagattagctttgttcaggcatcacttttgttgttggctgtgagttcatgttactgcatcaacaatatatattaaataagatatctttaaacagaagcacacataaaacaaggttatgtattggcctgttgagtaaccctgtatttcccctgggagcagtggctcagtatttgctagttcagtgttcatgatggctttacaggacataactaccctgaataatgagaactgactgtctcagtagtgcttcaagggcagaaagcctagtggatatttttccatctctgcagcttttagcatttcttcactcaaggcactcatttttaatattgaactggcagttttgatgtggagagaagctaaaataaggctaaaatgctcttcatactatgtgctgagtggggactgtgctgagtgttggggattcagtgattagtgtatggccccgcagttctctaatggctgagtgtgggagtgcagagaaatgatcagtgtgagggaattaatcctatgttcccaccgtgtttttttgttttttttgagacggagtttcactcttgtcgcccaggctggagtgcggtggcgtgatctcggctcactgcaacctccgtctcccaggttcaagcgattctcctgcctcaacctcccgagtagctgggattacaggtacccgccaccgtgcccagctaatttttgtatttttagtagagacggagtttcaccatgttggccgggctggtctcgaactcctgacctcatgatctgcctgcctcggcctcccaaagtgctgggattactgggttcccacaaattttaagacttacttcaggccaggtgtggtggcttatgcctgtaatcccagcattttgggaggccgaggtgggcagatcacctgaggtcaggagttcgagaccagcctggccaacatggtgaaacccctgcctctactaaaagtacagaaaattagctgggtgtggtcgcgcatgcctgtagttccagctactcaggaggctgaggcaccagaatcacttgaacctgggaggtggaggttgcagtgagctgagattgcgccactgtactccagcctgggcaacagagtgtctccccctcaaaaaaaaaaagacatacttcagagtgtggtgagctgcataaggctttagaggtaatgacattttgagatttcaattaaaaattttttttctactttttttttttgagacagagtctcactcttgctcaggctagagtgcagtggtgcgatcttggctcactgcaaccttcgcctcctggattcaagcgattcttgtgccttagcctcctgaggagctgagattacaggcacctgccaccatgcccagctaatttttgtatctttagtagagaagaggtttcatcatgttagccgggctggtcttgaactcctgacctcaggtgatctgtctgcattggccttccaaagtgctgagattacagatgtgagccaccgtgcctggccactttttttctacttttgctaatttttttaaagtttcatgaacattatagtactgtgttcataaatgaaaataaaagaaacttgctccagtcttgttcatcaagccgttcttgaccttcacagtcagaatctcacccatcaccttgtcacatctccctcttgatctgtatatccagagtccacctgacatgcttcttcagccctccacatataataagaaatggttttgtgagccgagattgtgccattgcactgcagcttgggcaacagtgtgagactcctcaaaaaaaaaaaaaaagaaagaaaaatgcttttaggtgataaggaaatggagaagaataaaacatctttgccagtctttacctttttaatatcttgaattcatgatttcttgccatagccactatcctagtccaggctctctcccttctacccctgagttttttttttttttttttttaccatgtttttatttcctctgggaaaacacctatcagaattttgggatcatatgacagatacatatttaatttctttctttcttttttgagacagggtcttcctctgttgcccaggctggagtgtagtggtatgatcatggctcactgcagccttgaccccttcctcgcccccgctcaagtgatcctcccaccacagcttcctgagtagctgggactgccggcatgctccaccatgcccgactaacgttttgctgcttgtagagacagccatgttccctaggcttgtcttgaactcctgagcctcaagcgatccttccacttcagcctcaagtgctgggattacaggcgtgagccaccactcctggctacttaatttctttctttctttttttttgagacagtctcgttctgtcacccaggctggagtgcagtggggtgatctcttctcactgcagcctctaccttccaggctgaagcaagccttccacctcagccccctgagtagctaggactacgggaacattccaccaggcccagctaatttttgtattttttgtagagatggagtttcatgatgttggccaggctggtcttgaactcctcacctcatgcaatccgcctgcctcagcctcccaaagtgctgggattacaggtgtgagcaactgcacccagcgggccccgcccagacctattttcaaaattagaaaaccgtgaggcttctggaagaagatgagaagaatatcttcatgacctgagtgtgtgcaaaggtttcttagggctcaggatgccagagtcacttaaaaaagcaaaaaaaacccaaaaaaaaaaccacacacacaaagataaatatgattgattacatcaaaatgtaatcacagactactctaagaaaatgaatggggaaacacagggacctatttgacaaaagactgatattcaagataaataaagaactaataggccaggcgcggtggctcacgtctgtaatcctggcactttgggaggccgaggcggggggatcacttgagctcaggagttcgagaccagcctgagcaatatagtgaaaccccatctctactaaaaatacaagaattagaattagctgggcgtgatggcacgtgcctgtagtcccagttactcgggaggctgaggctggagaattgcttcagtcaggaagatggaggttgcagtgagccgagattgtgccactgcactccagcctgggcgactgaacaagacttcgtctcaaaaaaccagtagggctccaggcctgggattgggcctctgctgctctactccctggacgtgtggctccgtccttggagtcggcctttggttttcatgaagagtagtgtgcattaacagctgagtggttttatcagcctgtttcctgccaacagtgtatgagagttccagttgctttacatccttgccagcatttggtgttgtcagtcttttgagttattctgatgggtgtggtgtgtcatggtcttaattttagtcctcagtcactaatggtgtttagcactttttcctgtgcccatgacaatgtgcatcttcctttgtgaagtgcctgctcaaatcttttgcccattttacattgggttgtgtgtctttttattattgagttgtagcagttatttatataacctttatatcctggttacctgtcctctgtctggttgcctattcattttcttagagttgtctgatgaacagaagttttacattttgatgtaatcagttttctcttatattttcttttatagttactgctttctgagtcctaggaaatcttggctaccttcaggctgtgaagataatctttcatgttttcttctgtaagttttttttttttttgagacagagtcttgctctgtcgtccaggctggagtgcggtgatggcgatctccgctcactgcaacctctgcctcccaggttcaagcgattctcctgccccagcctcccgagtagctgggattacagacatgcgccaccatgcccaactaatttttgtatttttattagagacagggtttcaccaggttggccaggttggtcttgaactcttgaccttgtgatccacccgcctcggtctcccaacatgctgggattataggcgtgagccaccgtgcccggcctataaattttatagttttagttttatgtttaagcctatcacccatttctagtttaggtgaatggtgtgagatataattaaatattaatttcttttccatatagatatccagtcattccagcaccatttgttgaaaatgctattgtattgcgttttggaaattaagatgactgtacaaatggtaattgatgtctgcactcccttttctgttccattgttcaatccttgtgttagtaccacacttttaattactgtagctttttagtaagtcttgaagtcatgtagttgtaggtcttccaattttgttgttttcaagcttgatgtgaatattctaaatcctctgcatttccatataaatatcagaattatctttaccagttttacagaaaagtctggtaaagttgtgattgggattgcattgaatctatggatcaatttggaaagaaatgacacctaaacagtattgagtcttcaaatatatgaacttggtgcattttccttcttatttaagccttttaaaatttctttttaggccgggtgcagtggcttatgcctgtaatcccagcactttgggagtctgcagcgggcagatcagctgaggtcaggagttcgagaccagcctggccaacatggtgaaaccccgtctctactaaaaatacaaaaattagccaggtgtggtggcaggtgcctgtagtctcagctacttgggaggctgaggcaggagaactgcttgaacttgctcaggaggtggaggttgcagtgagctgagatagtgccattgcactccagcctgggcaacaagagcaaaactctgtctcaaaaaataataataataaaaataaaaattttgggccaggtgtggcggctcacacctgtaatcccagcaatttgggaggctgagccgggtggatcacctgaggtcaggagtttgagaccagcctgaccaacatggagaaaccctgtctctacgaaaaatacaaaatttgccaggcatggtggcgcatgcctgtaatcccagctactctggaggctgaggcaggagaatcacttgaacctgggaggcagaggttgcagtgagccgagatggtgccattgcactccagcctgggcaacaagagtgaaactctgtctcaaaaaaaaaaaattcttttagttctgttttatggttttcagttcagaagtcttatacatattttgttaaattgatttctagatatgtttcttacctttattgtaaaatggagccatcatttgcatcattcattactctgtatgtaatgtgttatcattctctacctgctttcaagattttctctttatttttgttttttagcagtttgtctgtggtgtatctaggtgtcattttatttgtatttatccggagatttattcttgagatttgcagagcttcttaaatctgtaaatttatgtctgtcggccaatttgggaaatttggagctattagttttaaaaatatttcttctgttccattctctttcacttcttctgtatgtgagttcaatttcacttcaattgtatgtgagttagacattttgatattagcccacaggatcctgaggttctttcattcttttcaatcttttttttttctcgaagtttgcatttcgtgagcaggagtgacagtcattcaggatgatttttgagattcctagttcaagagtagttcctattcttttctaggtgtagtcaagtatggcttctaattctactagaaggcttttttgtcggggaggtggttctatgtcctttggctcttacattttctttgtgtctttcacagcacagttttcagagggtaccctttctctttggttttgttttgttttgttttgttttagacggagtcttgctctgtctccaggctggagtgcagtggcgcaatcttggctcactgcaacctctgctcactgctacctctgcctcccgggttcaagcaattctcctgcctcagcttcctgagtagctgggactacaggcacgcgccaccacacccaactaatttttgtatttttagtagagactgggtttcatcatgttggcaaggctgttctccatctcttgacctcgtgatccgcccgccttggcctcccaaagtgctaggattacaggcgtgagccaccgcgcccggccaacagagggtaccctttcattctttttctccttcttcccagaaggcttgcgttttcaagactacctcatcaagttctgcatgtgtttaaaagtgtctctacccgaccttcccttcctccctcccgatttaacggaattctttgttggtgttttcatacttaccgtgagttttctttttcagggtgatattttagttccatcttaggctctccattgtcctcttctctcttctttttttttttgagacagagtctcattctgtcacccaggctggagtgcagtggtgtgatctctgctcactgcaacctctgcctcccaggttcaagtgattctcctgcctcagcctcccgaatagctgggattacaggcgcacacaaccacgcccacctaatttttgtattttcagtagagacggggtttcaccatcttggccaggctggtctcaaactcctgacctcgtgatccgcctgcctcagcttcccagagtgctgggattacaggcatgagccaccgcgcccggtgcgcccagccctcttctctcttctttgcatctctcttcctatctggatccctctttgctgtccttaaagagctgagatgagagattgagaaacatctctacaagaaattgacgtttttctacttatgggtaattagaagcttgtagtattttcagtcttctaagtatgttgaagatatgagacgttggtgattttctttgtttctccggttggttggtctgtgtagtttttggacatgtgtttggatatttggatttatatagctgccataatcttggctatgcaggtagtctttcctgacacttcatcctgaaagatttgaagcctttggacaaattttacagtgggctgggtgcagtggctcacgtctgtaatcccagtgctttgggaggctgggcaggaagattgcttgagcccaggagtttgagaccagcctggacaacatagtgagacccgtgtctctacaaaaaataaaaaatatgccgtgtgtggcgttatacaactgtagtcccagctacttaggaggctgaggtgggaagatcacgagccaaggagtttgagggtacggtgagccatgatcgcctcactgcactgggtggcacagcgagactgtctcaaaaaaaaaatttacaattaatgtctgcatatccttcacctaggttcataaatttgtacttttgctttatctacttgcctttttctctctctctacacacacacacacacacacacacacacacacaattagttgaatgaattgagagtaagttgcagaaaacatgacactttactccaatattgcatcatacaaaatcatacatctagtgataggccattgtcctacagaatcacgatataattatcacactaaccagctgtggtggtgcacacctgtagtctaagctactcgggaggctgaggcagaaggatcacctgagcccaggaggttgtggctgcagtctcatattcatcccatcatcagatttctcccattgtcctaataatattctttatagcttttctttatccctgatccgaaatttcattgaagatcacacagtgcatttagttgtcatgcctcttaagtctttatttatttattatttattttttgagatggagtcttgctctgttacccaaactggagtgcagtggcatgatcttggctcatgcaacctccacccgctgggttcaagtgattatcctgcttcagcctcccgtgttgctgggactacaggtgtgtgccaccatgcccagctactttttatatttttagtagagacgggaattgtaccatgttggccaggctggtcttgaactcctgagctcagatgatccacccgccttggcctcccaaagtgctgggattacaggcgtgggccaccacacccagccttaagcctcttttaacataaaagagttcaccagccattctattttgttttgctttttgagacactgatgctttggagagtccaggccagttgctttgtagatttcaacttgtttgattgtttcctgatgattaggttggtagaaatactacctcaatgatgggaccttcttagtgcgtccatcaggaagcacatgatgtgactgtaattggtgacattaagtttgattccttaataattaaggtggtaactcccaggtttctacattgtaaaggcatcttttgccgccctcctttttattcccaagtagtttatttggagattagtcctttacacagtagaggagcggggaagggagacaggaaaggaaagtttgacaacaaagggtgagttttcaagcctgttgccacgggggaacctaattccactggagaagctcatggcttggtgatgttccacagaggggtcagaaatttagcgtatttcaacaccagctcctgtcaggcaccatttgagggctgctgccagggtggttcaattttctggtgcttacagcttgccataaacaggtgcaaagtagtctggataccaaagaaagctctcaggtaacaagatgcagatgttggcatttggaagtcagaatagggtgcactattgtggtaagagctgaagggatggctgggcgcggtggctcacacctgtagtcccagcactttgggaggatgaggcaggcggatcacctgaggtcagaagttcgagagcagcctggccaacatgacgaaaccccgtctctactaaaaatacaaaaattagccaggcgtggtggtggatgcctgtaatcccagctattcagtaggctgaggcaggagaattgcttgaatctgggaggtgtaggttgcagtgagctgagatcacaccactctgcactccagcctgggtgacagagcgagactctgtctcagaaaaaaaaaaaagctgaagggatgctgagtagagcatccgtagtgtctgctatacctgggtaccctagaacctggagaacctacagcttgaggcaagagcgtatgtgctattattttttcaagaagtgtgctctcaggaagcagaggtaggggaaaggtgagtgaagggagaaggaagattaagtcagttcaagggtgcattttgaagttggttgcccttggtgcaagtacagttggttgcttgttctcctaaagctgtctcccaggaggatgtatacataactgcattccagggcaatccatctaaaggaagggtggacggacccctcagcttctgtatctcactggaaaaaggtttgcttcatggcacattaattcccatagacttctaggttgtgcatgtgtgggtaccaggtgggtcccacagacccttacacctccaaggcaagcagcaagccacgggtgggaagtgataggtacccagtatgagcaggaggtaagggaccgtggggttgtgcctgtgggcagttggttataacccagacgtgtttgatcagcccagtgacagctggagtggacaaagtgaccaagggcctcaaggacacacaaggccaagaagatttgaagtgctgtgtaagatatgcctaatgcatttggattctacctttgtttaacgaatatgcacacataaaaaacacttgaactccttgagcccaggagttcaagaccaacctgggcaacatagtgagacactcatctctaaaaaaattttaaaaaaaattaacctggcatgatagcactcacctgtagtcctgtctactctggaggccgcagtgggaggatcacctgagccctggaggtcaaggttacagtatgctatgattgcaccactgcattccagcctgggtaacagagcaagacgctgtctcttaaattttttttttttttttttttacttttataatggaaaaaccattgtagacagttttaggaaggaaagcagaatagtaagacatctttttcaaagtaaaagagcaaaaaaggcaaaaaatatttcacatttactttatggacaaagataagattgtccttcaataaaagactgaattttttttgtttgttttgttttgttttttgagaaagagtcttgctccattgcccaggctggaatgcagtggtgtggtctcggctcactgcaacctccgcctcccgggtacaagcaattctccagcctcagccccccgagtagctgggactacaggcacgcgccactgcatctggctaagttttgtatttttagtagagatggggtttcaccatgttgaccaggctcgtcttgaactcctgacctcaggttatccacctgcctgggcctcccaaagtgctgggattacaagtgtgagccaccgtgcccggccacaagttgctctttaaatgtgagaagtgttctggcatggtggctcacacctgaggcgggtggatcacttgaggtcaggagttcgagatcaggctggccaacatggtgaaaccccgtctctagttatttatttatttatttatttatttatttatttatttatttttttgagacggagtttcactcttgtttcccaggcgggagtgcaatggcgcaatctcggctcactgcaacctccgccttccgggttcaagcgattctcttgcctcagcctcctgagtagctgggattacaggcatgcaccaccacacccggctaattttgtatttttagtagagacggggtttttccatgttggtcaggctggtctcgaattcctgacctcaggtgatctgccctcctcagcctcccgaagtgttgggattacaggcgtgagccaccacgcccggccctgtctctactaaaaatgcaaaatttagccgggcatggtggcgcacacctgtaatctcagctactcaggagactgaagcagcagattcgcttgaacccaggaggtgaaggttgcagtgagctgagaccacaccactgcagggcagcctaggcgacaagagcgaaacgcttacaaaaaaaaaaaaaaaaaaagattcacaggtgatggtgatgctgctggttaaggaagtgaagtggctttttgctctgtagccttcctgaatgttggggcctcctgctcttcatttgtttcatttctattaagtctcctccctccagctatcttgttagctcctggaaagcatttcagtgattgtggcttctatttctttttgaccccacagtgtccagggtcatgctgcctatatagtagtgagcagtaagttgaggtttttaaaaactttattattattatttttgagatggagtcttgttctgtcacccaggctggagtgcagtggcacaatctcagttcactgcaacctctgcctcccaagttcaagtgattctcctgcctcagcctcccgagtagctgggactacaggcgcctgccaccacatccggctaatttttttgtatttttagtacagatggggtttcactatgttggtcaggctgatctcgaactcctgacctcaggtgatccgcctgctttggcctcccaaagtgttagggttacaggtgtgagccaccacacctggccggtttttttaaactttaaaacagattcacttgatttttcttccctaccccccagcttttttgaggtatgactgacaaaaattgtatatatttagggtgtacaatgtgatgatttgatatgtgaatgcactgtgaaatgattaccacagtcaaggtaattcacatatccaccacctcccagttaccctcttagctagtacaggttgggtattgcttctctgaaatgctttgggaccagaagtgttttggacttcagattttggaatatttgaatatatataatcagatatcttgggaaggggacccaagtctaaacatgaaattcatttgttttcagagcctaaagatgatttttttttttttttttttttgagatggagtctcactctcgcccaggctggagtgccgtggcacaatctcagctcactgcaacctctgcctcccaggttcaagcgattctcctacctcagcctcccaagtagctggaattacaggctcgcactaccacacccggctaatttttgtatttttataaagacatttcaccatgttggccaggctggtctcaaactcctgacctcaggtgatccgcccgcctcagcctcccaaagtgctgggattataggtgtcagtgactgcgtctggctgataattgaatttttctcttggagaagctgaataaactgtgtgttgtgtgcctgcctttttttttgtttttttttttttttgagacagagtcagacactctgtcacccaggctggagtgcgatggggtggtcatagctcactgcagcctcaaactcctgagctcaagcgatcctcccacatcagcctcctaagtagcatagcaccacgcctggctaatttttaaattttttgtagtgatggggttttgttgtctaggctagtctcaaactcctgggctcaagcagtccttctgccttggcctcccaaggtggtaggattataggtttgagccaccatgcctggccattacctgtgttttgactataacacatcatgttggcactcaaaacgttttggattttggagcattttgaattttggatttttggattagcaatgttccacctatagtacattttttgtttgctttcccataaagaattttttgtaattttgattttatagttctaaatgtaatatattcttattgtaaaaatcacctttaatagcaccgccagaatagcaaacatgttaacagaaaggtagaagtagaccttaaagaatcttcagcagcttgagagaccacagctaaccactgaggaactctgttctggattggagcagtgcttagaagcttataaataactcttagggtattgcatagggattctttttttttttttttcctgaaatggagtctcgctctgtcgcccaggctggagtgcagggtgtgatctcagatcactgcaacctccgcctcctgggttcaagcaattctttgcctcagcctcccgagtagctgggattacaggcgcctgccaccatgcccagctaatttttttggatttttagtagagagggggtttcaccatgttagccaggatggtctccatctcctgaccttgtgatccacccacctcggcctcccaaagtgctgggattacaggcatgagccactgtgcctggccgcataaggattctttatgtgatttttcagtagaggctcttgccttttactttaaacattctttgagggttgttttttttttccgctttttatttatatagaggtcaaccagaatcaagatgtctgggactgaggaagcaattcttggaggacgtgacagccatcctgctgctggcggcggctcagtgttatgctttggacaggtaactgtggttccttcatgccgggaaagaatgaggtgaagtgagtaaagttagggcaaggcagtttgtagagcatcgtagtacatgtgtgagcagtacctagtacgtttacctagtacgtgtgtgagcagtacctagtacgtttacctagtacgtgtgtgagcagtacctagtacgttgacgcggtgcgtgcgggggcagtacctagtacgtttacatagtacatgtgtgagctatttgttattggtttttcctttagatgcattttttgggagtcttgtgaactctggagggcattttggaatgttagctatcaaaagactgatagtactggggattagatttagattttaaattttttgtggggggggatagataacatatttgtatgacatcaaattcaaaatgaaactgtgaaaatctccctatttcctattgcccctgtgtgcatgccacccagttctatttcttttttttttcgagactgagtcttgctttgtcacccaggctgcagtgcagtggtgcgatctcagctcactgcaacttccaccctctggattcaagcaattctcctgcctcagcctcccaagtagctgggataacaggcatgcaccaccatggccagctaatttttatatttttagtagagatggggtttaaccatgttggccaggctggtctcgaactcctgacctcaggtgatccgcctgcctcggcctcccaaagtgtttggattacaggcgtgagccaccacgcccgggcttaatttttttgtatttttagtagagatgtggtttcaccatgttggccagggtagtcttgaactcctgacctcgtgatctgcctgcctcggcctcctaaatgctggaattacaggcatgagccaccgcgcctggctccagttgtctttcttggaggcatggaaagttactgggggtcctattccttgtagggacattgtgtgcacagaaaagagtttcttgctttgtccacccaaactccatctttgtctttagcagagagttgtgagtattcatctcatctgagcagggcaagggggacaaaacccaaatcagcaagcagtagtgtgtttctgtttgtgcaggatgggaaattgttgtattggagaaggcgtcaatctctggaaaggacaaatggaagcaaggcttcctacccccgtgctctttccgtacttgcttcctgtgctgacgtcatttacagatctggaggcagaacattttagcttcctaagcttcagaaacatttataaggatggtagcagcagctaaggcagcagttctcaaaatgcagttctcaaaaaccctggggtttctgaagatctttcagagtccagaaggtcaaaattatcttcataataatactatttgcctctttcacactcattgtctcatgagtgaatggtagagttttcagagagtgcatgatatgtggtgatgtcactgctatgatgcctaatggcatgcatgccttaaaagtttctcagttttgattcctaataggatacatagaacccacataaacaaaggttctggggggtctttttaagagtataaagtctccataaaggatggagactcaatgatgtgaggaatggtggaagtgtgaatttaattttcttttttggggttgcagtgccagtacacagcagaagagtaccaggccatccagaaggccctgaggcagaggctgggcccagaatacataagtagccgcatggctggcggaggccagaaggtaggagaattcatgtgcctggaaagcaggcatccataccgcagactccgatggtcttgccagttccctctctgggtcctcagggattcggaagtctgctgttaactgttcctggaggtctcccagtgcccctgggaggggatgggttccagacttcattctcatccgaaggggcctgggcatggtcttgacactcgcataaccgccgtcttaagatttttacatcatctttttttttttttatttttaaagacagggtcttgctctgtcacctaggctggagtccgaccagtggtgtcatctcagctcactgcagcctccacctcccaggctcaagcgatcctcctgcctcagcttcctgactagctgggactacaggcacacgccaccacacctggttaattttttaatgttctgtagagacgacatctcgccatgttgcccaggctgatctcgaactgctgggctcaagtgatcctcccacctcggcctcccaaagtgctgggattacaggtgtgggccaccatgcccagcctttacaccattaaaaaaaaaatgttccttttgccatttgctttttttttttaattaaacactttttaaagaacttatgattgacacataataattgcatatcatttgcttctaattttaacttctgtgtatatttttggtcttccataaaatatgtcaaacagatttgtactttttgcaaactgaattttagcaactgctgggtgagttcctcctcccaacagaccattcgttctcgcgggctccatctagaagatttttgaaataaattcattgagaattttcttgaaaaaaaaattttttttaacagactggttctcactctgtcacttaggctggagtgcagtggcacgatcctagcttactgcagccttgagctcctgggctcaagtgatcctcccacctcagcctcccgagaagaatgtttaaggacagtttatcgaaaaaagtagatgaggaataaattatgtcaattttgattcacatttaagtgtggtaaggaattaacacagcttttccttaaaaacatttgtttttctaggtgtgctacattgagggtcatcgggtaattaatctggccaatgagatgtttggttacaatggctgggcacactccatcacgcagcagaatgtgggtgagtatgctctccagcagtggggacttctgcactgtccagctcctgctgaaagtctgctgtgggtgaggaggtaaggtaggtggactcagctgccagcaggaggaatggttgtggcccagcggtcagtgtcctcttcaacttgctctctttcccactcctagattttgttgacctcaacaatggcaagttctacgtgggagtctgtgcatttgtgagggtccagctgaaggtgaggggatggagtagacctgctgcccggaaggatcagtgggtggtaggagaaggtgagcaggtagggaagtaggtagctggacggggacccaggctccagagttgtgtctcagccagcgttccctagagtggtggaattcaaatactcttgctcatgtgctccctaaaagaatggaaaaactgttctcttgcacatgttcaagctgacacctaaaagttttcaccatatataaaaattgttgcaaaggatgtattttttggcatatggtaaaatctgacattttaaaatacaataattttaccatcactgataagtgtttggaaactcaactttaggcaaagcaggtccttttgttataacattgatgaaaacaaaaatatgttttgttaataagttgtttcacttcaagtcacagttatttaaggtgttaagtgagcacttaccgtaaatctgttgaatcttgttaaatattccagtggactctaaatactatagaggataagatctatcatttatttgaagaaatacaatgaacaagcttttttttaatcattagaaattttacattgttctttctttatctgaactcatatttctattctatttccccactggttttaatcctaatacatatttatggttgaaagtttggctaggcggggtggctcattcgtgtaaccccagcactttgggaggcccaggtggaaggactgcttgagcccagggatttgagaccagcctgggcaacatagcgaaagcccgtctctactaaaaatacaaaaaattagctgggcatggtggtgtatgcttgtagtcctagctactcaagaggctgaggtgggaggatcacctgagcccaggaagtcgaggctgtggtgagctgtgattgcgccactgaactcctgggtggaaaaaaagaaaagttttatcggtagccttactgtgcttctctgcctttgcctgtgtataaaaataaaaatttttggtaaattttcagtgcacttaaggctctaaatattaaaatatttcttttggatttagttatattatagctactgttaacacacaattgaccagacaattgtgtttatggtgaagagaaaacataaatacagcaaaattttgatacttagaaaaattaaagatatgaaatcttgccacaaaaataaaaaatttaaaatataaaatttatggaaaatgtatatcttaatgagatggatggtgctgttttttcttttcagttagtttatatatccatatatccataactgaatattacttacttcttttttttttttgagatggagttttgctcttgttgcccaggctggagggcaatggttcaatctcagctcaccgcaacctccacctcctgggttcaagcgattctcctgcctcagcctcccaagtagctgggattacaggcatgcgccaccccgcccgcctaattttttgtgtgtgttttcagtagagacgcggtttctccatgttggtcaggctggtctggaactcacaacctcaggtgatccacccgccttggcctccaaaagtgctgggattacaggcgtgagccaccgcacccggcctacttatttcttgaatgaacaattcagcattaattctattctgacttatttttctaaatagtactaaaaaatcttgtatctatgagtgagtagctgagaatggaaagaattgtgttatagtgtcactcatttatttgagtgctttctgagttattttttaaaaatcacagagcgctgtcatcaaacattgtatttaattctcaatcagcgaatgatgtgctcaggtccaccttctcttttggtgagaggcaggagctggacgccacctgatttacaaagggtttgctctcccgtccttacagaccattagatccagtgttcaaatcatccctttgtttcatatcccagaggtttttttttttccaagacgtagtctcactctatcacccaggctggagtgcagtggtgcaatctcggctcactgcaacctctgcctcccaggttcaagtgattctcctgcctcagtctcctgagtagctgggattacaggtgcccaccaccacacccggctaatttttgtatttttagtagagatagggtttcaccatgttgaccaggctggtcttgaactcctgacctcaagtgatccacctcccttgacctcccaaagggctgggattacagcgtgagccaccacgcccggcccggccatcccagaggttttttttaccttagggtgatgcacactgataggatttggggtgagtttctaatgtgccctttgtgtgttgggaagttgggaagggaggatcgtcttgacaccttgaccgcaggcacatgtccaggcagcccaggtctaggaagcagcactcgcgatggattctcacccagccttctgcccgtgcccctgtagcaaggccgccaggtgggagagtccggctttgaaccctgctgcttgaggaacaggggagttgtggcacgcctgccgctctcgtgtttgagttcaaactccttttctgcccccaggatggttcatatcatgaagatgttggttatggtgttagtgagggcctcaagtccaaggctttatctttggagaaggcaaggaaggaggcggtgacagacgggctgaagcgagccctcaggtgagcgcggggctgggagtctaacctgcgtcatttcagctcttgcttcagagcagatttcgattttttttggaagaggtaacacatccacatggttcaaaaatccaagcagcgtggaaggtaattctcacccctgccctggttcctgtctgccgttttcccactttcgttagtattttttcaatgtttctgtttcaggcttcccttgctgggagtaagtggtagaatcctgtactctctcttctccgtgcactcagtcatgtgtgccggaggccttcccactcctactgcgagtgcacagacagcaccctcctctccgtgctcctcagcagtcctccgctacgcacaggtagcatagttaacgtagttacacagtcacgcagatgtccgtgttagtccatttatgttgctatacaggaataccagaggctgggtaatttataaataaaggaggtttgattggcttatgattctgtggactgtactggaagcctggtgccagcatccacttctgctgaggcctcaggaagcttctaatcatggcagaaggtgaagagggaacgtggagagagagggagcaagagagagaaggaaggagtcccaggcttatttatttattttattgttgtttttcattttttgagacagggtcttgctctgttgcacaggctggggtgcagtggtgccgtcatcgctcagtgcagccttgaactcctgggctgaagtgatcttcccgcctcagcctcccgagtagctgggatcacaggcacataacaccacccccagttaattaaaaaaaaatttttttttttttggagagacagggtctccctttgttgcctaggctggtctcaaactcctgggctcaagtcatcctcctgccttgtgcctcccaaagtgccgggatcacaggcatgagccatcatgcccagcccccacactcaaaaccaccagatctctcatgagctgagtgagaactcactcaacaccaaggggatggcactaagctgtttatgaggaatccagccccaggatccagtacctcccaccaggccgcaccccccggcattggaggtcacgtttcaacatgaaatttggaggggataaacatccaaaccatatccgtgtctttgagaattgaagtgaattgaaccagaaaaacctatgagttctgtgggggagtccgtagatcccaagttaagaactctggtcatgggaggttgtgcccttgagcccccggtccccaagtgtgtgttgcctactcctgctgggaaattggagcagcctttggggggaaaaaaaagaaaaactctctgcagtttgttctccatgtcaggaggtggctggtgggttttgtgaatggcgccgtaatcttttcatactcatcttctctgtgagggcagggacttgtgtcttgtcctcactgcagtattctcagaaactaacacagtgcaggaacatgctagatgcttaccagacatcaatggggaatgcatgttagggtccacttcctctgctgctcctgagaagcaacctgtacaaaagttgtaattctattctctgatattcatgtgtaacaattcttaaccctgtttcacctttttttctcttgcccttaggagttttgggaatgcacttggaaactgtattctggacaaagactacctgagatcactaaataagcttccacgccaggtatatcagacatggatgagtggagtgaagataatgcggcaaactcttgtgtgtcatgggttgagtatttggaggatgcaaggagaaaaagtgaggactcagctctttagagggtcgggaatgttgatttcagatttcgaatgttagagacagcaggaactaatcccaacattttccttttttctaaagtacatcatgtgggccggggaccgtggctcacgcctggaatcccagcactttgggaggtggaggcaggtggatcacaaggtcaggagatcgagaccatcctggctaacacggtgaaaccctgtctctactaaaaatacaaaaaattagccgggcgaggtggtgggcgcctgtagtcccagctactcgggaggctgaggcaggagaatggcgtgaacccgggaggcagagcttgcagtgagccgagatggcaccactgcactccaacctgggcgacagagccagactccgtctccaaaaaaaaaaaaaaaaaaaatcacaccatttgacaagaatgtgaggtctagagaatttgtgtacgtgtaggtagtgaactgtggttgggggtagtctgtgaagcctcaaagcaagcacacagccctctgcagcaccactgtccttcccagacactcccagcctcgctgttgagccttctttcttttccttagttctggtgtcattacatgtctgatgtcattacaatgtcatttacatgtccattatttctgtcaatacctataacgtgatctgagcctttgcctttggagaatggggtctgtggtggggcagccctggagtcacactgccttgccatgagtggcttctggagtgttcctcctgcctcatctgctctccgaggtccctgccatgtcgctccccagggcagcattcccatcctgtgcctgagggattcttgtcctcatggagccccacaaggtgtgtgtcactgggcatctgtaaaaactcctttaaaaaaatcatttttaaacattattggattcagtttgctaatattttgttagacttttttttttgagacggagtctcgctctgtcgcccaggctgaagtgcagtggtgtgatcttggctcactgcaacctctgcctcctgggttccagcgatgctcctgcctcagcctcctgagtagctgggattacaggtgtgtaccaccacgcctggctaatttttgtatttttttagtagagacggggtttcaccatcttggtcaggctggtctcgaattcctgacctcatgattcgcctgcctcggcctcccaaagtgctgagattacaggcgtgagcccccgcgcccggcctttgttaggcatttttgcatctatgtttatgagagatattagtcaagttttctttttctttttttttttttgagatagtctcactctgtcgcccaggctggagtgcagtagtgtgatctcagctcactgcaacctctgcctcccgggttcatgccattctcctgcctcagcctcccaagtcgctgggactacaggtgccagccaccaccatgcccagctaatttttttatttttagtagatggggtttcgtcctgttggccaggctggtcttgaactcctgacctcaagtaatccgcctgcctcggcctccgaaagttttgggatgacaggcgtgagccaccgcacccggccttttctttttttaaattgtagtaaaacacatcacattttaactatttttagtgtgtggtcgagtagtgttaagtgtattcccattgttgtgaaattgatctgcagaactaagaccctgcacccgtaaaacaagaactccgcatttccccctttcccagacccttgtaactacttccactttctttcctttttttttttttttaatttattttatgaaagatgaggtcttgctctgtcagccaggctggaatgcaggagtgccatcataattcactgcatccttgcactcctgggcccaagggatcctcctggatcctcctgcctcagcctctcaggtggctgggactacaggtatgtgccagtgcacctagctaatttattttttaaacaattattactattttttttgtagagacagaatttctcagggctggtcatgaactgctgggctcatgtgatcctcctgcctcggcctcccaaagcgctgggattgcagcgtgggccactgtacctggagccagctaattaactttttttgggggcttttttttttaagaggtgagttcttgctatgttgctgaggctggtcttgatctttttttcttttttaaaaaattaggttaggcgctgtggctcctgcctataatcctagcactttgggaggccgaggtggttagatcacttgagcctaggagtttgagaccaccctggccaacatggtgaaaccctgtctctactaaaaaatacaaaaatcagctgggcatggtggtcagcctgcctgtaatcccggtggtcagcctgcctgtaatcccagctcttctggaggctgaggcatgagaatcgcttgaacctgggaggtggaggctgcagtgagccaagattgcactactgcactccagcctgggagacagagtgagattctgtctcaaaataataataataaaatataaaaataaaatacttttttgtgtgtggtcatggagttttgctattgcccaggctagtctcaaactcctggctacaagcgatcctcccactcagcctccttaagtgctgagattataggtatatgtgtctactttctgtttctgtgaatttgtctactctggatacctcatataaatggaatcacataatttttgctttttgtgactggcttatttcacttagctagcattaatgcctttaagattcatccatgtagtagtgtgtatcagaattcccttctttttgtggctgaatattctgttgtatatatagaccacattttgtttatgcattcatttggtgatggggatttgggttgctttcaacctcttggctattgtgaataatgctgctatgaacgagggtgtgtaactctctttgagatcttgctttcaattcttttagacatattctgaaggggattgctgggtcatggtaatcctatttttaatttttcgaggagctgccacactgattttcatacagttgccccattttaccattccaccaacagggcacatgagttcagatttttctaaatcctaaccagcacttgttattttctgagtttttggttttttttttttttttttttttaagccaacctaatgggcgtgatattttattggggttatgatttgcatacccctgatgattagtgatgttgaccatattttcttttttgagacagaatctcactctgttacccaggctggagtgcagtggcacaatcttggttcactgcaacctctgcctctgggttcaaacaattctcctgtctcagcctcccaagtagctgggactataggcgcctgccaccatgccgggctaatttttgtatttttagtagagatggggtttcaccatgttggtcaggctggtctcgaactcctgacctcaggtgatccgcccgccttggcctcccaaagtgatgggattacaggtgtgagcccccgcacccagccaaccatattttcatatgcttgttggccatctgtttatcgtctttggagagatgtctattcaagtcctttgtcattttattttgttttattattttaatttaatttcttttattcatctcatctcatctcatctcatgacaagatctcgccctgtcacccaggctggaatgcagtggtctgatcatggcttggctccctggagcctcgacatcctgggcttgagtgatcctcccacgcaggctggagggcagtcgtgtgatctcggctcactgcagcctctatatcccagactcaaatgatcctcctgccttagcctcccaagtagctgggactacaggcatttgccaccatgccaggctaatttttttattttttgtacagaatacaaaaaattttaccgtgttgcccaggctggtctcaaactcctggcctcaagtgatccacctgccttggcctcccaaaatgctgggataacaggcgtgagaaacccatatggcccaactcctacttttattgagctttttcgtattgtttttgtattctctctttcacttatgtttgctgtcatctttttagaatttcctttcttctagctttgggtgtaactttttttttctagttctttgaggtatagcgtagatttgagatcttttttttttaactatgtgtgtaacttccctcttacgacttctttccctgcaccccagaagtttggtaggttgtgttgtagtatcatttgtctctgggaattcttctaagttggcttgttacatttcctttgactttaagagtgtggtgtttaatttctactgatttgtggattttccagttttctttttgctgttgatttctagtttcattccattgtgattgaaaagatactttatatgatttcaatcttgaatttgttaggacttgttttgtggcctaacatgtagtctgtcttggagaatgttccatgtgtacttgagaagaatgtattttctgctattggtgggtggaatgttatgtatatgactgttaggtccagttggcctatagtattgttcaaatactctatcgccttattcatcttttgtttggttgttttatctattattgaaagttgagtagtgaagtctcctactattattgtgttgcttttatttcaccttacaatcctctcaaagtttgcttcatatatttaggacctctggtgtttggtgcataaatatttataattgttatatcttcttggtgaattgacattcttttttttttttttgagacggagtctcactctgtcgcccaggctggagtgcagtggcggtgcgatctcagctcactgcaggctctgcctcctgggttcacaccattctcctgcctcagcctcctgagtagctgggactacaggcgcccgccacctacgcccggctaattttttgtatttttagtagagacggggtttcaccatgttagccaggatggtctcgatatcctgacctcgtgatctgcccacctcggcctcccaaaatgctgggattataggtgtgagccactgcacctggctgacattcttatcattatataatactctcgtctcctataacaattttttttttttttttgagacggagtcttgctctgccgcccaggctagagtgcagtggtgcgatcttggctcactgcatcctttgcctcctgggttcaagcagttctcctgcctcagcctcctgagtagctggaactacaggtgcgtgctaccatgcccggctaattttttttttttttgagacagagtttttgctcttgttgcccaggctggggtgcaattgtgtgatctcggctcactgccatctctgcctcccaggttcaggcaattcttctacctcagcctcccaactagctaggactacaggtgtgtgccaccacacccagctaattttttgtattttgtagagagggggtttcaccatgttggtcaggctgatcttggactcttaacctcagatgatccgcccacctcggcctcccaaggtgttgggattacaggcgtgagccaccacgctgagcccagatttttttttttttttttagacagagtcttgctctgtcgcccaggctggagtgcagtggcgctatcttggctcactgcaacctccgcctcccgggttcaagcgattctcgtgcctcagcctcctgagtagctgggactacaggcgcccaccaccacacccaactaatgtttcgtattttttagtagagcggggttttgctgtgttggccaggctggtctcaaactcctgggctcaagtgatcaatccacctgccttggcctcccaaagttctgggattacaggtgtgagccactgagcctggccccaaatttctctttttttgttgttgagacggaatttcactcttgtcaccgaggctggagtgcaatgttgtgatcactgcaacctctgcctcgtgggttcaagcgattctccagcctcagcctcccaagtaactgggattacaggcgcccgccaccatgcccggctaatttttatacttttagtagaaatggggtttcgccatgttggccagggtgatctcaaactcctgacctcaagtgatccacctgcctcagcctcccaaagtgttgggattacaggcatgagccaccatttcctaagtgagcacagctgttcacctcccagatagagaatcagacctttaccagcagcccagaagccccattttgccctcttccagtcactgccttgctttccttttttcaaaagtaactactatcctgtcttctattctgacttccatggattattttttcctgtttttgaactttatatatgtaaagttcacaaatggaattgtactgtaagtggaattgtacagttcatattttaagaaaattgaccgaagtatgaaaaagaacatatagacaggttagacgagtgcacgtatcatccatgctcagcttgatgaattttccaaccaaacacatccacacagccaacatctgaatcaagacactgccagtaccgagaaggcccagctgtgttccttgcagtcactgccatcccctgccctccttcccactctgagcaaaccgcttttaacaacacagattggccgggtgtggtggctcactcctgtaatcccaccacttgagaggccaaggaagaaggattgcttgagcccaagagttggagaccagccaggacaacatagtgggaccctgtctgtacgaaataaaaataaaaataaaaataaaaattagctgggcctggtggtggcgcctgtagtcccagctgcttgggaggctgggctgggagaatcatttgagcctaggaggcccaggctgcagtgagctgtgattacgccactgcactccagcctgggccacagagcgagaccctctctcaaaaaacaaaacaaaaaacaaagaaagccaccaatttgtttttattgttatgtacttttttggaatcctacagtttgaactctttgtatcttacttgaattcagcatggttgtgagattcattcatggtacgagcagcagtttcattgctgtataattttcttttgcatgagtatgtggcaatttatttttctagtcttttcttagtagacattttggtttttgtagcttgtggctgtttcgattagagatgctgttagcattcttttgctgtacagttgcactcatttttgttgggaattattgggggagaagataggtacgtgtttagttttagtaggttcttcccgttttcctgtatggttgtattaattcacaccccacgtggcattgcgtaagttccaattgttctgtatctttgacagcacttggtatcgccagtctttcatatttttcaaagctcgtttcttttttttgagacacagtcttgctctgtcgcccaggctggagtgcggtggtgcgatctccgcccactgcaacctctgtctcccaggtttaagtgattctccctgcctcagcctcccgagtagctgggattgttggtgtgtgccaccatgcccagctaatttttttttttttttttttgtatttttagtagagacaggctgttactcaggagttccttcgattttttttttttgtatttttgtatttttgccattttggccaggctggtcttgaacccctggactcaagtgatctgcttcggcttgccaaagtgctgggattacaggcatgagtcaacgtgcctggccaaagctcatttctttttaaactactcatttatctttcaatgtagacatgaaatctgcactataattttcattttcaggtcaaaatgtaatcatcttaatccctcatattcaaacaattattccatcagcatcagttttatgaattgagagatgttttcccaagtaaaaatgttctggatttctgtaggaatccgtgtggaaatgaaaccatttgccctgtgccacgcagcacaggactgtcccttctcatgttgatgagatgcagagcagccccgttctggaagattccttgcagccttggctggcagccggcgtccgtgcctcccaagggttcttccctctgtcgtttgaagggttcttcgtgatgccacagcgtgcccgaggctccctcagtgacgagcgcgatttgcaggggtggccctggcagaaagggttgggaaggtacagacctccacagagactgtgtgtgctcatttccgtggaaaaaggacaaggaggcagcaaagacagacccagcagcccaggaaagattcaaatgcgattttacagaacatctgccctaagtcaaaaccaaagaaggattcctttttatcaaaacttcactaacacagaacatgaaattgtttggctcctcctgctcatggagttacaggacctagaaggcgtgatggatggaggatgtcaaatgcgattttccaggaatcgcaatctgtgagtcagggagaagcagcggagggcaagagccagttgaaggaatttgtttttcttctttccttctagttgcctcttgaagtggatttaactaaagcgaagagacaagatcttgaaccgtctgtggaggaggcaagatacaacagctgccgaccgaacatggccctgggacacccacagctgcagcaggtgacctccccttccagacccagccatgctgtgataccggcggaccaggactgcagctcccggtatgcggcctaagtcccctcctttcctctgcggcccctcctgtgtcacggggctgcctccactcaggcctccagagccagccagccgtgcgtgtcctcccagcagccgcggctgttgctcaggagcccgtcctcgccgccgccctctcatgcagaagcctgagctcatccgccgtggagagcgaggccacgcaccagcggaagctccggcagaagcagctgcagcagcagttccgggagcggatggagaagcagcaggttcgagtctccacgccgtcagctgagaagagtgagggtgagcgaggggtgggagcagggccctgggaggcgtctgcaggaggaagtgtagccgcagggtcttctgattctctgcggtaaccctgggccggctccaaaccaggcctcgctgggacttctctcaagctacacgcaggagagatgagcccaggaaattcagatatttaaatctgctgtacattttcccgtttctaaagacaatgatttcttttttcccccgtggaactaagtgggccttgataaaatcttctagaattagaaatttcagggtaaagaacttttttttgcttcgaatgctttggccatctctacattagaaagccttggccgggcacggtggctcatgtccgtaatcccagcactttgggaggccaaggtgggcggatcacgtgaggtcaggagtttgagaccagcctggccatcatggcgaaaccccgtctctattaaaaatacataaaaattagccaggtgtggtggtgcatgcctgtggtcccccctactcgggaggctgaggcagaattgcttgaatccagaaggcagaggttgcagtgaaccaagatcgtgccactgcactccagcctgggcaacagagtgagaccctgtctcaaaacaaaaacaaaacaaaaaaaaaacaagccttgtgtttctgagatatcttcgaatacaaggcaaaattgggattgagaataacgggaacttttggcagattatttatcaactttagtttatttcagagtccagattgagtgggaatagtgatacagatgccttctttctttcttctctgtctccccacctgttctctcctgcccatccagcggtaggtagtccttactcagagagtggaaacagagaaagggcttgtctcagacccatcgagcttttgcccagtttttccctacaaattgtgaagcagattcacagaggacttgcttcatggttggttcattcatatgcccctcagcaccgacaggctgaaattaacataaaaaccaaaacagaaccacttcctgtcctgtggatatccttactgttgagttattgcaggtgtttagcttcttaaccattgcagaagctcccgggtagattgtggaggaagctgccctccaggcctttcctgccccttggcagacaacccgagccattgttattttaatccatttcacacatcagattttggctgaagattttgtttgttggtttgttttcagacagggtcttgctctgtcacccagcctggagtgcagtggcgggatcagggttcactgcagctttgaccttcctgagctcaagtgatcctccttcctcagcctcctgagtggctgggactacaagtgcatgctaccacacccgctgatattttattttttgtagaggtggcgtctcgaattcctggtttcaagcgatcctcccaccttggcctcccaaagtgctggggttacaggtgtgagccactgtgcctggtcagattttagtttaagattttgtttgagcaagggttatggctgttaacaagcgagccagacactggattagatggcctgtgagaaaccttttacttttgctgtgaaaggagaaagaaacttgtttttcccactggtgagaagaattcaaaccacagacagatctgtaggtaggactgggactcgggaagctgaagttctttttactggcagaagcagcgcagccctaagcggtgttgtgcttcggagagtgttccctctaacaagaggggagtggacccacgctctgaaatcccatgcagtgatgtgatgatgacttgtcctttctctcctctgtgaaccgtagcagcgcctccggcccctcctgtgacgcacagcactcctgtaactgtctcagaaccactcctggagaaagacttccttgcaggagtgactcaagaattaatcagtaaataccttgaaatgcttgtaagctactgtgctgtatgtttctagtagccacagaataccttttaggcgacataaaaatcctcattttcgtgtggttttgttgagggggttctggctgatagcatatgtccagttcctctttggtcctaaccaaagggaagtgtacttttagggggaggggagagaaattccaaaaactttcagaaggtactgaagacatggaatttctgagggccagtttttccagtgctttctgtgagaatacttcattatttgctgatgacgcacttttccttgacctctgtagagactcttgaagacaactctgaaaagtgggctgtgactcccgatgcaggggatggtgtggtcaagccctcgtctagagcagacccagcccagacctctgacacattagccttgaacaaccagatggtgacccagaacaggactccacacagcgtttgccaccagaaaccacaagcaaaatctggatcttgggacctccaaacttatagcgctgaccaacgcacaacag

SEQ ID NO: 15759 - DNA, 35772 bp, Homo sapiens; identical to SEQ ID NO: 15758

SEQ ID NO: 15760 - DNA, 37153 bp, Homo sapiens
gatcgagctccctgtgtgcaccgcgcgctgcccgaggcgcgtaagtgggggaggagagcggcttcccccggggtggttctagccgtgggtgtggagcgtgggaaggctcagcttccgggtcgagaacctggggctgcggtggacctgatcctgaggtctcagcgtagagatgctgagtccagaggcctgttctagttcaccagtgcagtgaggggctcagtatccgggcctcccgagaggtgggtaggaaggcggggtacaggaaacttggcaccaacgcgccgggaccccaccgcggtgcggacagccaggtgtccgtggtggcgcttccttggagatgctgcctgcagacaggcgtggggaatctgaagtttgtgttaatagctaaacgaagttgagttgcagggagcgggggacgctgggaagaaatgattgatttaaaaggaatttgacgccgggcatggtggcggcatgcccccatgttccctggaggtcaagcctgcagtgagccgagatcgcacccgtaccacgacactccgtcccgggcgacagagcgagaccctgtcacgggggaaaaaataaaaataaaaatttgacgctcactttagctgagtattgagccttgttataacattgagatagaggtctggcgcggcgtctcacacctgtaatcccagaactttggaaggccgatgcgggaggatcgcttgaggccaggagttctacgccagcctggctaacatagcgaaaccccgtctctactaaaaatacaaaactaggcaggcctggtggcgggcgcctgtaatccccgctactcgggaggcggaggcatgagaatcgcttgaacccagtaggcaggtgtgccggtaagccgacatcgcaccactgcactccagcctgggggacagagcgagaatccatccaaaaaaaaaaaagttataattcacgtacaattaaattcactcccttttttaaaaaaaagtggagacatagtctcgctctgttgcccaggctggagtacagtggcgccgtctcggctcactgcaacgtccgcctcctgggttcaagcgattctttgcttcagcctctcaagtagctggaattacaggcgcataccaccacacccagctactttgtatttttcaccatgttggttaggctggtctcgaactcctcgcccttccaaagttcagggattacaggtgtgagccaccacacccagtctaaattcacccttttaaagtgtgcaattcagtggttttaatatattcacaaggttgtgcaatcaccactattatctaattccagaacatttttatcatccctaaaagaaaccttaaaaccattagcagacacccattatttcctcctactcccagcagcactaatctatgaatttacccattctcagtactgtattatacaatatttgttcttttgtgtttggtttatttcacttcatgattcaaagtccatctatgttgtatgtagcatgtatcaacttcattttttaaataactgaattatttattgtgtggatataccacattttgtttctccatttttgatggatactggtgattttctaggctttctaggtctagtcctccacagaactcgcagtctgaggcacagacatttaaaacttaagtttttggaaactagcatttaactcttgggttgggtcaggtaattcagtggcctcaggtctggtatcgtttagggcagttttttttttgttttttttttttttttgagatgaagtttcactcttgttgcccagggtggagtgcaatggcgtatctgggctcactgcaacctcacctcctgggttcaagcgcttctcctatctcagcctcctcggtaactgggcttacaggcgcatgccactatgcccggctaatttttggtatttttagtagagacagggtttcaccatgttggccatgctggtctcgaactcctgacctcaggtgatccacccatctcggcctcccaaagtgctgggattacaggtgtgagccaccgcgcctgggtgggagttttgtttttttgtttgtctgttgttttttggggggacagagtttctctcagcctcctcggtaactgggcttacaggcgcatgccactatgccaggctaatttttggtatttttagtagagacagggtttcaccgtgttggcaatgctggtctcaaactcctgacctcaggtgatccacccgcctcggcctcccaaagtgctgggattacaggtgtgagccaccacacctgggcgggagttttgtttttttgtttgtctgttgtttttttggggggacagagtttcgctcttgttgcccaggctggactgcagtggcgagatcttgactcactgccacttctgcctcctggattcaagcgattctcctgcctcagcctcccgagtagctgggattacaggtgtgcaccaccacacccggctaattttgtatttttagtagagaaggggtttctccatgttggttacgctggtctcgaactccctacctcaggtgatcctcccgccttggcctcccaaagtgttgggattacaggcgtgagccactgcgcccctctgggagtgttttttaaagtgttctattctcagttcaccacttaccaggccgttaattatcgtggtatcaagcagagaaatgtttgtgtgctggtcttctcagggaggcagaaaccgtcagagattgctgttgtgtaatgtacaccaaaacgtgttatcttgtagtataaacggtgtagttggagatgagtgtatgaaaaatgtaactgagctagctgtgggagagactagttgtgaaaaattttgagtcacccactgtatgctttcccagctatgttcaaataaggtgacactctgccttcctgtttcagctctaaaactgttcataagtgttattttggctgtatacgtagtgccatgtttttttgtatttttgtgcttttggtgattttgctgtttataggggcctccaagaatagaagtgctgtctagcatttccaagttgaaggctgtgatatatcttatagagaaaagataagcttttagattagctttgttcaggcatcacttttgttgttggctgtgagttcatgttactgcatcaacaatatatattaaataagatatctttaaacagaagcacacataaaacaaggttatgtattggcctgttgagtaaccctgtatttcccctgggagcagtggctcagtatttgctagttcagtgttcatgatggctttacaggacataactaccctgaataatgagaactgactgtctcagtagtgcttcaagggcagaaagcctagtggatatttttccatctctgcagcttttagcatttcttcactcaaggcactcatttttaatattgaactggcagttttgatgtggagagaagctaaaataaggctaaaatgctcttcatactatgtgctgagtggggactgtgctgagtgttggggattcagtgattagtgtatggccccgcagttctctaatggctgagtgtgggagtgcagagaaatgatcagtgtgagggaattaatcctatgttcccaccgtgtttttttgttttttttgagacggagtttcactcttgtcgcccaggctggagtgcggtggcgtgatctcggctcactgcaacctccgtctcccaggttcaagcgattctcctgcctcaacctcccgagtagctgggattacaggtacccgccaccgtgcccagctaatttttgtatttttagtagagacggagtttcaccatgttggccgggctggtctcgaactcctgacctcatgatctgcctgcctcggcctcccaaagtgctgggattactgggttcccacaaattttaagacttacttcaggccaggtgtggtggcttatgcctgtaatcccagcattttgggaggccgaggtgggcagatcacctgaggtcaggagttcgagaccagcctggccaacatggtgaaacccctgcctctactaaaagtacagaaaattagctgggtgtggtcgcgcatgcctgtagttccagctactcaggaggctgaggcaccagaatcacttgaacctgggaggtggaggttgcagtgagctgagattgcgccactgtactccagcctgggcaacagagtgtctccccctcaaaaaaaaaaagacatacttcagagtgtggtgagctgcataaggctttagaggtaatgacattttgagatttcaattaaaaattttttttctactttttttttttgagacagagtctcactcttgctcaggctagagtgcagtggtgcgatcttggctcactgcaaccttcgcctcctggattcaagcgattcttgtgccttagcctcctgaggagctgagattacaggcacctgccaccatgcccagctaatttttgtatctttagtagagaagaggtttcatcatgttagccgggctggtcttgaactcctgacctcaggtgatctgtctgcattggccttccaaagtgctgagattacagatgtgagccaccgtgcctggccactttttttctacttttgctaatttttttaaagtttcatgaacattatagtactgtgttcataaatgaaaataaaagaaacttgctccagtcttgttcatcaagccgttcttgaccttcacagtcagaatctcacccatcaccttgtcacatctccctcttgatctgtatatccagagtccacctgacatgcttcttcagccctccacatataataagaaatggttttgtgagccgagattgtgccattgcactgcagcttgggcaacagtgtgagactcctcaaaaaaaaaaaaaaagaaagaaaaatgcttttaggtgataaggaaatggagaagaataaaacatctttgccagtctttacctttttaatatcttgaattcatgatttcttgccatagccactatcctagtccaggctctctcccttctacccctgagttttttttttttttttttttaccatgtttttatttcctctgggaaaacacctatcagaattttgggatcatatgacagatacatatttaatttctttctttcttttttgagacagggtcttcctctgttgcccaggctggagtgtagtggtatgatcatggctcactgcagccttgaccccttcctcgcccccgctcaagtgatcctcccaccacagcttcctgagtagctgggactgccggcatgctccaccatgcccgactaacgttttgctgcttgtagagacagccatgttccctaggcttgtcttgaactcctgagcctcaagcgatccttccacttcagcctcaagtgctgggattacaggcgtgagccaccactcctggctacttaatttctttctttctttttttttgagacagtctcgttctgtcacccaggctggagtgcagtggggtgatctcttctcactgcagcctctaccttccaggctgaagcaagccttccacctcagccccctgagtagctaggactacgggaacattccaccaggcccagctaatttttgtattttttgtagagatggagtttcatgatgttggccaggctggtcttgaactcctcacctcatgcaatccgcctgcctcagcctcccaaagtgctgggattacaggtgtgagcaactgcacccagcgggccccgcccagacctattttcaaaattagaaaaccgtgaggcttctggaagaagatgagaagaatatcttcatgacctgagtgtgtgcaaaggtttcttagggctcaggatgccagagtcacttaaaaaagcaaaaaaaacccaaaaaaaaaaccacacacacaaagataaatatgattgattacatcaaaatgtaatcacagactactctaagaaaatgaatggggaaacacagggacctatttgacaaaagactgatattcaagataaataaagaactaataggccaggcgcggtggctcacgtctgtaatcctggcactttgggaggccgaggcggggggatcacttgagctcaggagttcgagaccagcctgagcaatatagtgaaaccccatctctactaaaaatacaagaattagaattagctgggcgtgatggcacgtgcctgtagtcccagttactcgggaggctgaggctggagaattgcttcagtcaggaagatggaggttgcagtgagccgagattgtgccactgcactccagcctgggcgactgaacaagacttcgtctcaaaaaaccagtagggctccaggcctgggattgggcctctgctgctctactccctggacgtgtggctccgtccttggagtcggcctttggttttcatgaagagtagtgtgcattaacagctgagtggttttatcagcctgtttcctgccaacagtgtatgagagttccagttgctttacatccttgccagcatttggtgttgtcagtcttttgagttattctgatgggtgtggtgtgtcatggtcttaattttagtcctcagtcactaatggtgtttagcactttttcctgtgcccatgacaatgtgcatcttcctttgtgaagtgcctgctcaaatcttttgcccattttacattgggttgtgtgtctttttattattgagttgtagcagttatttatataacctttatatcctggttacctgtcctctgtctggttgcctattcattttcttagagttgtctgatgaacagaagttttacattttgatgtaatcagttttctcttatattttcttttatagttactgctttctgagtcctaggaaatcttggctaccttcaggctgtgaagataatctttcatgttttcttctgtaagttttttttttttttgagacagagtcttgctctgtcgtccaggctggagtgcggtgatggcgatctccgctcactgcaacctctgcctcccaggttcaagcgattctcctgccccagcctcccgagtagctgggattacagacatgcgccaccatgcccaactaatttttgtatttttattagagacagggtttcaccaggttggccaggttggtcttgaactcttgaccttgtgatccacccgcctcggtctcccaacatgctgggattataggcgtgagccaccgtgcccggcctataaattttatagttttagttttatgtttaagcctatcacccatttctagtttaggtgaatggtgtgagatataattaaatattaatttcttttccatatagatatccagtcattccagcaccatttgttgaaaatgctattgtattgcgttttggaaattaagatgactgtacaaatggtaattgatgtctgcactcccttttctgttccattgttcaatccttgtgttagtaccacacttttaattactgtagctttttagtaagtcttgaagtcatgtagttgtaggtcttccaattttgttgttttcaagcttgatgtgaatattctaaatcctctgcatttccatataaatatcagaattatctttaccagttttacagaaaagtctggtaaagttgtgattgggattgcattgaatctatggatcaatttggaaagaaatgacacctaaacagtattgagtcttcaaatatatgaacttggtgcattttccttcttatttaagccttttaaaatttctttttaggccgggtgcagtggcttatgcctgtaatcccagcactttgggagtctgcagcgggcagatcagctgaggtcaggagttcgagaccagcctggccaacatggtgaaaccccgtctctactaaaaatacaaaaattagccaggtgtggtggcaggtgcctgtagtctcagctacttgggaggctgaggcaggagaactgcttgaacttgctcaggaggtggaggttgcagtgagctgagatagtgccattgcactccagcctgggcaacaagagcaaaactctgtctcaaaaaataataataataaaaataaaaattttgggccaggtgtggcggctcacacctgtaatcccagcaatttgggaggctgagccgggtggatcacctgaggtcaggagtttgagaccagcctgaccaacatggagaaaccctgtctctacgaaaaatacaaaatttgccaggcatggtggcgcatgcctgtaatcccagctactctggaggctgaggcaggagaatcacttgaacctgggaggcagaggttgcagtgagccgagatggtgccattgcactccagcctgggcaacaagagtgaaactctgtctcaaaaaaaaaaaattcttttagttctgttttatggttttcagttcagaagtcttatacatattttgttaaattgatttctagatatgtttcttacctttattgtaaaatggagccatcatttgcatcattcattactctgtatgtaatgtgttatcattctctacctgctttcaagattttctctttatttttgttttttagcagtttgtctgtggtgtatctaggtgtcattttatttgtatttatccggagatttattcttgagatttgcagagcttcttaaatctgtaaatttatgtctgtcggccaatttgggaaatttggagctattagttttaaaaatatttcttctgttccattctctttcacttcttctgtatgtgagttcaatttcacttcaattgtatgtgagttagacattttgatattagcccacaggatcctgaggttctttcattcttttcaatcttttttttttctcgaagtttgcatttcgtgagcaggagtgacagtcattcaggatgatttttgagattcctagttcaagagtagttcctattcttttctaggtgtagtcaagtatggcttctaattctactagaaggcttttttgtcggggaggtggttctatgtcctttggctcttacattttctttgtgtctttcacagcacagttttcagagggtaccctttctctttggttttgttttgttttgttttgttttagacggagtcttgctctgtctccaggctggagtgcagtggcgcaatcttggctcactgcaacctctgctcactgctacctctgcctcccgggttcaagcaattctcctgcctcagcttcctgagtagctgggactacaggcacgcgccaccacacccaactaatttttgtatttttagtagagactgggtttcatcatgttggcaaggctgttctccatctcttgacctcgtgatccgcccgccttggcctcccaaagtgctaggattacaggcgtgagccaccgcgcccggccaacagagggtaccctttcattctttttctccttcttcccagaaggcttgcgttttcaagactacctcatcaagttctgcatgtgtttaaaagtgtctctacccgaccttcccttcctccctcccgatttaacggaattctttgttggtgttttcatacttaccgtgagttttctttttcagggtgatattttagttccatcttaggctctccattgtcctcttctctcttctttttttttttgagacagagtctcattctgtcacccaggctggagtgcagtggtgtgatctctgctcactgcaacctctgcctcccaggttcaagtgattctcctgcctcagcctcccgaatagctgggattacaggcgcacacaaccacgcccacctaatttttgtattttcagtagagacggggtttcaccatcttggccaggctggtctcaaactcctgacctcgtgatccgcctgcctcagcttcccagagtgctgggattacaggcatgagccaccgcgcccggtgcgcccagccctcttctctcttctttgcatctctcttcctatctggatccctctttgctgtccttaaagagctgagatgagagattgagaaacatctctacaagaaattgacgtttttctacttatgggtaattagaagcttgtagtattttcagtcttctaagtatgttgaagatatgagacgttggtgattttctttgtttctccggttggttggtctgtgtagtttttggacatgtgtttggatatttggatttatatagctgccataatcttggctatgcaggtagtctttcctgacacttcatcctgaaagatttgaagcctttggacaaattttacagtgggctgggtgcagtggctcacgtctgtaatcccagtgctttgggaggctgggcaggaagattgcttgagcccaggagtttgagaccagcctggacaacatagtgagacccgtgtctctacaaaaaataaaaaatatgccgtgtgtggcgttatacaactgtagtcccagctacttaggaggctgaggtgggaagatcacgagccaaggagtttgagggtacggtgagccatgatcgcctcactgcactgggtggcacagcgagactgtctcaaaaaaaaaatttacaattaatgtctgcatatccttcacctaggttcataaatttgtacttttgctttatctacttgcctttttctctctctctacacacacacacacacacacacacacacacacaattagttgaatgaattgagagtaagttgcagaaaacatgacactttactccaatattgcatcatacaaaatcatacatctagtgataggccattgtcctacagaatcacgatataattatcacactaaccagctgtggtggtgcacacctgtagtctaagctactcgggaggctgaggcagaaggatcacctgagcccaggaggttgtggctgcagtctcatattcatcccatcatcagatttctcccattgtcctaataatattctttatagcttttctttatccctgatccgaaatttcattgaagatcacacagtgcatttagttgtcatgcctcttaagtctttatttatttattatttattttttgagatggagtcttgctctgttacccaaactggagtgcagtggcatgatcttggctcatgcaacctccacccgctgggttcaagtgattatcctgcttcagcctcccgtgttgctgggactacaggtgtgtgccaccatgcccagctactttttatatttttagtagagacgggaattgtaccatgttggccaggctggtcttgaactcctgagctcagatgatccacccgccttggcctcccaaagtgctgggattacaggcgtgggccaccacacccagccttaagcctcttttaacataaaagagttcaccagccattctattttgttttgctttttgagacactgatgctttggagagtccaggccagttgctttgtagatttcaacttgtttgattgtttcctgatgattaggttggtagaaatactacctcaatgatgggaccttcttagtgcgtccatcaggaagcacatgatgtgactgtaattggtgacattaagtttgattccttaataattaaggtggtaactcccaggtttctacattgtaaaggcatcttttgccgccctcctttttattcccaagtagtttatttggagattagtcctttacacagtagaggagcggggaagggagacaggaaaggaaagtttgacaacaaagggtgagttttcaagcctgttgccacgggggaacctaattccactggagaagctcatggcttggtgatgttccacagaggggtcagaaatttagcgtatttcaacaccagctcctgtcaggcaccatttgagggctgctgccagggtggttcaattttctggtgcttacagcttgccataaacaggtgcaaagtagtctggataccaaagaaagctctcaggtaacaagatgcagatgttggcatttggaagtcagaatagggtgcactattgtggtaagagctgaagggatggctgggcgcggtggctcacacctgtagtcccagcactttgggaggatgaggcaggcggatcacctgaggtcagaagttcgagagcagcctggccaacatgacgaaaccccgtctctactaaaaatacaaaaattagccaggcgtggtggtggatgcctgtaatcccagctattcagtaggctgaggcaggagaattgcttgaatctgggaggtgtaggttgcagtgagctgagatcacaccactctgcactccagcctgggtgacagagcgagactctgtctcagaaaaaaaaaaaagctgaagggatgctgagtagagcatccgtagtgtctgctatacctgggtaccctagaacctggagaacctacagcttgaggcaagagcgtatgtgctattattttttcaagaagtgtgctctcaggaagcagaggtaggggaaaggtgagtgaagggagaaggaagattaagtcagttcaagggtgcattttgaagttggttgcccttggtgcaagtacagttggttgcttgttctcctaaagctgtctcccaggaggatgtatacataactgcattccagggcaatccatctaaaggaagggtggacggacccctcagcttctgtatctcactggaaaaaggtttgcttcatggcacattaattcccatagacttctaggttgtgcatgtgtgggtaccaggtgggtcccacagacccttacacctccaaggcaagcagcaagccacgggtgggaagtgataggtacccagtatgagcaggaggtaagggaccgtggggttgtgcctgtgggcagttggttataacccagacgtgtttgatcagcccagtgacagctggagtggacaaagtgaccaagggcctcaaggacacacaaggccaagaagatttgaagtgctgtgtaagatatgcctaatgcatttggattctacctttgtttaacgaatatgcacacataaaaaacacttgaactccttgagcccaggagttcaagaccaacctgggcaacatagtgagacactcatctctaaaaaaattttaaaaaaaattaacctggcatgatagcactcacctgtagtcctgtctactctggaggccgcagtgggaggatcacctgagccctggaggtcaaggttacagtatgctatgattgcaccactgcattccagcctgggtaacagagcaagacgctgtctcttaaattttttttttttttttttttacttttataatggaaaaaccattgtagacagttttaggaaggaaagcagaatagtaagacatctttttcaaagtaaaagagcaaaaaaggcaaaaaatatttcacatttactttatggacaaagataagattgtccttcaataaaagactgaattttttttgtttgttttgttttgttttttgagaaagagtcttgctccattgcccaggctggaatgcagtggtgtggtctcggctcactgcaacctccgcctcccgggtacaagcaattctccagcctcagccccccgagtagctgggactacaggcacgcgccactgcatctggctaagttttgtatttttagtagagatggggtttcaccatgttgaccaggctcgtcttgaactcctgacctcaggttatccacctgcctgggcctcccaaagtgctgggattacaagtgtgagccaccgtgcccggccacaagttgctctttaaatgtgagaagtgttctggcatggtggctcacacctgaggcgggtggatcacttgaggtcaggagttcgagatcaggctggccaacatggtgaaaccccgtctctagttatttatttatttatttatttatttatttatttatttatttttttgagacggagtttcactcttgtttcccaggcgggagtgcaatggcgcaatctcggctcactgcaacctccgccttccgggttcaagcgattctcttgcctcagcctcctgagtagctgggattacaggcatgcaccaccacacccggctaattttgtatttttagtagagacggggtttttccatgttggtcaggctggtctcgaattcctgacctcaggtgatctgccctcctcagcctcccgaagtgttgggattacaggcgtgagccaccacgcccggccctgtctctactaaaaatgcaaaatttagccgggcatggtggcgcacacctgtaatctcagctactcaggagactgaagcagcagattcgcttgaacccaggaggtgaaggttgcagtgagctgagaccacaccactgcagggcagcctaggcgacaagagcgaaacgcttacaaaaaaaaaaaaaaaaaaagattcacaggtgatggtgatgctgctggttaaggaagtgaagtggctttttgctctgtagccttcctgaatgttggggcctcctgctcttcatttgtttcatttctattaagtctcctccctccagctatcttgttagctcctggaaagcatttcagtgattgtggcttctatttctttttgaccccacagtgtccagggtcatgctgcctatatagtagtgagcagtaagttgaggtttttaaaaactttattattattatttttgagatggagtcttgttctgtcacccaggctggagtgcagtggcacaatctcagttcactgcaacctctgcctcccaagttcaagtgattctcctgcctcagcctcccgagtagctgggactacaggcgcctgccaccacatccggctaatttttttgtatttttagtacagatggggtttcactatgttggtcaggctgatctcgaactcctgacctcaggtgatccgcctgctttggcctcccaaagtgttagggttacaggtgtgagccaccacacctggccggtttttttaaactttaaaacagattcacttgatttttcttccctaccccccagcttttttgaggtatgactgacaaaaattgtatatatttagggtgtacaatgtgatgatttgatatgtgaatgcactgtgaaatgattaccacagtcaaggtaattcacatatccaccacctcccagttaccctcttagctagtacaggttgggtattgcttctctgaaatgctttgggaccagaagtgttttggacttcagattttggaatatttgaatatatataatcagatatcttgggaaggggacccaagtctaaacatgaaattcatttgttttcagagcctaaagatgatttttttttttttttttttttgagatggagtctcactctcgcccaggctggagtgccgtggcacaatctcagctcactgcaacctctgcctcccaggttcaagcgattctcctacctcagcctcccaagtagctggaattacaggctcgcactaccacacccggctaatttttgtatttttataaagacatttcaccatgttggccaggctggtctcaaactcctgacctcaggtgatccgcccgcctcagcctcccaaagtgctgggattataggtgtcagtgactgcgtctggctgataattgaatttttctcttggagaagctgaataaactgtgtgttgtgtgcctgcctttttttttgtttttttttttttttgagacagagtcagacactctgtcacccaggctggagtgcgatggggtggtcatagctcactgcagcctcaaactcctgagctcaagcgatcctcccacatcagcctcctaagtagcatagcaccacgcctggctaatttttaaattttttgtagtgatggggttttgttgtctaggctagtctcaaactcctgggctcaagcagtccttctgccttggcctcccaaggtggtaggattataggtttgagccaccatgcctggccattacctgtgttttgactataacacatcatgttggcactcaaaacgttttggattttggagcattttgaattttggatttttggattagcaatgttccacctatagtacattttttgtttgctttcccataaagaattttttgtaattttgattttatagttctaaatgtaatatattcttattgtaaaaatcacctttaatagcaccgccagaatagcaaacatgttaacagaaaggtagaagtagaccttaaagaatcttcagcagcttgagagaccacagctaaccactgaggaactctgttctggattggagcagtgcttagaagcttataaataactcttagggtattgcatagggattctttttttttttttttcctgaaatggagtctcgctctgtcgcccaggctggagtgcagggtgtgatctcagatcactgcaacctccgcctcctgggttcaagcaattctttgcctcagcctcccgagtagctgggattacaggcgcctgccaccatgcccagctaatttttttggatttttagtagagagggggtttcaccatgttagccaggatggtctccatctcctgaccttgtgatccacccacctcggcctcccaaagtgctgggattacaggcatgagccactgtgcctggccgcataaggattctttatgtgatttttcagtagaggctcttgccttttactttaaacattctttgagggttgttttttttttccgctttttatttatatagaggtcaaccagaatcaagatgtctgggactgaggaagcaattcttggaggacgtgacagccatcctgctgctggcggcggctcagtgttatgctttggacaggtaactgtggttccttcatgccgggaaagaatgaggtgaagtgagtaaagttagggcaaggcagtttgtagagcatcgtagtacatgtgtgagcagtacctagtacgtttacctagtacgtgtgtgagcagtacctagtacgtttacctagtacgtgtgtgagcagtacctagtacgttgacgcggtgcgtgcgggggcagtacctagtacgtttacatagtacatgtgtgagctatttgttattggtttttcctttagatgcattttttgggagtcttgtgaactctggagggcattttggaatgttagctatcaaaagactgatagtactggggattagatttagattttaaattttttgtggggggggatagataacatatttgtatgacatcaaattcaaaatgaaactgtgaaaatctccctatttcctattgcccctgtgtgcatgccacccagttctatttcttttttttttcgagactgagtcttgctttgtcacccaggctgcagtgcagtggtgcgatctcagctcactgcaacttccaccctctggattcaagcaattctcctgcctcagcctcccaagtagctgggataacaggcatgcaccaccatggccagctaatttttatatttttagtagagatggggtttaaccatgttggccaggctggtctcgaactcctgacctcaggtgatccgcctgcctcggcctcccaaagtgtttggattacaggcgtgagccaccacgcccgggcttaatttttttgtatttttagtagagatgtggtttcaccatgttggccagggtagtcttgaactcctgacctcgtgatctgcctgcctcggcctcctaaatgctggaattacaggcatgagccaccgcgcctggctccagttgtctttcttggaggcatggaaagttactgggggtcctattccttgtagggacattgtgtgcacagaaaagagtttcttgctttgtccacccaaactccatctttgtctttagcagagagttgtgagtattcatctcatctgagcagggcaagggggacaaaacccaaatcagcaagcagtagtgtgtttctgtttgtgcaggatgggaaattgttgtattggagaaggcgtcaatctctggaaaggacaaatggaagcaaggcttcctacccccgtgctctttccgtacttgcttcctgtgctgacgtcatttacagatctggaggcagaacattttagcttcctaagcttcagaaacatttataaggatggtagcagcagctaaggcagcagttctcaaaatgcagttctcaaaaaccctggggtttctgaagatctttcagagtccagaaggtcaaaattatcttcataataatactatttgcctctttcacactcattgtctcatgagtgaatggtagagttttcagagagtgcatgatatgtggtgatgtcactgctatgatgcctaatggcatgcatgccttaaaagtttctcagttttgattcctaataggatacatagaacccacataaacaaaggttctggggggtctttttaagagtataaagtctccataaaggatggagactcaatgatgtgaggaatggtggaagtgtgaatttaattttcttttttggggttgcagtgccagtacacagcagaagagtaccaggccatccagaaggccctgaggcagaggctgggcccagaatacataagtagccgcatggctggcggaggccagaaggtaggagaattcatgtgcctggaaagcaggcatccataccgcagactccgatggtcttgccagttccctctctgggtcctcagggattcggaagtctgctgttaactgttcctggaggtctcccagtgcccctgggaggggatgggttccagacttcattctcatccgaaggggcctgggcatggtcttgacactcgcataaccgccgtcttaagatttttacatcatctttttttttttttatttttaaagacagggtcttgctctgtcacctaggctggagtccgaccagtggtgtcatctcagctcactgcagcctccacctcccaggctcaagcgatcctcctgcctcagcttcctgactagctgggactacaggcacacgccaccacacctggttaattttttaatgttctgtagagacgacatctcgccatgttgcccaggctgatctcgaactgctgggctcaagtgatcctcccacctcggcctcccaaagtgctgggattacaggtgtgggccaccatgcccagcctttacaccattaaaaaaaaaatgttccttttgccatttgctttttttttttaattaaacactttttaaagaacttatgattgacacataataattgcatatcatttgcttctaattttaacttctgtgtatatttttggtcttccataaaatatgtcaaacagatttgtactttttgcaaactgaattttagcaactgctgggtgagttcctcctcccaacagaccattcgttctcgcgggctccatctagaagatttttgaaataaattcattgagaattttcttgaaaaaaaaattttttttaacagactggttctcactctgtcacttaggctggagtgcagtggcacgatcctagcttactgcagccttgagctcctgggctcaagtgatcctcccacctcagcctcccgagaagaatgtttaaggacagtttatcgaaaaaagtagatgaggaataaattatgtcaattttgattcacatttaagtgtggtaaggaattaacacagcttttccttaaaaacatttgtttttctaggtgtgctacattgagggtcatcgggtaattaatctggccaatgagatgtttggttacaatggctgggcacactccatcacgcagcagaatgtgggtgagtatgctctccagcagtggggacttctgcactgtccagctcctgctgaaagtctgctgtgggtgaggaggtaaggtaggtggactcagctgccagcaggaggaatggttgtggcccagcggtcagtgtcctcttcaacttgctctctttcccactcctagattttgttgacctcaacaatggcaagttctacgtgggagtctgtgcatttgtgagggtccagctgaaggtgaggggatggagtagacctgctgcccggaaggatcagtgggtggtaggagaaggtgagcaggtagggaagtaggtagctggacggggacccaggctccagagttgtgtctcagccagcgttccctagagtggtggaattcaaatactcttgctcatgtgctccctaaaagaatggaaaaactgttctcttgcacatgttcaagctgacacctaaaagttttcaccatatataaaaattgttgcaaaggatgtattttttggcatatggtaaaatctgacattttaaaatacaataattttaccatcactgataagtgtttggaaactcaactttaggcaaagcaggtccttttgttataacattgatgaaaacaaaaatatgttttgttaataagttgtttcacttcaagtcacagttatttaaggtgttaagtgagcacttaccgtaaatctgttgaatcttgttaaatattccagtggactctaaatactatagaggataagatctatcatttatttgaagaaatacaatgaacaagcttttttttaatcattagaaattttacattgttctttctttatctgaactcatatttctattctatttccccactggttttaatcctaatacatatttatggttgaaagtttggctaggcggggtggctcattcgtgtaaccccagcactttgggaggcccaggtggaaggactgcttgagcccagggatttgagaccagcctgggcaacatagcgaaagcccgtctctactaaaaatacaaaaaattagctgggcatggtggtgtatgcttgtagtcctagctactcaagaggctgaggtgggaggatcacctgagcccaggaagtcgaggctgtggtgagctgtgattgcgccactgaactcctgggtggaaaaaaagaaaagttttatcggtagccttactgtgcttctctgcctttgcctgtgtataaaaataaaaatttttggtaaattttcagtgcacttaaggctctaaatattaaaatatttcttttggatttagttatattatagctactgttaacacacaattgaccagacaattgtgtttatggtgaagagaaaacataaatacagcaaaattttgatacttagaaaaattaaagatatgaaatcttgccacaaaaataaaaaatttaaaatataaaatttatggaaaatgtatatcttaatgagatggatggtgctgttttttcttttcagttagtttatatatccatatatccataactgaatattacttacttcttttttttttttgagatggagttttgctcttgttgcccaggctggagggcaatggttcaatctcagctcaccgcaacctccacctcctgggttcaagcgattctcctgcctcagcctcccaagtagctgggattacaggcatgcgccaccccgcccgcctaattttttgtgtgtgttttcagtagagacgcggtttctccatgttggtcaggctggtctggaactcacaacctcaggtgatccacccgccttggcctccaaaagtgctgggattacaggcgtgagccaccgcacccggcctacttatttcttgaatgaacaattcagcattaattctattctgacttatttttctaaatagtactaaaaaatcttgtatctatgagtgagtagctgagaatggaaagaattgtgttatagtgtcactcatttatttgagtgctttctgagttattttttaaaaatcacagagcgctgtcatcaaacattgtatttaattctcaatcagcgaatgatgtgctcaggtccaccttctcttttggtgagaggcaggagctggacgccacctgatttacaaagggtttgctctcccgtccttacagaccattagatccagtgttcaaatcatccctttgtttcatatcccagaggtttttttttttccaagacgtagtctcactctatcacccaggctggagtgcagtggtgcaatctcggctcactgcaacctctgcctcccaggttcaagtgattctcctgcctcagtctcctgagtagctgggattacaggtgcccaccaccacacccggctaatttttgtatttttagtagagatagggtttcaccatgttgaccaggctggtcttgaactcctgacctcaagtgatccacctcccttgacctcccaaagggctgggattacagcgtgagccaccacgcccggcccggccatcccagaggttttttttaccttagggtgatgcacactgataggatttggggtgagtttctaatgtgccctttgtgtgttgggaagttgggaagggaggatcgtcttgacaccttgaccgcaggcacatgtccaggcagcccaggtctaggaagcagcactcgcgatggattctcacccagccttctgcccgtgcccctgtagcaaggccgccaggtgggagagtccggctttgaaccctgctgcttgaggaacaggggagttgtggcacgcctgccgctctcgtgtttgagttcaaactccttttctgcccccaggatggttcatatcatgaagatgttggttatggtgttagtgagggcctcaagtccaaggctttatctttggagaaggcaaggaaggaggcggtgacagacgggctgaagcgagccctcaggtgagcgcggggctgggagtctaacctgcgtcatttcagctcttgcttcagagcagatttcgattttttttggaagaggtaacacatccacatggttcaaaaatccaagcagcgtggaaggtaattctcacccctgccctggttcctgtctgccgttttcccactttcgttagtattttttcaatgtttctgtttcaggcttcccttgctgggagtaagtggtagaatcctgtactctctcttctccgtgcactcagtcatgtgtgccggaggccttcccactcctactgcgagtgcacagacagcaccctcctctccgtgctcctcagcagtcctccgctacgcacaggtagcatagttaacgtagttacacagtcacgcagatgtccgtgttagtccatttatgttgctatacaggaataccagaggctgggtaatttataaataaaggaggtttgattggcttatgattctgtggactgtactggaagcctggtgccagcatccacttctgctgaggcctcaggaagcttctaatcatggcagaaggtgaagagggaacgtggagagagagggagcaagagagagaaggaaggagtcccaggcttatttatttattttattgttgtttttcattttttgagacagggtcttgctctgttgcacaggctggggtgcagtggtgccgtcatcgctcagtgcagccttgaactcctgggctgaagtgatcttcccgcctcagcctcccgagtagctgggatcacaggcacataacaccacccccagttaattaaaaaaaaatttttttttttttggagagacagggtctccctttgttgcctaggctggtctcaaactcctgggctcaagtcatcctcctgccttgtgcctcccaaagtgccgggatcacaggcatgagccatcatgcccagcccccacactcaaaaccaccagatctctcatgagctgagtgagaactcactcaacaccaaggggatggcactaagctgtttatgaggaatccagccccaggatccagtacctcccaccaggccgcaccccccggcattggaggtcacgtttcaacatgaaatttggaggggataaacatccaaaccatatccgtgtctttgagaattgaagtgaattgaaccagaaaaacctatgagttctgtgggggagtccgtagatcccaagttaagaactctggtcatgggaggttgtgcccttgagcccccggtccccaagtgtgtgttgcctactcctgctgggaaattggagcagcctttggggggaaaaaaaagaaaaactctctgcagtttgttctccatgtcaggaggtggctggtgggttttgtgaatggcgccgtaatcttttcatactcatcttctctgtgagggcagggacttgtgtcttgtcctcactgcagtattctcagaaactaacacagtgcaggaacatgctagatgcttaccagacatcaatggggaatgcatgttagggtccacttcctctgctgctcctgagaagcaacctgtacaaaagttgtaattctattctctgatattcatgtgtaacaattcttaaccctgtttcacctttttttctcttgcccttaggagttttgggaatgcacttggaaactgtattctggacaaagactacctgagatcactaaataagcttccacgccaggtatatcagacatggatgagtggagtgaagataatgcggcaaactcttgtgtgtcatgggttgagtatttggaggatgcaaggagaaaaagtgaggactcagctctttagagggtcgggaatgttgatttcagatttcgaatgttagagacagcaggaactaatcccaacattttccttttttctaaagtacatcatgtgggccggggaccgtggctcacgcctggaatcccagcactttgggaggtggaggcaggtggatcacaaggtcaggagatcgagaccatcctggctaacacggtgaaaccctgtctctactaaaaatacaaaaaattagccgggcgaggtggtgggcgcctgtagtcccagctactcgggaggctgaggcaggagaatggcgtgaacccgggaggcagagcttgcagtgagccgagatggcaccactgcactccaacctgggcgacagagccagactccgtctccaaaaaaaaaaaaaaaaaaaatcacaccatttgacaagaatgtgaggtctagagaatttgtgtacgtgtaggtagtgaactgtggttgggggtagtctgtgaagcctcaaagcaagcacacagccctctgcagcaccactgtccttcccagacactcccagcctcgctgttgagccttctttcttttccttagttctggtgtcattacatgtctgatgtcattacaatgtcatttacatgtccattatttctgtcaatacctataacgtgatctgagcctttgcctttggagaatggggtctgtggtggggcagccctggagtcacactgccttgccatgagtggcttctggagtgttcctcctgcctcatctgctctccgaggtccctgccatgtcgctccccagggcagcattcccatcctgtgcctgagggattcttgtcctcatggagccccacaaggtgtgtgtcactgggcatctgtaaaaactcctttaaaaaaatcatttttaaacattattggattcagtttgctaatattttgttagacttttttttttgagacggagtctcgctctgtcgcccaggctgaagtgcagtggtgtgatcttggctcactgcaacctctgcctcctgggttccagcgatgctcctgcctcagcctcctgagtagctgggattacaggtgtgtaccaccacgcctggctaatttttgtatttttttagtagagacggggtttcaccatcttggtcaggctggtctcgaattcctgacctcatgattcgcctgcctcggcctcccaaagtgctgagattacaggcgtgagcccccgcgcccggcctttgttaggcatttttgcatctatgtttatgagagatattagtcaagttttctttttctttttttttttttgagatagtctcactctgtcgcccaggctggagtgcagtagtgtgatctcagctcactgcaacctctgcctcccgggttcatgccattctcctgcctcagcctcccaagtcgctgggactacaggtgccagccaccaccatgcccagctaatttttttatttttagtagatggggtttcgtcctgttggccaggctggtcttgaactcctgacctcaagtaatccgcctgcctcggcctccgaaagttttgggatgacaggcgtgagccaccgcacccggccttttctttttttaaattgtagtaaaacacatcacattttaactatttttagtgtgtggtcgagtagtgttaagtgtattcccattgttgtgaaattgatctgcagaactaagaccctgcacccgtaaaacaagaactccgcatttccccctttcccagacccttgtaactacttccactttctttcctttttttttttttttaatttattttatgaaagatgaggtcttgctctgtcagccaggctggaatgcaggagtgccatcataattcactgcatccttgcactcctgggcccaagggatcctcctggatcctcctgcctcagcctctcaggtggctgggactacaggtatgtgccagtgcacctagctaatttattttttaaacaattattactattttttttgtagagacagaatttctcagggctggtcatgaactgctgggctcatgtgatcctcctgcctcggcctcccaaagcgctgggattgcagcgtgggccactgtacctggagccagctaattaactttttttgggggcttttttttttaagaggtgagttcttgctatgttgctgaggctggtcttgatctttttttcttttttaaaaaattaggttaggcgctgtggctcctgcctataatcctagcactttgggaggccgaggtggttagatcacttgagcctaggagtttgagaccaccctggccaacatggtgaaaccctgtctctactaaaaaatacaaaaatcagctgggcatggtggtcagcctgcctgtaatcccggtggtcagcctgcctgtaatcccagctcttctggaggctgaggcatgagaatcgcttgaacctgggaggtggaggctgcagtgagccaagattgcactactgcactccagcctgggagacagagtgagattctgtctcaaaataataataataaaatataaaaataaaatacttttttgtgtgtggtcatggagttttgctattgcccaggctagtctcaaactcctggctacaagcgatcctcccactcagcctccttaagtgctgagattataggtatatgtgtctactttctgtttctgtgaatttgtctactctggatacctcatataaatggaatcacataatttttgctttttgtgactggcttatttcacttagctagcattaatgcctttaagattcatccatgtagtagtgtgtatcagaattcccttctttttgtggctgaatattctgttgtatatatagaccacattttgtttatgcattcatttggtgatggggatttgggttgctttcaacctcttggctattgtgaataatgctgctatgaacgagggtgtgtaactctctttgagatcttgctttcaattcttttagacatattctgaaggggattgctgggtcatggtaatcctatttttaatttttcgaggagctgccacactgattttcatacagttgccccattttaccattccaccaacagggcacatgagttcagatttttctaaatcctaaccagcacttgttattttctgagtttttggttttttttttttttttttttttaagccaacctaatgggcgtgatattttattggggttatgatttgcatacccctgatgattagtgatgttgaccatattttcttttttgagacagaatctcactctgttacccaggctggagtgcagtggcacaatcttggttcactgcaacctctgcctctgggttcaaacaattctcctgtctcagcctcccaagtagctgggactataggcgcctgccaccatgccgggctaatttttgtatttttagtagagatggggtttcaccatgttggtcaggctggtctcgaactcctgacctcaggtgatccgcccgccttggcctcccaaagtgatgggattacaggtgtgagcccccgcacccagccaaccatattttcatatgcttgttggccatctgtttatcgtctttggagagatgtctattcaagtcctttgtcattttattttgttttattattttaatttaatttcttttattcatctcatctcatctcatctcatgacaagatctcgccctgtcacccaggctggaatgcagtggtctgatcatggcttggctccctggagcctcgacatcctgggcttgagtgatcctcccacgcaggctggagggcagtcgtgtgatctcggctcactgcagcctctatatcccagactcaaatgatcctcctgccttagcctcccaagtagctgggactacaggcatttgccaccatgccaggctaatttttttattttttgtacagaatacaaaaaattttaccgtgttgcccaggctggtctcaaactcctggcctcaagtgatccacctgccttggcctcccaaaatgctgggataacaggcgtgagaaacccatatggcccaactcctacttttattgagctttttcgtattgtttttgtattctctctttcacttatgtttgctgtcatctttttagaatttcctttcttctagctttgggtgtaactttttttttctagttctttgaggtatagcgtagatttgagatcttttttttttaactatgtgtgtaacttccctcttacgacttctttccctgcaccccagaagtttggtaggttgtgttgtagtatcatttgtctctgggaattcttctaagttggcttgttacatttcctttgactttaagagtgtggtgtttaatttctactgatttgtggattttccagttttctttttgctgttgatttctagtttcattccattgtgattgaaaagatactttatatgatttcaatcttgaatttgttaggacttgttttgtggcctaacatgtagtctgtcttggagaatgttccatgtgtacttgagaagaatgtattttctgctattggtgggtggaatgttatgtatatgactgttaggtccagttggcctatagtattgttcaaatactctatcgccttattcatcttttgtttggttgttttatctattattgaaagttgagtagtgaagtctcctactattattgtgttgcttttatttcaccttacaatcctctcaaagtttgcttcatatatttaggacctctggtgtttggtgcataaatatttataattgttatatcttcttggtgaattgacattcttttttttttttttgagacggagtctcactctgtcgcccaggctggagtgcagtggcggtgcgatctcagctcactgcaggctctgcctcctgggttcacaccattctcctgcctcagcctcctgagtagctgggactacaggcgcccgccacctacgcccggctaattttttgtatttttagtagagacggggtttcaccatgttagccaggatggtctcgatatcctgacctcgtgatctgcccacctcggcctcccaaaatgctgggattataggtgtgagccactgcacctggctgacattcttatcattatataatactctcgtctcctataacaattttttttttttttttgagacggagtcttgctctgccgcccaggctagagtgcagtggtgcgatcttggctcactgcatcctttgcctcctgggttcaagcagttctcctgcctcagcctcctgagtagctggaactacaggtgcgtgctaccatgcccggctaattttttttttttttgagacagagtttttgctcttgttgcccaggctggggtgcaattgtgtgatctcggctcactgccatctctgcctcccaggttcaggcaattcttctacctcagcctcccaactagctaggactacaggtgtgtgccaccacacccagctaattttttgtattttgtagagagggggtttcaccatgttggtcaggctgatcttggactcttaacctcagatgatccgcccacctcggcctcccaaggtgttgggattacaggcgtgagccaccacgctgagcccagatttttttttttttttttagacagagtcttgctctgtcgcccaggctggagtgcagtggcgctatcttggctcactgcaacctccgcctcccgggttcaagcgattctcgtgcctcagcctcctgagtagctgggactacaggcgcccaccaccacacccaactaatgtttcgtattttttagtagagcggggttttgctgtgttggccaggctggtctcaaactcctgggctcaagtgatcaatccacctgccttggcctcccaaagttctgggattacaggtgtgagccactgagcctggccccaaatttctctttttttgttgttgagacggaatttcactcttgtcaccgaggctggagtgcaatgttgtgatcactgcaacctctgcctcgtgggttcaagcgattctccagcctcagcctcccaagtaactgggattacaggcgcccgccaccatgcccggctaatttttatacttttagtagaaatggggtttcgccatgttggccagggtgatctcaaactcctgacctcaagtgatccacctgcctcagcctcccaaagtgttgggattacaggcatgagccaccatttcctaagtgagcacagctgttcacctcccagatagagaatcagacctttaccagcagcccagaagccccattttgccctcttccagtcactgccttgctttccttttttcaaaagtaactactatcctgtcttctattctgacttccatggattattttttcctgtttttgaactttatatatgtaaagttcacaaatggaattgtactgtaagtggaattgtacagttcatattttaagaaaattgaccgaagtatgaaaaagaacatatagacaggttagacgagtgcacgtatcatccatgctcagcttgatgaattttccaaccaaacacatccacacagccaacatctgaatcaagacactgccagtaccgagaaggcccagctgtgttccttgcagtcactgccatcccctgccctccttcccactctgagcaaaccgcttttaacaacacagattggccgggtgtggtggctcactcctgtaatcccaccacttgagaggccaaggaagaaggattgcttgagcccaagagttggagaccagccaggacaacatagtgggaccctgtctgtacgaaataaaaataaaaataaaaataaaaattagctgggcctggtggtggcgcctgtagtcccagctgcttgggaggctgggctgggagaatcatttgagcctaggaggcccaggctgcagtgagctgtgattacgccactgcactccagcctgggccacagagcgagaccctctctcaaaaaacaaaacaaaaaacaaagaaagccaccaatttgtttttattgttatgtacttttttggaatcctacagtttgaactctttgtatcttacttgaattcagcatggttgtgagattcattcatggtacgagcagcagtttcattgctgtataattttcttttgcatgagtatgtggcaatttatttttctagtcttttcttagtagacattttggtttttgtagcttgtggctgtttcgattagagatgctgttagcattcttttgctgtacagttgcactcatttttgttgggaattattgggggagaagataggtacgtgtttagttttagtaggttcttcccgttttcctgtatggttgtattaattcacaccccacgtggcattgcgtaagttccaattgttctgtatctttgacagcacttggtatcgccagtctttcatatttttcaaagctcgtttcttttttttgagacacagtcttgctctgtcgcccaggctggagtgcggtggtgcgatctccgcccactgcaacctctgtctcccaggtttaagtgattctccctgcctcagcctcccgagtagctgggattgttggtgtgtgccaccatgcccagctaatttttttttttttttttttgtatttttagtagagacaggctgttactcaggagttccttcgattttttttttttgtatttttgtatttttgccattttggccaggctggtcttgaacccctggactcaagtgatctgcttcggcttgccaaagtgctgggattacaggcatgagtcaacgtgcctggccaaagctcatttctttttaaactactcatttatctttcaatgtagacatgaaatctgcactataattttcattttcaggtcaaaatgtaatcatcttaatccctcatattcaaacaattattccatcagcatcagttttatgaattgagagatgttttcccaagtaaaaatgttctggatttctgtaggaatccgtgtggaaatgaaaccatttgccctgtgccacgcagcacaggactgtcccttctcatgttgatgagatgcagagcagccccgttctggaagattccttgcagccttggctggcagccggcgtccgtgcctcccaagggttcttccctctgtcgtttgaagggttcttcgtgatgccacagcgtgcccgaggctccctcagtgacgagcgcgatttgcaggggtggccctggcagaaagggttgggaaggtacagacctccacagagactgtgtgtgctcatttccgtggaaaaaggacaaggaggcagcaaagacagacccagcagcccaggaaagattcaaatgcgattttacagaacatctgccctaagtcaaaaccaaagaaggattcctttttatcaaaacttcactaacacagaacatgaaattgtttggctcctcctgctcatggagttacaggacctagaaggcgtgatggatggaggatgtcaaatgcgattttccaggaatcgcaatctgtgagtcagggagaagcagcggagggcaagagccagttgaaggaatttgtttttcttctttccttctagttgcctcttgaagtggatttaactaaagcgaagagacaagatcttgaaccgtctgtggaggaggcaagatacaacagctgccgaccgaacatggccctgggacacccacagctgcagcaggtgacctccccttccagacccagccatgctgtgataccggcggaccaggactgcagctcccggtatgcggcctaagtcccctcctttcctctgcggcccctcctgtgtcacggggctgcctccactcaggcctccagagccagccagccgtgcgtgtcctcccagcagccgcggctgttgctcaggagcccgtcctcgccgccgccctctcatgcagaagcctgagctcatccgccgtggagagcgaggccacgcaccagcggaagctccggcagaagcagctgcagcagcagttccgggagcggatggagaagcagcaggttcgagtctccacgccgtcagctgagaagagtgagggtgagcgaggggtgggagcagggccctgggaggcgtctgcaggaggaagtgtagccgcagggtcttctgattctctgcggtaaccctgggccggctccaaaccaggcctcgctgggacttctctcaagctacacgcaggagagatgagcccaggaaattcagatatttaaatctgctgtacattttcccgtttctaaagacaatgatttcttttttcccccgtggaactaagtgggccttgataaaatcttctagaattagaaatttcagggtaaagaacttttttttgcttcgaatgctttggccatctctacattagaaagccttggccgggcacggtggctcatgtccgtaatcccagcactttgggaggccaaggtgggcggatcacgtgaggtcaggagtttgagaccagcctggccatcatggcgaaaccccgtctctattaaaaatacataaaaattagccaggtgtggtggtgcatgcctgtggtcccccctactcgggaggctgaggcagaattgcttgaatccagaaggcagaggttgcagtgaaccaagatcgtgccactgcactccagcctgggcaacagagtgagaccctgtctcaaaacaaaaacaaaacaaaaaaaaaacaagccttgtgtttctgagatatcttcgaatacaaggcaaaattgggattgagaataacgggaacttttggcagattatttatcaactttagtttatttcagagtccagattgagtgggaatagtgatacagatgccttctttctttcttctctgtctccccacctgttctctcctgcccatccagcggtaggtagtccttactcagagagtggaaacagagaaagggcttgtctcagacccatcgagcttttgcccagtttttccctacaaattgtgaagcagattcacagaggacttgcttcatggttggttcattcatatgcccctcagcaccgacaggctgaaattaacataaaaaccaaaacagaaccacttcctgtcctgtggatatccttactgttgagttattgcaggtgtttagcttcttaaccattgcagaagctcccgggtagattgtggaggaagctgccctccaggcctttcctgccccttggcagacaacccgagccattgttattttaatccatttcacacatcagattttggctgaagattttgtttgttggtttgttttcagacagggtcttgctctgtcacccagcctggagtgcagtggcgggatcagggttcactgcagctttgaccttcctgagctcaagtgatcctccttcctcagcctcctgagtggctgggactacaagtgcatgctaccacacccgctgatattttattttttgtagaggtggcgtctcgaattcctggtttcaagcgatcctcccaccttggcctcccaaagtgctggggttacaggtgtgagccactgtgcctggtcagattttagtttaagattttgtttgagcaagggttatggctgttaacaagcgagccagacactggattagatggcctgtgagaaaccttttacttttgctgtgaaaggagaaagaaacttgtttttcccactggtgagaagaattcaaaccacagacagatctgtaggtaggactgggactcgggaagctgaagttctttttactggcagaagcagcgcagccctaagcggtgttgtgcttcggagagtgttccctctaacaagaggggagtggacccacgctctgaaatcccatgcagtgatgtgatgatgacttgtcctttctctcctctgtgaaccgtagcagcgcctccggcccctcctgtgacgcacagcactcctgtaactgtctcagaaccactcctggagaaagacttccttgcaggagtgactcaagaattaatcagtaaataccttgaaatgcttgtaagctactgtgctgtatgtttctagtagccacagaataccttttaggcgacataaaaatcctcattttcgtgtggttttgttgagggggttctggctgatagcatatgtccagttcctctttggtcctaaccaaagggaagtgtacttttagggggaggggagagaaattccaaaaactttcagaaggtactgaagacatggaatttctgagggccagtttttccagtgctttctgtgagaatacttcattatttgctgatgacgcacttttccttgacctctgtagagactcttgaagacaactctgaaaagtgggctgtgactcccgatgcaggggatggtgtggtcaagccctcgtctagagcagacccagcccagacctctgacacattagccttgaacaaccagatggtgacccagaacaggactccacacagcgtttgccaccagaaaccacaagcaaaatctggatcttgggacctccaaacttatagcgctgaccaacgcacaacaggtagcagagaggtgtttaggcacaaaaattaaggggagatcctagctttaattctgggaatttttgaggaaggatgacatttcatttaaagtttgatagaatcgggaacttctattagggaatggtactgcaagtagaacagaattgatttaagagccagaacgtttcctttgggctcctgacttcaggtgcagcccttttcagctcctgataatagcaggaagcggaaacgactgcatggagagctgtccctcccagcagcaggtctgtcatgagcacgaggccacttggtctaggagaatcatctgccttcctcctaacagtaattctcattcttgggcttagtctaaattaggatcattaatataatccagaaatcattagctgtcagtttattttaaaattatggcagctacatttaagccattttgtcttccataggaaactgggaatctcataggaagagccaggacatgaagaaaaggaaatatgatccatcttaactgaggctcaggccacataattggactctgtcacaaagggactttggaaaactactttttggtcatgaaattgttcatcgctgctggagaatgaacgtcattgcgatttatcttgcttcattctgaaccttatcaagaggatctgactgagagcccactgcagttagagctgagcacttttgaaaagcttgtccatcactctagtagggagaggctctggacagatgaataccttttcttcggcttgtgaggcttcccactatttattactgaactattatgttaatgaagatggacattttaggaatcaccaatggctccttgccctcaagcaatataggccagacttggtcctaagcacctgcctcagcaattgtctacattcagttgttttgcataacgtctgccttctttcctttacggtccatgcctttaatgttgcccacattaagcactgtggatcacgacaggaaaaaggttggagcagtgcttttcactactttgtatcaatccaggctacaatcttcatttaatataaataatttatggatttatgacattacaatcctgcattgtttcaagactgacattttttcctaaggaaggaaataatcatctaagaccacgaaaaaaggctgttttttgtttttttttttttttttttttttgagacggggtctggctgtgttgccctgactggagttcagtggtgcaaacacagctctctccacaacctcttgggcccaagtgatactcccacctctgccttacaaaatacagggattactggtgtgagccactgtgtctggccagaaaaggcatttttgagaaagcaaatcgtataccttattaacaaaatagaatatatatatattgcttatctgaaatgcttgaaaccagaa

SEQ ID NO: 15761 - DNA, 37132 bp, Homo sapiens
gtgcaccgcgcgctgcccgaggcgcgtaagtgggggaggagagcggcttcccccggggtggttctagccgtgggtgtggagcgtgggaaggctcagcttccgggtcgagaacctggggctgcggtggacctgatcctgaggtctcagcgtagagatgctgagtccagaggcctgttctagttcaccagtgcagtgaggggctcagtatccgggcctcccgagaggtgggtaggaaggcggggtacaggaaacttggcaccaacgcgccgggaccccaccgcggtgcggacagccaggtgtccgtggtggcgcttccttggagatgctgcctgcagacaggcgtggggaatctgaagtttgtgttaatagctaaacgaagttgagttgcagggagcgggggacgctgggaagaaatgattgatttaaaaggaatttgacgccgggcatggtggcggcatgcccccatgttccctggaggtcaagcctgcagtgagccgagatcgcacccgtaccacgacactccgtcccgggcgacagagcgagaccctgtcacgggggaaaaaataaaaataaaaatttgacgctcactttagctgagtattgagccttgttataacattgagatagaggtctggcgcggcgtctcacacctgtaatcccagaactttggaaggccgatgcgggaggatcgcttgaggccaggagttctacgccagcctggctaacatagcgaaaccccgtctctactaaaaatacaaaactaggcaggcctggtggcgggcgcctgtaatccccgctactcgggaggcggaggcatgagaatcgcttgaacccagtaggcaggtgtgccggtaagccgacatcgcaccactgcactccagcctgggggacagagcgagaatccatccaaaaaaaaaaaagttataattcacgtacaattaaattcactcccttttttaaaaaaaagtggagacatagtctcgctctgttgcccaggctggagtacagtggcgccgtctcggctcactgcaacgtccgcctcctgggttcaagcgattctttgcttcagcctctcaagtagctggaattacaggcgcataccaccacacccagctactttgtatttttcaccatgttggttaggctggtctcgaactcctcgcccttccaaagttcagggattacaggtgtgagccaccacacccagtctaaattcacccttttaaagtgtgcaattcagtggttttaatatattcacaaggttgtgcaatcaccactattatctaattccagaacatttttatcatccctaaaagaaaccttaaaaccattagcagacacccattatttcctcctactcccagcagcactaatctatgaatttacccattctcagtactgtattatacaatatttgttcttttgtgtttggtttatttcacttcatgattcaaagtccatctatgttgtatgtagcatgtatcaacttcattttttaaataactgaattatttattgtgtggatataccacattttgtttctccatttttgatggatactggtgattttctaggctttctaggtctagtcctccacagaactcgcagtctgaggcacagacatttaaaacttaagtttttggaaactagcatttaactcttgggttgggtcaggtaattcagtggcctcaggtctggtatcgtttagggcagttttttttttgttttttttttttttttgagatgaagtttcactcttgttgcccagggtggagtgcaatggcgtatctgggctcactgcaacctcacctcctgggttcaagcgcttctcctatctcagcctcctcggtaactgggcttacaggcgcatgccactatgcccggctaatttttggtatttttagtagagacagggtttcaccatgttggccatgctggtctcgaactcctgacctcaggtgatccacccatctcggcctcccaaagtgctgggattacaggtgtgagccaccgcgcctgggtgggagttttgtttttttgtttgtctgttgttttttggggggacagagtttctctcagcctcctcggtaactgggcttacaggcgcatgccactatgccaggctaatttttggtatttttagtagagacagggtttcaccgtgttggcaatgctggtctcaaactcctgacctcaggtgatccacccgcctcggcctcccaaagtgctgggattacaggtgtgagccaccacacctgggcgggagttttgtttttttgtttgtctgttgtttttttggggggacagagtttcgctcttgttgcccaggctggactgcagtggcgagatcttgactcactgccacttctgcctcctggattcaagcgattctcctgcctcagcctcccgagtagctgggattacaggtgtgcaccaccacacccggctaattttgtatttttagtagagaaggggtttctccatgttggttacgctggtctcgaactccctacctcaggtgatcctcccgccttggcctcccaaagtgttgggattacaggcgtgagccactgcgcccctctgggagtgttttttaaagtgttctattctcagttcaccacttaccaggccgttaattatcgtggtatcaagcagagaaatgtttgtgtgctggtcttctcagggaggcagaaaccgtcagagattgctgttgtgtaatgtacaccaaaacgtgttatcttgtagtataaacggtgtagttggagatgagtgtatgaaaaatgtaactgagctagctgtgggagagactagttgtgaaaaattttgagtcacccactgtatgctttcccagctatgttcaaataaggtgacactctgccttcctgtttcagctctaaaactgttcataagtgttattttggctgtatacgtagtgccatgtttttttgtatttttgtgcttttggtgattttgctgtttataggggcctccaagaatagaagtgctgtctagcatttccaagttgaaggctgtgatatatcttatagagaaaagataagcttttagattagctttgttcaggcatcacttttgttgttggctgtgagttcatgttactgcatcaacaatatatattaaataagatatctttaaacagaagcacacataaaacaaggttatgtattggcctgttgagtaaccctgtatttcccctgggagcagtggctcagtatttgctagttcagtgttcatgatggctttacaggacataactaccctgaataatgagaactgactgtctcagtagtgcttcaagggcagaaagcctagtggatatttttccatctctgcagcttttagcatttcttcactcaaggcactcatttttaatattgaactggcagttttgatgtggagagaagctaaaataaggctaaaatgctcttcatactatgtgctgagtggggactgtgctgagtgttggggattcagtgattagtgtatggccccgcagttctctaatggctgagtgtgggagtgcagagaaatgatcagtgtgagggaattaatcctatgttcccaccgtgtttttttgttttttttgagacggagtttcactcttgtcgcccaggctggagtgcggtggcgtgatctcggctcactgcaacctccgtctcccaggttcaagcgattctcctgcctcaacctcccgagtagctgggattacaggtacccgccaccgtgcccagctaatttttgtatttttagtagagacggagtttcaccatgttggccgggctggtctcgaactcctgacctcatgatctgcctgcctcggcctcccaaagtgctgggattactgggttcccacaaattttaagacttacttcaggccaggtgtggtggcttatgcctgtaatcccagcattttgggaggccgaggtgggcagatcacctgaggtcaggagttcgagaccagcctggccaacatggtgaaacccctgcctctactaaaagtacagaaaattagctgggtgtggtcgcgcatgcctgtagttccagctactcaggaggctgaggcaccagaatcacttgaacctgggaggtggaggttgcagtgagctgagattgcgccactgtactccagcctgggcaacagagtgtctccccctcaaaaaaaaaaagacatacttcagagtgtggtgagctgcataaggctttagaggtaatgacattttgagatttcaattaaaaattttttttctactttttttttttgagacagagtctcactcttgctcaggctagagtgcagtggtgcgatcttggctcactgcaaccttcgcctcctggattcaagcgattcttgtgccttagcctcctgaggagctgagattacaggcacctgccaccatgcccagctaatttttgtatctttagtagagaagaggtttcatcatgttagccgggctggtcttgaactcctgacctcaggtgatctgtctgcattggccttccaaagtgctgagattacagatgtgagccaccgtgcctggccactttttttctacttttgctaatttttttaaagtttcatgaacattatagtactgtgttcataaatgaaaataaaagaaacttgctccagtcttgttcatcaagccgttcttgaccttcacagtcagaatctcacccatcaccttgtcacatctccctcttgatctgtatatccagagtccacctgacatgcttcttcagccctccacatataataagaaatggttttgtgagccgagattgtgccattgcactgcagcttgggcaacagtgtgagactcctcaaaaaaaaaaaaaaagaaagaaaaatgcttttaggtgataaggaaatggagaagaataaaacatctttgccagtctttacctttttaatatcttgaattcatgatttcttgccatagccactatcctagtccaggctctctcccttctacccctgagttttttttttttttttttttaccatgtttttatttcctctgggaaaacacctatcagaattttgggatcatatgacagatacatatttaatttctttctttcttttttgagacagggtcttcctctgttgcccaggctggagtgtagtggtatgatcatggctcactgcagccttgaccccttcctcgcccccgctcaagtgatcctcccaccacagcttcctgagtagctgggactgccggcatgctccaccatgcccgactaacgttttgctgcttgtagagacagccatgttccctaggcttgtcttgaactcctgagcctcaagcgatccttccacttcagcctcaagtgctgggattacaggcgtgagccaccactcctggctacttaatttctttctttctttttttttgagacagtctcgttctgtcacccaggctggagtgcagtggggtgatctcttctcactgcagcctctaccttccaggctgaagcaagccttccacctcagccccctgagtagctaggactacgggaacattccaccaggcccagctaatttttgtattttttgtagagatggagtttcatgatgttggccaggctggtcttgaactcctcacctcatgcaatccgcctgcctcagcctcccaaagtgctgggattacaggtgtgagcaactgcacccagcgggccccgcccagacctattttcaaaattagaaaaccgtgaggcttctggaagaagatgagaagaatatcttcatgacctgagtgtgtgcaaaggtttcttagggctcaggatgccagagtcacttaaaaaagcaaaaaaaacccaaaaaaaaaaccacacacacaaagataaatatgattgattacatcaaaatgtaatcacagactactctaagaaaatgaatggggaaacacagggacctatttgacaaaagactgatattcaagataaataaagaactaataggccaggcgcggtggctcacgtctgtaatcctggcactttgggaggccgaggcggggggatcacttgagctcaggagttcgagaccagcctgagcaatatagtgaaaccccatctctactaaaaatacaagaattagaattagctgggcgtgatggcacgtgcctgtagtcccagttactcgggaggctgaggctggagaattgcttcagtcaggaagatggaggttgcagtgagccgagattgtgccactgcactccagcctgggcgactgaacaagacttcgtctcaaaaaaccagtagggctccaggcctgggattgggcctctgctgctctactccctggacgtgtggctccgtccttggagtcggcctttggttttcatgaagagtagtgtgcattaacagctgagtggttttatcagcctgtttcctgccaacagtgtatgagagttccagttgctttacatccttgccagcatttggtgttgtcagtcttttgagttattctgatgggtgtggtgtgtcatggtcttaattttagtcctcagtcactaatggtgtttagcactttttcctgtgcccatgacaatgtgcatcttcctttgtgaagtgcctgctcaaatcttttgcccattttacattgggttgtgtgtctttttattattgagttgtagcagttatttatataacctttatatcctggttacctgtcctctgtctggttgcctattcattttcttagagttgtctgatgaacagaagttttacattttgatgtaatcagttttctcttatattttcttttatagttactgctttctgagtcctaggaaatcttggctaccttcaggctgtgaagataatctttcatgttttcttctgtaagttttttttttttttgagacagagtcttgctctgtcgtccaggctggagtgcggtgatggcgatctccgctcactgcaacctctgcctcccaggttcaagcgattctcctgccccagcctcccgagtagctgggattacagacatgcgccaccatgcccaactaatttttgtatttttattagagacagggtttcaccaggttggccaggttggtcttgaactcttgaccttgtgatccacccgcctcggtctcccaacatgctgggattataggcgtgagccaccgtgcccggcctataaattttatagttttagttttatgtttaagcctatcacccatttctagtttaggtgaatggtgtgagatataattaaatattaatttcttttccatatagatatccagtcattccagcaccatttgttgaaaatgctattgtattgcgttttggaaattaagatgactgtacaaatggtaattgatgtctgcactcccttttctgttccattgttcaatccttgtgttagtaccacacttttaattactgtagctttttagtaagtcttgaagtcatgtagttgtaggtcttccaattttgttgttttcaagcttgatgtgaatattctaaatcctctgcatttccatataaatatcagaattatctttaccagttttacagaaaagtctggtaaagttgtgattgggattgcattgaatctatggatcaatttggaaagaaatgacacctaaacagtattgagtcttcaaatatatgaacttggtgcattttccttcttatttaagccttttaaaatttctttttaggccgggtgcagtggcttatgcctgtaatcccagcactttgggagtctgcagcgggcagatcagctgaggtcaggagttcgagaccagcctggccaacatggtgaaaccccgtctctactaaaaatacaaaaattagccaggtgtggtggcaggtgcctgtagtctcagctacttgggaggctgaggcaggagaactgcttgaacttgctcaggaggtggaggttgcagtgagctgagatagtgccattgcactccagcctgggcaacaagagcaaaactctgtctcaaaaaataataataataaaaataaaaattttgggccaggtgtggcggctcacacctgtaatcccagcaatttgggaggctgagccgggtggatcacctgaggtcaggagtttgagaccagcctgaccaacatggagaaaccctgtctctacgaaaaatacaaaatttgccaggcatggtggcgcatgcctgtaatcccagctactctggaggctgaggcaggagaatcacttgaacctgggaggcagaggttgcagtgagccgagatggtgccattgcactccagcctgggcaacaagagtgaaactctgtctcaaaaaaaaaaaattcttttagttctgttttatggttttcagttcagaagtcttatacatattttgttaaattgatttctagatatgtttcttacctttattgtaaaatggagccatcatttgcatcattcattactctgtatgtaatgtgttatcattctctacctgctttcaagattttctctttatttttgttttttagcagtttgtctgtggtgtatctaggtgtcattttatttgtatttatccggagatttattcttgagatttgcagagcttcttaaatctgtaaatttatgtctgtcggccaatttgggaaatttggagctattagttttaaaaatatttcttctgttccattctctttcacttcttctgtatgtgagttcaatttcacttcaattgtatgtgagttagacattttgatattagcccacaggatcctgaggttctttcattcttttcaatcttttttttttctcgaagtttgcatttcgtgagcaggagtgacagtcattcaggatgatttttgagattcctagttcaagagtagttcctattcttttctaggtgtagtcaagtatggcttctaattctactagaaggcttttttgtcggggaggtggttctatgtcctttggctcttacattttctttgtgtctttcacagcacagttttcagagggtaccctttctctttggttttgttttgttttgttttgttttagacggagtcttgctctgtctccaggctggagtgcagtggcgcaatcttggctcactgcaacctctgctcactgctacctctgcctcccgggttcaagcaattctcctgcctcagcttcctgagtagctgggactacaggcacgcgccaccacacccaactaatttttgtatttttagtagagactgggtttcatcatgttggcaaggctgttctccatctcttgacctcgtgatccgcccgccttggcctcccaaagtgctaggattacaggcgtgagccaccgcgcccggccaacagagggtaccctttcattctttttctccttcttcccagaaggcttgcgttttcaagactacctcatcaagttctgcatgtgtttaaaagtgtctctacccgaccttcccttcctccctcccgatttaacggaattctttgttggtgttttcatacttaccgtgagttttctttttcagggtgatattttagttccatcttaggctctccattgtcctcttctctcttctttttttttttgagacagagtctcattctgtcacccaggctggagtgcagtggtgtgatctctgctcactgcaacctctgcctcccaggttcaagtgattctcctgcctcagcctcccgaatagctgggattacaggcgcacacaaccacgcccacctaatttttgtattttcagtagagacggggtttcaccatcttggccaggctggtctcaaactcctgacctcgtgatccgcctgcctcagcttcccagagtgctgggattacaggcatgagccaccgcgcccggtgcgcccagccctcttctctcttctttgcatctctcttcctatctggatccctctttgctgtccttaaagagctgagatgagagattgagaaacatctctacaagaaattgacgtttttctacttatgggtaattagaagcttgtagtattttcagtcttctaagtatgttgaagatatgagacgttggtgattttctttgtttctccggttggttggtctgtgtagtttttggacatgtgtttggatatttggatttatatagctgccataatcttggctatgcaggtagtctttcctgacacttcatcctgaaagatttgaagcctttggacaaattttacagtgggctgggtgcagtggctcacgtctgtaatcccagtgctttgggaggctgggcaggaagattgcttgagcccaggagtttgagaccagcctggacaacatagtgagacccgtgtctctacaaaaaataaaaaatatgccgtgtgtggcgttatacaactgtagtcccagctacttaggaggctgaggtgggaagatcacgagccaaggagtttgagggtacggtgagccatgatcgcctcactgcactgggtggcacagcgagactgtctcaaaaaaaaaatttacaattaatgtctgcatatccttcacctaggttcataaatttgtacttttgctttatctacttgcctttttctctctctctacacacacacacacacacacacacacacacacaattagttgaatgaattgagagtaagttgcagaaaacatgacactttactccaatattgcatcatacaaaatcatacatctagtgataggccattgtcctacagaatcacgatataattatcacactaaccagctgtggtggtgcacacctgtagtctaagctactcgggaggctgaggcagaaggatcacctgagcccaggaggttgtggctgcagtctcatattcatcccatcatcagatttctcccattgtcctaataatattctttatagcttttctttatccctgatccgaaatttcattgaagatcacacagtgcatttagttgtcatgcctcttaagtctttatttatttattatttattttttgagatggagtcttgctctgttacccaaactggagtgcagtggcatgatcttggctcatgcaacctccacccgctgggttcaagtgattatcctgcttcagcctcccgtgttgctgggactacaggtgtgtgccaccatgcccagctactttttatatttttagtagagacgggaattgtaccatgttggccaggctggtcttgaactcctgagctcagatgatccacccgccttggcctcccaaagtgctgggattacaggcgtgggccaccacacccagccttaagcctcttttaacataaaagagttcaccagccattctattttgttttgctttttgagacactgatgctttggagagtccaggccagttgctttgtagatttcaacttgtttgattgtttcctgatgattaggttggtagaaatactacctcaatgatgggaccttcttagtgcgtccatcaggaagcacatgatgtgactgtaattggtgacattaagtttgattccttaataattaaggtggtaactcccaggtttctacattgtaaaggcatcttttgccgccctcctttttattcccaagtagtttatttggagattagtcctttacacagtagaggagcggggaagggagacaggaaaggaaagtttgacaacaaagggtgagttttcaagcctgttgccacgggggaacctaattccactggagaagctcatggcttggtgatgttccacagaggggtcagaaatttagcgtatttcaacaccagctcctgtcaggcaccatttgagggctgctgccagggtggttcaattttctggtgcttacagcttgccataaacaggtgcaaagtagtctggataccaaagaaagctctcaggtaacaagatgcagatgttggcatttggaagtcagaatagggtgcactattgtggtaagagctgaagggatggctgggcgcggtggctcacacctgtagtcccagcactttgggaggatgaggcaggcggatcacctgaggtcagaagttcgagagcagcctggccaacatgacgaaaccccgtctctactaaaaatacaaaaattagccaggcgtggtggtggatgcctgtaatcccagctattcagtaggctgaggcaggagaattgcttgaatctgggaggtgtaggttgcagtgagctgagatcacaccactctgcactccagcctgggtgacagagcgagactctgtctcagaaaaaaaaaaaagctgaagggatgctgagtagagcatccgtagtgtctgctatacctgggtaccctagaacctggagaacctacagcttgaggcaagagcgtatgtgctattattttttcaagaagtgtgctctcaggaagcagaggtaggggaaaggtgagtgaagggagaaggaagattaagtcagttcaagggtgcattttgaagttggttgcccttggtgcaagtacagttggttgcttgttctcctaaagctgtctcccaggaggatgtatacataactgcattccagggcaatccatctaaaggaagggtggacggacccctcagcttctgtatctcactggaaaaaggtttgcttcatggcacattaattcccatagacttctaggttgtgcatgtgtgggtaccaggtgggtcccacagacccttacacctccaaggcaagcagcaagccacgggtgggaagtgataggtacccagtatgagcaggaggtaagggaccgtggggttgtgcctgtgggcagttggttataacccagacgtgtttgatcagcccagtgacagctggagtggacaaagtgaccaagggcctcaaggacacacaaggccaagaagatttgaagtgctgtgtaagatatgcctaatgcatttggattctacctttgtttaacgaatatgcacacataaaaaacacttgaactccttgagcccaggagttcaagaccaacctgggcaacatagtgagacactcatctctaaaaaaattttaaaaaaaattaacctggcatgatagcactcacctgtagtcctgtctactctggaggccgcagtgggaggatcacctgagccctggaggtcaaggttacagtatgctatgattgcaccactgcattccagcctgggtaacagagcaagacgctgtctcttaaattttttttttttttttttttacttttataatggaaaaaccattgtagacagttttaggaaggaaagcagaatagtaagacatctttttcaaagtaaaagagcaaaaaaggcaaaaaatatttcacatttactttatggacaaagataagattgtccttcaataaaagactgaattttttttgtttgttttgttttgttttttgagaaagagtcttgctccattgcccaggctggaatgcagtggtgtggtctcggctcactgcaacctccgcctcccgggtacaagcaattctccagcctcagccccccgagtagctgggactacaggcacgcgccactgcatctggctaagttttgtatttttagtagagatggggtttcaccatgttgaccaggctcgtcttgaactcctgacctcaggttatccacctgcctgggcctcccaaagtgctgggattacaagtgtgagccaccgtgcccggccacaagttgctctttaaatgtgagaagtgttctggcatggtggctcacacctgaggcgggtggatcacttgaggtcaggagttcgagatcaggctggccaacatggtgaaaccccgtctctagttatttatttatttatttatttatttatttatttatttatttttttgagacggagtttcactcttgtttcccaggcgggagtgcaatggcgcaatctcggctcactgcaacctccgccttccgggttcaagcgattctcttgcctcagcctcctgagtagctgggattacaggcatgcaccaccacacccggctaattttgtatttttagtagagacggggtttttccatgttggtcaggctggtctcgaattcctgacctcaggtgatctgccctcctcagcctcccgaagtgttgggattacaggcgtgagccaccacgcccggccctgtctctactaaaaatgcaaaatttagccgggcatggtggcgcacacctgtaatctcagctactcaggagactgaagcagcagattcgcttgaacccaggaggtgaaggttgcagtgagctgagaccacaccactgcagggcagcctaggcgacaagagcgaaacgcttacaaaaaaaaaaaaaaaaaaagattcacaggtgatggtgatgctgctggttaaggaagtgaagtggctttttgctctgtagccttcctgaatgttggggcctcctgctcttcatttgtttcatttctattaagtctcctccctccagctatcttgttagctcctggaaagcatttcagtgattgtggcttctatttctttttgaccccacagtgtccagggtcatgctgcctatatagtagtgagcagtaagttgaggtttttaaaaactttattattattatttttgagatggagtcttgttctgtcacccaggctggagtgcagtggcacaatctcagttcactgcaacctctgcctcccaagttcaagtgattctcctgcctcagcctcccgagtagctgggactacaggcgcctgccaccacatccggctaatttttttgtatttttagtacagatggggtttcactatgttggtcaggctgatctcgaactcctgacctcaggtgatccgcctgctttggcctcccaaagtgttagggttacaggtgtgagccaccacacctggccggtttttttaaactttaaaacagattcacttgatttttcttccctaccccccagcttttttgaggtatgactgacaaaaattgtatatatttagggtgtacaatgtgatgatttgatatgtgaatgcactgtgaaatgattaccacagtcaaggtaattcacatatccaccacctcccagttaccctcttagctagtacaggttgggtattgcttctctgaaatgctttgggaccagaagtgttttggacttcagattttggaatatttgaatatatataatcagatatcttgggaaggggacccaagtctaaacatgaaattcatttgttttcagagcctaaagatgatttttttttttttttttttttgagatggagtctcactctcgcccaggctggagtgccgtggcacaatctcagctcactgcaacctctgcctcccaggttcaagcgattctcctacctcagcctcccaagtagctggaattacaggctcgcactaccacacccggctaatttttgtatttttataaagacatttcaccatgttggccaggctggtctcaaactcctgacctcaggtgatccgcccgcctcagcctcccaaagtgctgggattataggtgtcagtgactgcgtctggctgataattgaatttttctcttggagaagctgaataaactgtgtgttgtgtgcctgcctttttttttgtttttttttttttttgagacagagtcagacactctgtcacccaggctggagtgcgatggggtggtcatagctcactgcagcctcaaactcctgagctcaagcgatcctcccacatcagcctcctaagtagcatagcaccacgcctggctaatttttaaattttttgtagtgatggggttttgttgtctaggctagtctcaaactcctgggctcaagcagtccttctgccttggcctcccaaggtggtaggattataggtttgagccaccatgcctggccattacctgtgttttgactataacacatcatgttggcactcaaaacgttttggattttggagcattttgaattttggatttttggattagcaatgttccacctatagtacattttttgtttgctttcccataaagaattttttgtaattttgattttatagttctaaatgtaatatattcttattgtaaaaatcacctttaatagcaccgccagaatagcaaacatgttaacagaaaggtagaagtagaccttaaagaatcttcagcagcttgagagaccacagctaaccactgaggaactctgttctggattggagcagtgcttagaagcttataaataactcttagggtattgcatagggattctttttttttttttttcctgaaatggagtctcgctctgtcgcccaggctggagtgcagggtgtgatctcagatcactgcaacctccgcctcctgggttcaagcaattctttgcctcagcctcccgagtagctgggattacaggcgcctgccaccatgcccagctaatttttttggatttttagtagagagggggtttcaccatgttagccaggatggtctccatctcctgaccttgtgatccacccacctcggcctcccaaagtgctgggattacaggcatgagccactgtgcctggccgcataaggattctttatgtgatttttcagtagaggctcttgccttttactttaaacattctttgagggttgttttttttttccgctttttatttatatagaggtcaaccagaatcaagatgtctgggactgaggaagcaattcttggaggacgtgacagccatcctgctgctggcggcggctcagtgttatgctttggacaggtaactgtggttccttcatgccgggaaagaatgaggtgaagtgagtaaagttagggcaaggcagtttgtagagcatcgtagtacatgtgtgagcagtacctagtacgtttacctagtacgtgtgtgagcagtacctagtacgtttacctagtacgtgtgtgagcagtacctagtacgttgacgcggtgcgtgcgggggcagtacctagtacgtttacatagtacatgtgtgagctatttgttattggtttttcctttagatgcattttttgggagtcttgtgaactctggagggcattttggaatgttagctatcaaaagactgatagtactggggattagatttagattttaaattttttgtggggggggatagataacatatttgtatgacatcaaattcaaaatgaaactgtgaaaatctccctatttcctattgcccctgtgtgcatgccacccagttctatttcttttttttttcgagactgagtcttgctttgtcacccaggctgcagtgcagtggtgcgatctcagctcactgcaacttccaccctctggattcaagcaattctcctgcctcagcctcccaagtagctgggataacaggcatgcaccaccatggccagctaatttttatatttttagtagagatggggtttaaccatgttggccaggctggtctcgaactcctgacctcaggtgatccgcctgcctcggcctcccaaagtgtttggattacaggcgtgagccaccacgcccgggcttaatttttttgtatttttagtagagatgtggtttcaccatgttggccagggtagtcttgaactcctgacctcgtgatctgcctgcctcggcctcctaaatgctggaattacaggcatgagccaccgcgcctggctccagttgtctttcttggaggcatggaaagttactgggggtcctattccttgtagggacattgtgtgcacagaaaagagtttcttgctttgtccacccaaactccatctttgtctttagcagagagttgtgagtattcatctcatctgagcagggcaagggggacaaaacccaaatcagcaagcagtagtgtgtttctgtttgtgcaggatgggaaattgttgtattggagaaggcgtcaatctctggaaaggacaaatggaagcaaggcttcctacccccgtgctctttccgtacttgcttcctgtgctgacgtcatttacagatctggaggcagaacattttagcttcctaagcttcagaaacatttataaggatggtagcagcagctaaggcagcagttctcaaaatgcagttctcaaaaaccctggggtttctgaagatctttcagagtccagaaggtcaaaattatcttcataataatactatttgcctctttcacactcattgtctcatgagtgaatggtagagttttcagagagtgcatgatatgtggtgatgtcactgctatgatgcctaatggcatgcatgccttaaaagtttctcagttttgattcctaataggatacatagaacccacataaacaaaggttctggggggtctttttaagagtataaagtctccataaaggatggagactcaatgatgtgaggaatggtggaagtgtgaatttaattttcttttttggggttgcagtgccagtacacagcagaagagtaccaggccatccagaaggccctgaggcagaggctgggcccagaatacataagtagccgcatggctggcggaggccagaaggtaggagaattcatgtgcctggaaagcaggcatccataccgcagactccgatggtcttgccagttccctctctgggtcctcagggattcggaagtctgctgttaactgttcctggaggtctcccagtgcccctgggaggggatgggttccagacttcattctcatccgaaggggcctgggcatggtcttgacactcgcataaccgccgtcttaagatttttacatcatctttttttttttttatttttaaagacagggtcttgctctgtcacctaggctggagtccgaccagtggtgtcatctcagctcactgcagcctccacctcccaggctcaagcgatcctcctgcctcagcttcctgactagctgggactacaggcacacgccaccacacctggttaattttttaatgttctgtagagacgacatctcgccatgttgcccaggctgatctcgaactgctgggctcaagtgatcctcccacctcggcctcccaaagtgctgggattacaggtgtgggccaccatgcccagcctttacaccattaaaaaaaaaatgttccttttgccatttgctttttttttttaattaaacactttttaaagaacttatgattgacacataataattgcatatcatttgcttctaattttaacttctgtgtatatttttggtcttccataaaatatgtcaaacagatttgtactttttgcaaactgaattttagcaactgctgggtgagttcctcctcccaacagaccattcgttctcgcgggctccatctagaagatttttgaaataaattcattgagaattttcttgaaaaaaaaattttttttaacagactggttctcactctgtcacttaggctggagtgcagtggcacgatcctagcttactgcagccttgagctcctgggctcaagtgatcctcccacctcagcctcccgagaagaatgtttaaggacagtttatcgaaaaaagtagatgaggaataaattatgtcaattttgattcacatttaagtgtggtaaggaattaacacagcttttccttaaaaacatttgtttttctaggtgtgctacattgagggtcatcgggtaattaatctggccaatgagatgtttggttacaatggctgggcacactccatcacgcagcagaatgtgggtgagtatgctctccagcagtggggacttctgcactgtccagctcctgctgaaagtctgctgtgggtgaggaggtaaggtaggtggactcagctgccagcaggaggaatggttgtggcccagcggtcagtgtcctcttcaacttgctctctttcccactcctagattttgttgacctcaacaatggcaagttctacgtgggagtctgtgcatttgtgagggtccagctgaaggtgaggggatggagtagacctgctgcccggaaggatcagtgggtggtaggagaaggtgagcaggtagggaagtaggtagctggacggggacccaggctccagagttgtgtctcagccagcgttccctagagtggtggaattcaaatactcttgctcatgtgctccctaaaagaatggaaaaactgttctcttgcacatgttcaagctgacacctaaaagttttcaccatatataaaaattgttgcaaaggatgtattttttggcatatggtaaaatctgacattttaaaatacaataattttaccatcactgataagtgtttggaaactcaactttaggcaaagcaggtccttttgttataacattgatgaaaacaaaaatatgttttgttaataagttgtttcacttcaagtcacagttatttaaggtgttaagtgagcacttaccgtaaatctgttgaatcttgttaaatattccagtggactctaaatactatagaggataagatctatcatttatttgaagaaatacaatgaacaagcttttttttaatcattagaaattttacattgttctttctttatctgaactcatatttctattctatttccccactggttttaatcctaatacatatttatggttgaaagtttggctaggcggggtggctcattcgtgtaaccccagcactttgggaggcccaggtggaaggactgcttgagcccagggatttgagaccagcctgggcaacatagcgaaagcccgtctctactaaaaatacaaaaaattagctgggcatggtggtgtatgcttgtagtcctagctactcaagaggctgaggtgggaggatcacctgagcccaggaagtcgaggctgtggtgagctgtgattgcgccactgaactcctgggtggaaaaaaagaaaagttttatcggtagccttactgtgcttctctgcctttgcctgtgtataaaaataaaaatttttggtaaattttcagtgcacttaaggctctaaatattaaaatatttcttttggatttagttatattatagctactgttaacacacaattgaccagacaattgtgtttatggtgaagagaaaacataaatacagcaaaattttgatacttagaaaaattaaagatatgaaatcttgccacaaaaataaaaaatttaaaatataaaatttatggaaaatgtatatcttaatgagatggatggtgctgttttttcttttcagttagtttatatatccatatatccataactgaatattacttacttcttttttttttttgagatggagttttgctcttgttgcccaggctggagggcaatggttcaatctcagctcaccgcaacctccacctcctgggttcaagcgattctcctgcctcagcctcccaagtagctgggattacaggcatgcgccaccccgcccgcctaattttttgtgtgtgttttcagtagagacgcggtttctccatgttggtcaggctggtctggaactcacaacctcaggtgatccacccgccttggcctccaaaagtgctgggattacaggcgtgagccaccgcacccggcctacttatttcttgaatgaacaattcagcattaattctattctgacttatttttctaaatagtactaaaaaatcttgtatctatgagtgagtagctgagaatggaaagaattgtgttatagtgtcactcatttatttgagtgctttctgagttattttttaaaaatcacagagcgctgtcatcaaacattgtatttaattctcaatcagcgaatgatgtgctcaggtccaccttctcttttggtgagaggcaggagctggacgccacctgatttacaaagggtttgctctcccgtccttacagaccattagatccagtgttcaaatcatccctttgtttcatatcccagaggtttttttttttccaagacgtagtctcactctatcacccaggctggagtgcagtggtgcaatctcggctcactgcaacctctgcctcccaggttcaagtgattctcctgcctcagtctcctgagtagctgggattacaggtgcccaccaccacacccggctaatttttgtatttttagtagagatagggtttcaccatgttgaccaggctggtcttgaactcctgacctcaagtgatccacctcccttgacctcccaaagggctgggattacagcgtgagccaccacgcccggcccggccatcccagaggttttttttaccttagggtgatgcacactgataggatttggggtgagtttctaatgtgccctttgtgtgttgggaagttgggaagggaggatcgtcttgacaccttgaccgcaggcacatgtccaggcagcccaggtctaggaagcagcactcgcgatggattctcacccagccttctgcccgtgcccctgtagcaaggccgccaggtgggagagtccggctttgaaccctgctgcttgaggaacaggggagttgtggcacgcctgccgctctcgtgtttgagttcaaactccttttctgcccccaggatggttcatatcatgaagatgttggttatggtgttagtgagggcctcaagtccaaggctttatctttggagaaggcaaggaaggaggcggtgacagacgggctgaagcgagccctcaggtgagcgcggggctgggagtctaacctgcgtcatttcagctcttgcttcagagcagatttcgattttttttggaagaggtaacacatccacatggttcaaaaatccaagcagcgtggaaggtaattctcacccctgccctggttcctgtctgccgttttcccactttcgttagtattttttcaatgtttctgtttcaggcttcccttgctgggagtaagtggtagaatcctgtactctctcttctccgtgcactcagtcatgtgtgccggaggccttcccactcctactgcgagtgcacagacagcaccctcctctccgtgctcctcagcagtcctccgctacgcacaggtagcatagttaacgtagttacacagtcacgcagatgtccgtgttagtccatttatgttgctatacaggaataccagaggctgggtaatttataaataaaggaggtttgattggcttatgattctgtggactgtactggaagcctggtgccagcatccacttctgctgaggcctcaggaagcttctaatcatggcagaaggtgaagagggaacgtggagagagagggagcaagagagagaaggaaggagtcccaggcttatttatttattttattgttgtttttcattttttgagacagggtcttgctctgttgcacaggctggggtgcagtggtgccgtcatcgctcagtgcagccttgaactcctgggctgaagtgatcttcccgcctcagcctcccgagtagctgggatcacaggcacataacaccacccccagttaattaaaaaaaaatttttttttttttggagagacagggtctccctttgttgcctaggctggtctcaaactcctgggctcaagtcatcctcctgccttgtgcctcccaaagtgccgggatcacaggcatgagccatcatgcccagcccccacactcaaaaccaccagatctctcatgagctgagtgagaactcactcaacaccaaggggatggcactaagctgtttatgaggaatccagccccaggatccagtacctcccaccaggccgcaccccccggcattggaggtcacgtttcaacatgaaatttggaggggataaacatccaaaccatatccgtgtctttgagaattgaagtgaattgaaccagaaaaacctatgagttctgtgggggagtccgtagatcccaagttaagaactctggtcatgggaggttgtgcccttgagcccccggtccccaagtgtgtgttgcctactcctgctgggaaattggagcagcctttggggggaaaaaaaagaaaaactctctgcagtttgttctccatgtcaggaggtggctggtgggttttgtgaatggcgccgtaatcttttcatactcatcttctctgtgagggcagggacttgtgtcttgtcctcactgcagtattctcagaaactaacacagtgcaggaacatgctagatgcttaccagacatcaatggggaatgcatgttagggtccacttcctctgctgctcctgagaagcaacctgtacaaaagttgtaattctattctctgatattcatgtgtaacaattcttaaccctgtttcacctttttttctcttgcccttaggagttttgggaatgcacttggaaactgtattctggacaaagactacctgagatcactaaataagcttccacgccaggtatatcagacatggatgagtggagtgaagataatgcggcaaactcttgtgtgtcatgggttgagtatttggaggatgcaaggagaaaaagtgaggactcagctctttagagggtcgggaatgttgatttcagatttcgaatgttagagacagcaggaactaatcccaacattttccttttttctaaagtacatcatgtgggccggggaccgtggctcacgcctggaatcccagcactttgggaggtggaggcaggtggatcacaaggtcaggagatcgagaccatcctggctaacacggtgaaaccctgtctctactaaaaatacaaaaaattagccgggcgaggtggtgggcgcctgtagtcccagctactcgggaggctgaggcaggagaatggcgtgaacccgggaggcagagcttgcagtgagccgagatggcaccactgcactccaacctgggcgacagagccagactccgtctccaaaaaaaaaaaaaaaaaaaatcacaccatttgacaagaatgtgaggtctagagaatttgtgtacgtgtaggtagtgaactgtggttgggggtagtctgtgaagcctcaaagcaagcacacagccctctgcagcaccactgtccttcccagacactcccagcctcgctgttgagccttctttcttttccttagttctggtgtcattacatgtctgatgtcattacaatgtcatttacatgtccattatttctgtcaatacctataacgtgatctgagcctttgcctttggagaatggggtctgtggtggggcagccctggagtcacactgccttgccatgagtggcttctggagtgttcctcctgcctcatctgctctccgaggtccctgccatgtcgctccccagggcagcattcccatcctgtgcctgagggattcttgtcctcatggagccccacaaggtgtgtgtcactgggcatctgtaaaaactcctttaaaaaaatcatttttaaacattattggattcagtttgctaatattttgttagacttttttttttgagacggagtctcgctctgtcgcccaggctgaagtgcagtggtgtgatcttggctcactgcaacctctgcctcctgggttccagcgatgctcctgcctcagcctcctgagtagctgggattacaggtgtgtaccaccacgcctggctaatttttgtatttttttagtagagacggggtttcaccatcttggtcaggctggtctcgaattcctgacctcatgattcgcctgcctcggcctcccaaagtgctgagattacaggcgtgagcccccgcgcccggcctttgttaggcatttttgcatctatgtttatgagagatattagtcaagttttctttttctttttttttttttgagatagtctcactctgtcgcccaggctggagtgcagtagtgtgatctcagctcactgcaacctctgcctcccgggttcatgccattctcctgcctcagcctcccaagtcgctgggactacaggtgccagccaccaccatgcccagctaatttttttatttttagtagatggggtttcgtcctgttggccaggctggtcttgaactcctgacctcaagtaatccgcctgcctcggcctccgaaagttttgggatgacaggcgtgagccaccgcacccggccttttctttttttaaattgtagtaaaacacatcacattttaactatttttagtgtgtggtcgagtagtgttaagtgtattcccattgttgtgaaattgatctgcagaactaagaccctgcacccgtaaaacaagaactccgcatttccccctttcccagacccttgtaactacttccactttctttcctttttttttttttttaatttattttatgaaagatgaggtcttgctctgtcagccaggctggaatgcaggagtgccatcataattcactgcatccttgcactcctgggcccaagggatcctcctggatcctcctgcctcagcctctcaggtggctgggactacaggtatgtgccagtgcacctagctaatttattttttaaacaattattactattttttttgtagagacagaatttctcagggctggtcatgaactgctgggctcatgtgatcctcctgcctcggcctcccaaagcgctgggattgcagcgtgggccactgtacctggagccagctaattaactttttttgggggcttttttttttaagaggtgagttcttgctatgttgctgaggctggtcttgatctttttttcttttttaaaaaattaggttaggcgctgtggctcctgcctataatcctagcactttgggaggccgaggtggttagatcacttgagcctaggagtttgagaccaccctggccaacatggtgaaaccctgtctctactaaaaaatacaaaaatcagctgggcatggtggtcagcctgcctgtaatcccggtggtcagcctgcctgtaatcccagctcttctggaggctgaggcatgagaatcgcttgaacctgggaggtggaggctgcagtgagccaagattgcactactgcactccagcctgggagacagagtgagattctgtctcaaaataataataataaaatataaaaataaaatacttttttgtgtgtggtcatggagttttgctattgcccaggctagtctcaaactcctggctacaagcgatcctcccactcagcctccttaagtgctgagattataggtatatgtgtctactttctgtttctgtgaatttgtctactctggatacctcatataaatggaatcacataatttttgctttttgtgactggcttatttcacttagctagcattaatgcctttaagattcatccatgtagtagtgtgtatcagaattcccttctttttgtggctgaatattctgttgtatatatagaccacattttgtttatgcattcatttggtgatggggatttgggttgctttcaacctcttggctattgtgaataatgctgctatgaacgagggtgtgtaactctctttgagatcttgctttcaattcttttagacatattctgaaggggattgctgggtcatggtaatcctatttttaatttttcgaggagctgccacactgattttcatacagttgccccattttaccattccaccaacagggcacatgagttcagatttttctaaatcctaaccagcacttgttattttctgagtttttggttttttttttttttttttttttaagccaacctaatgggcgtgatattttattggggttatgatttgcatacccctgatgattagtgatgttgaccatattttcttttttgagacagaatctcactctgttacccaggctggagtgcagtggcacaatcttggttcactgcaacctctgcctctgggttcaaacaattctcctgtctcagcctcccaagtagctgggactataggcgcctgccaccatgccgggctaatttttgtatttttagtagagatggggtttcaccatgttggtcaggctggtctcgaactcctgacctcaggtgatccgcccgccttggcctcccaaagtgatgggattacaggtgtgagcccccgcacccagccaaccatattttcatatgcttgttggccatctgtttatcgtctttggagagatgtctattcaagtcctttgtcattttattttgttttattattttaatttaatttcttttattcatctcatctcatctcatctcatgacaagatctcgccctgtcacccaggctggaatgcagtggtctgatcatggcttggctccctggagcctcgacatcctgggcttgagtgatcctcccacgcaggctggagggcagtcgtgtgatctcggctcactgcagcctctatatcccagactcaaatgatcctcctgccttagcctcccaagtagctgggactacaggcatttgccaccatgccaggctaatttttttattttttgtacagaatacaaaaaattttaccgtgttgcccaggctggtctcaaactcctggcctcaagtgatccacctgccttggcctcccaaaatgctgggataacaggcgtgagaaacccatatggcccaactcctacttttattgagctttttcgtattgtttttgtattctctctttcacttatgtttgctgtcatctttttagaatttcctttcttctagctttgggtgtaactttttttttctagttctttgaggtatagcgtagatttgagatcttttttttttaactatgtgtgtaacttccctcttacgacttctttccctgcaccccagaagtttggtaggttgtgttgtagtatcatttgtctctgggaattcttctaagttggcttgttacatttcctttgactttaagagtgtggtgtttaatttctactgatttgtggattttccagttttctttttgctgttgatttctagtttcattccattgtgattgaaaagatactttatatgatttcaatcttgaatttgttaggacttgttttgtggcctaacatgtagtctgtcttggagaatgttccatgtgtacttgagaagaatgtattttctgctattggtgggtggaatgttatgtatatgactgttaggtccagttggcctatagtattgttcaaatactctatcgccttattcatcttttgtttggttgttttatctattattgaaagttgagtagtgaagtctcctactattattgtgttgcttttatttcaccttacaatcctctcaaagtttgcttcatatatttaggacctctggtgtttggtgcataaatatttataattgttatatcttcttggtgaattgacattcttttttttttttttgagacggagtctcactctgtcgcccaggctggagtgcagtggcggtgcgatctcagctcactgcaggctctgcctcctgggttcacaccattctcctgcctcagcctcctgagtagctgggactacaggcgcccgccacctacgcccggctaattttttgtatttttagtagagacggggtttcaccatgttagccaggatggtctcgatatcctgacctcgtgatctgcccacctcggcctcccaaaatgctgggattataggtgtgagccactgcacctggctgacattcttatcattatataatactctcgtctcctataacaattttttttttttttttgagacggagtcttgctctgccgcccaggctagagtgcagtggtgcgatcttggctcactgcatcctttgcctcctgggttcaagcagttctcctgcctcagcctcctgagtagctggaactacaggtgcgtgctaccatgcccggctaattttttttttttttgagacagagtttttgctcttgttgcccaggctggggtgcaattgtgtgatctcggctcactgccatctctgcctcccaggttcaggcaattcttctacctcagcctcccaactagctaggactacaggtgtgtgccaccacacccagctaattttttgtattttgtagagagggggtttcaccatgttggtcaggctgatcttggactcttaacctcagatgatccgcccacctcggcctcccaaggtgttgggattacaggcgtgagccaccacgctgagcccagatttttttttttttttttagacagagtcttgctctgtcgcccaggctggagtgcagtggcgctatcttggctcactgcaacctccgcctcccgggttcaagcgattctcgtgcctcagcctcctgagtagctgggactacaggcgcccaccaccacacccaactaatgtttcgtattttttagtagagcggggttttgctgtgttggccaggctggtctcaaactcctgggctcaagtgatcaatccacctgccttggcctcccaaagttctgggattacaggtgtgagccactgagcctggccccaaatttctctttttttgttgttgagacggaatttcactcttgtcaccgaggctggagtgcaatgttgtgatcactgcaacctctgcctcgtgggttcaagcgattctccagcctcagcctcccaagtaactgggattacaggcgcccgccaccatgcccggctaatttttatacttttagtagaaatggggtttcgccatgttggccagggtgatctcaaactcctgacctcaagtgatccacctgcctcagcctcccaaagtgttgggattacaggcatgagccaccatttcctaagtgagcacagctgttcacctcccagatagagaatcagacctttaccagcagcccagaagccccattttgccctcttccagtcactgccttgctttccttttttcaaaagtaactactatcctgtcttctattctgacttccatggattattttttcctgtttttgaactttatatatgtaaagttcacaaatggaattgtactgtaagtggaattgtacagttcatattttaagaaaattgaccgaagtatgaaaaagaacatatagacaggttagacgagtgcacgtatcatccatgctcagcttgatgaattttccaaccaaacacatccacacagccaacatctgaatcaagacactgccagtaccgagaaggcccagctgtgttccttgcagtcactgccatcccctgccctccttcccactctgagcaaaccgcttttaacaacacagattggccgggtgtggtggctcactcctgtaatcccaccacttgagaggccaaggaagaaggattgcttgagcccaagagttggagaccagccaggacaacatagtgggaccctgtctgtacgaaataaaaataaaaataaaaataaaaattagctgggcctggtggtggcgcctgtagtcccagctgcttgggaggctgggctgggagaatcatttgagcctaggaggcccaggctgcagtgagctgtgattacgccactgcactccagcctgggccacagagcgagaccctctctcaaaaaacaaaacaaaaaacaaagaaagccaccaatttgtttttattgttatgtacttttttggaatcctacagtttgaactctttgtatcttacttgaattcagcatggttgtgagattcattcatggtacgagcagcagtttcattgctgtataattttcttttgcatgagtatgtggcaatttatttttctagtcttttcttagtagacattttggtttttgtagcttgtggctgtttcgattagagatgctgttagcattcttttgctgtacagttgcactcatttttgttgggaattattgggggagaagataggtacgtgtttagttttagtaggttcttcccgttttcctgtatggttgtattaattcacaccccacgtggcattgcgtaagttccaattgttctgtatctttgacagcacttggtatcgccagtctttcatatttttcaaagctcgtttcttttttttgagacacagtcttgctctgtcgcccaggctggagtgcggtggtgcgatctccgcccactgcaacctctgtctcccaggtttaagtgattctccctgcctcagcctcccgagtagctgggattgttggtgtgtgccaccatgcccagctaatttttttttttttttttttgtatttttagtagagacaggctgttactcaggagttccttcgattttttttttttgtatttttgtatttttgccattttggccaggctggtcttgaacccctggactcaagtgatctgcttcggcttgccaaagtgctgggattacaggcatgagtcaacgtgcctggccaaagctcatttctttttaaactactcatttatctttcaatgtagacatgaaatctgcactataattttcattttcaggtcaaaatgtaatcatcttaatccctcatattcaaacaattattccatcagcatcagttttatgaattgagagatgttttcccaagtaaaaatgttctggatttctgtaggaatccgtgtggaaatgaaaccatttgccctgtgccacgcagcacaggactgtcccttctcatgttgatgagatgcagagcagccccgttctggaagattccttgcagccttggctggcagccggcgtccgtgcctcccaagggttcttccctctgtcgtttgaagggttcttcgtgatgccacagcgtgcccgaggctccctcagtgacgagcgcgatttgcaggggtggccctggcagaaagggttgggaaggtacagacctccacagagactgtgtgtgctcatttccgtggaaaaaggacaaggaggcagcaaagacagacccagcagcccaggaaagattcaaatgcgattttacagaacatctgccctaagtcaaaaccaaagaaggattcctttttatcaaaacttcactaacacagaacatgaaattgtttggctcctcctgctcatggagttacaggacctagaaggcgtgatggatggaggatgtcaaatgcgattttccaggaatcgcaatctgtgagtcagggagaagcagcggagggcaagagccagttgaaggaatttgtttttcttctttccttctagttgcctcttgaagtggatttaactaaagcgaagagacaagatcttgaaccgtctgtggaggaggcaagatacaacagctgccgaccgaacatggccctgggacacccacagctgcagcaggtgacctccccttccagacccagccatgctgtgataccggcggaccaggactgcagctcccggtatgcggcctaagtcccctcctttcctctgcggcccctcctgtgtcacggggctgcctccactcaggcctccagagccagccagccgtgcgtgtcctcccagcagccgcggctgttgctcaggagcccgtcctcgccgccgccctctcatgcagaagcctgagctcatccgccgtggagagcgaggccacgcaccagcggaagctccggcagaagcagctgcagcagcagttccgggagcggatggagaagcagcaggttcgagtctccacgccgtcagctgagaagagtgagggtgagcgaggggtgggagcagggccctgggaggcgtctgcaggaggaagtgtagccgcagggtcttctgattctctgcggtaaccctgggccggctccaaaccaggcctcgctgggacttctctcaagctacacgcaggagagatgagcccaggaaattcagatatttaaatctgctgtacattttcccgtttctaaagacaatgatttcttttttcccccgtggaactaagtgggccttgataaaatcttctagaattagaaatttcagggtaaagaacttttttttgcttcgaatgctttggccatctctacattagaaagccttggccgggcacggtggctcatgtccgtaatcccagcactttgggaggccaaggtgggcggatcacgtgaggtcaggagtttgagaccagcctggccatcatggcgaaaccccgtctctattaaaaatacataaaaattagccaggtgtggtggtgcatgcctgtggtcccccctactcgggaggctgaggcagaattgcttgaatccagaaggcagaggttgcagtgaaccaagatcgtgccactgcactccagcctgggcaacagagtgagaccctgtctcaaaacaaaaacaaaacaaaaaaaaaacaagccttgtgtttctgagatatcttcgaatacaaggcaaaattgggattgagaataacgggaacttttggcagattatttatcaactttagtttatttcagagtccagattgagtgggaatagtgatacagatgccttctttctttcttctctgtctccccacctgttctctcctgcccatccagcggtaggtagtccttactcagagagtggaaacagagaaagggcttgtctcagacccatcgagcttttgcccagtttttccctacaaattgtgaagcagattcacagaggacttgcttcatggttggttcattcatatgcccctcagcaccgacaggctgaaattaacataaaaaccaaaacagaaccacttcctgtcctgtggatatccttactgttgagttattgcaggtgtttagcttcttaaccattgcagaagctcccgggtagattgtggaggaagctgccctccaggcctttcctgccccttggcagacaacccgagccattgttattttaatccatttcacacatcagattttggctgaagattttgtttgttggtttgttttcagacagggtcttgctctgtcacccagcctggagtgcagtggcgggatcagggttcactgcagctttgaccttcctgagctcaagtgatcctccttcctcagcctcctgagtggctgggactacaagtgcatgctaccacacccgctgatattttattttttgtagaggtggcgtctcgaattcctggtttcaagcgatcctcccaccttggcctcccaaagtgctggggttacaggtgtgagccactgtgcctggtcagattttagtttaagattttgtttgagcaagggttatggctgttaacaagcgagccagacactggattagatggcctgtgagaaaccttttacttttgctgtgaaaggagaaagaaacttgtttttcccactggtgagaagaattcaaaccacagacagatctgtaggtaggactgggactcgggaagctgaagttctttttactggcagaagcagcgcagccctaagcggtgttgtgcttcggagagtgttccctctaacaagaggggagtggacccacgctctgaaatcccatgcagtgatgtgatgatgacttgtcctttctctcctctgtgaaccgtagcagcgcctccggcccctcctgtgacgcacagcactcctgtaactgtctcagaaccactcctggagaaagacttccttgcaggagtgactcaagaattaatcagtaaataccttgaaatgcttgtaagctactgtgctgtatgtttctagtagccacagaataccttttaggcgacataaaaatcctcattttcgtgtggttttgttgagggggttctggctgatagcatatgtccagttcctctttggtcctaaccaaagggaagtgtacttttagggggaggggagagaaattccaaaaactttcagaaggtactgaagacatggaatttctgagggccagtttttccagtgctttctgtgagaatacttcattatttgctgatgacgcacttttccttgacctctgtagagactcttgaagacaactctgaaaagtgggctgtgactcccgatgcaggggatggtgtggtcaagccctcgtctagagcagacccagcccagacctctgacacattagccttgaacaaccagatggtgacccagaacaggactccacacagcgtttgccaccagaaaccacaagcaaaatctggatcttgggacctccaaacttatagcgctgaccaacgcacaacaggtagcagagaggtgtttaggcacaaaaattaaggggagatcctagctttaattctgggaatttttgaggaaggatgacatttcatttaaagtttgatagaatcgggaacttctattagggaatggtactgcaagtagaacagaattgatttaagagccagaacgtttcctttgggctcctgacttcaggtgcagcccttttcagctcctgataatagcaggaagcggaaacgactgcatggagagctgtccctcccagcagcaggtctgtcatgagcacgaggccacttggtctaggagaatcatctgccttcctcctaacagtaattctcattcttgggcttagtctaaattaggatcattaatataatccagaaatcattagctgtcagtttattttaaaattatggcagctacatttaagccattttgtcttccataggaaactgggaatctcataggaagagccaggacatgaagaaaaggaaatatgatccatcttaactgaggctcaggccacataattggactctgtcacaaagggactttggaaaactactttttggtcatgaaattgttcatcgctgctggagaatgaacgtcattgcgatttatcttgcttcattctgaaccttatcaagaggatctgactgagagcccactgcagttagagctgagcacttttgaaaagcttgtccatcactctagtagggagaggctctggacagatgaataccttttcttcggcttgtgaggcttcccactatttattactgaactattatgttaatgaagatggacattttaggaatcaccaatggctccttgccctcaagcaatataggccagacttggtcctaagcacctgcctcagcaattgtctacattcagttgttttgcataacgtctgccttctttcctttacggtccatgcctttaatgttgcccacattaagcactgtggatcacgacaggaaaaaggttggagcagtgcttttcactactttgtatcaatccaggctacaatcttcatttaatataaataatttatggatttatgacattacaatcctgcattgtttcaagactgacattttttcctaaggaaggaaataatcatctaagaccacgaaaaaaggctgttttttgtttttttttttttttttttttttgagacggggtctggctgtgttgccctgactggagttcagtggtgcaaacacagctctctccacaacctcttgggcccaagtgatactcccacctctgccttacaaaatacagggattactggtgtgagccactgtgtctggccagaaaaggcatttttgagaaagcaaatcgtataccttattaacaaaatagaatatatatatattgcttatctgaaatgcttgaaa

SEQ ID NO: 15762 - DNA, 36925 bp, Homo sapiens
gcggcctccatctaagatctcttccccttgtccatagcctagatcgagctccctgtgtgcaccgcgcgctgcccgaggcgcgtaagtgggggaggagagcggcttcccccggggtggttctagccgtgggtgtggagcgtgggaaggctcagcttccgggtcgagaacctggggctgcggtggacctgatcctgaggtctcagcgtagagatgctgagtccagaggcctgttctagttcaccagtgcagtgaggggctcagtatccgggcctcccgagaggtgggtaggaaggcggggtacaggaaacttggcaccaacgcgccgggaccccaccgcggtgcggacagccaggtgtccgtggtggcgcttccttggagatgctgcctgcagacaggcgtggggaatctgaagtttgtgttaatagctaaacgaagttgagttgcagggagcgggggacgctgggaagaaatgattgatttaaaaggaatttgacgccgggcatggtggcggcatgcccccatgttccctggaggtcaagcctgcagtgagccgagatcgcacccgtaccacgacactccgtcccgggcgacagagcgagaccctgtcacgggggaaaaaataaaaataaaaatttgacgctcactttagctgagtattgagccttgttataacattgagatagaggtctggcgcggcgtctcacacctgtaatcccagaactttggaaggccgatgcgggaggatcgcttgaggccaggagttctacgccagcctggctaacatagcgaaaccccgtctctactaaaaatacaaaactaggcaggcctggtggcgggcgcctgtaatccccgctactcgggaggcggaggcatgagaatcgcttgaacccagtaggcaggtgtgccggtaagccgacatcgcaccactgcactccagcctgggggacagagcgagaatccatccaaaaaaaaaaaagttataattcacgtacaattaaattcactcccttttttaaaaaaaagtggagacatagtctcgctctgttgcccaggctggagtacagtggcgccgtctcggctcactgcaacgtccgcctcctgggttcaagcgattctttgcttcagcctctcaagtagctggaattacaggcgcataccaccacacccagctactttgtatttttcaccatgttggttaggctggtctcgaactcctcgcccttccaaagttcagggattacaggtgtgagccaccacacccagtctaaattcacccttttaaagtgtgcaattcagtggttttaatatattcacaaggttgtgcaatcaccactattatctaattccagaacatttttatcatccctaaaagaaaccttaaaaccattagcagacacccattatttcctcctactcccagcagcactaatctatgaatttacccattctcagtactgtattatacaatatttgttcttttgtgtttggtttatttcacttcatgattcaaagtccatctatgttgtatgtagcatgtatcaacttcattttttaaataactgaattatttattgtgtggatataccacattttgtttctccatttttgatggatactggtgattttctaggctttctaggtctagtcctccacagaactcgcagtctgaggcacagacatttaaaacttaagtttttggaaactagcatttaactcttgggttgggtcaggtaattcagtggcctcaggtctggtatcgtttagggcagttttttttttgttttttttttttttttgagatgaagtttcactcttgttgcccagggtggagtgcaatggcgtatctgggctcactgcaacctcacctcctgggttcaagcgcttctcctatctcagcctcctcggtaactgggcttacaggcgcatgccactatgcccggctaatttttggtatttttagtagagacagggtttcaccatgttggccatgctggtctcgaactcctgacctcaggtgatccacccatctcggcctcccaaagtgctgggattacaggtgtgagccaccgcgcctgggtgggagttttgtttttttgtttgtctgttgttttttggggggacagagtttctctcagcctcctcggtaactgggcttacaggcgcatgccactatgccaggctaatttttggtatttttagtagagacagggtttcaccgtgttggcaatgctggtctcaaactcctgacctcaggtgatccacccgcctcggcctcccaaagtgctgggattacaggtgtgagccaccacacctgggcgggagttttgtttttttgtttgtctgttgtttttttggggggacagagtttcgctcttgttgcccaggctggactgcagtggcgagatcttgactcactgccacttctgcctcctggattcaagcgattctcctgcctcagcctcccgagtagctgggattacaggtgtgcaccaccacacccggctaattttgtatttttagtagagaaggggtttctccatgttggttacgctggtctcgaactccctacctcaggtgatcctcccgccttggcctcccaaagtgttgggattacaggcgtgagccactgcgcccctctgggagtgttttttaaagtgttctattctcagttcaccacttaccaggccgttaattatcgtggtatcaagcagagaaatgtttgtgtgctggtcttctcagggaggcagaaaccgtcagagattgctgttgtgtaatgtacaccaaaacgtgttatcttgtagtataaacggtgtagttggagatgagtgtatgaaaaatgtaactgagctagctgtgggagagactagttgtgaaaaattttgagtcacccactgtatgctttcccagctatgttcaaataaggtgacactctgccttcctgtttcagctctaaaactgttcataagtgttattttggctgtatacgtagtgccatgtttttttgtatttttgtgcttttggtgattttgctgtttataggggcctccaagaatagaagtgctgtctagcatttccaagttgaaggctgtgatatatcttatagagaaaagataagcttttagattagctttgttcaggcatcacttttgttgttggctgtgagttcatgttactgcatcaacaatatatattaaataagatatctttaaacagaagcacacataaaacaaggttatgtattggcctgttgagtaaccctgtatttcccctgggagcagtggctcagtatttgctagttcagtgttcatgatggctttacaggacataactaccctgaataatgagaactgactgtctcagtagtgcttcaagggcagaaagcctagtggatatttttccatctctgcagcttttagcatttcttcactcaaggcactcatttttaatattgaactggcagttttgatgtggagagaagctaaaataaggctaaaatgctcttcatactatgtgctgagtggggactgtgctgagtgttggggattcagtgattagtgtatggccccgcagttctctaatggctgagtgtgggagtgcagagaaatgatcagtgtgagggaattaatcctatgttcccaccgtgtttttttgttttttttgagacggagtttcactcttgtcgcccaggctggagtgcggtggcgtgatctcggctcactgcaacctccgtctcccaggttcaagcgattctcctgcctcaacctcccgagtagctgggattacaggtacccgccaccgtgcccagctaatttttgtatttttagtagagacggagtttcaccatgttggccgggctggtctcgaactcctgacctcatgatctgcctgcctcggcctcccaaagtgctgggattactgggttcccacaaattttaagacttacttcaggccaggtgtggtggcttatgcctgtaatcccagcattttgggaggccgaggtgggcagatcacctgaggtcaggagttcgagaccagcctggccaacatggtgaaacccctgcctctactaaaagtacagaaaattagctgggtgtggtcgcgcatgcctgtagttccagctactcaggaggctgaggcaccagaatcacttgaacctgggaggtggaggttgcagtgagctgagattgcgccactgtactccagcctgggcaacagagtgtctccccctcaaaaaaaaaaagacatacttcagagtgtggtgagctgcataaggctttagaggtaatgacattttgagatttcaattaaaaattttttttctactttttttttttgagacagagtctcactcttgctcaggctagagtgcagtggtgcgatcttggctcactgcaaccttcgcctcctggattcaagcgattcttgtgccttagcctcctgaggagctgagattacaggcacctgccaccatgcccagctaatttttgtatctttagtagagaagaggtttcatcatgttagccgggctggtcttgaactcctgacctcaggtgatctgtctgcattggccttccaaagtgctgagattacagatgtgagccaccgtgcctggccactttttttctacttttgctaatttttttaaagtttcatgaacattatagtactgtgttcataaatgaaaataaaagaaacttgctccagtcttgttcatcaagccgttcttgaccttcacagtcagaatctcacccatcaccttgtcacatctccctcttgatctgtatatccagagtccacctgacatgcttcttcagccctccacatataataagaaatggttttgtgagccgagattgtgccattgcactgcagcttgggcaacagtgtgagactcctcaaaaaaaaaaaaaaagaaagaaaaatgcttttaggtgataaggaaatggagaagaataaaacatctttgccagtctttacctttttaatatcttgaattcatgatttcttgccatagccactatcctagtccaggctctctcccttctacccctgagttttttttttttttttttttaccatgtttttatttcctctgggaaaacacctatcagaattttgggatcatatgacagatacatatttaatttctttctttcttttttgagacagggtcttcctctgttgcccaggctggagtgtagtggtatgatcatggctcactgcagccttgaccccttcctcgcccccgctcaagtgatcctcccaccacagcttcctgagtagctgggactgccggcatgctccaccatgcccgactaacgttttgctgcttgtagagacagccatgttccctaggcttgtcttgaactcctgagcctcaagcgatccttccacttcagcctcaagtgctgggattacaggcgtgagccaccactcctggctacttaatttctttctttctttttttttgagacagtctcgttctgtcacccaggctggagtgcagtggggtgatctcttctcactgcagcctctaccttccaggctgaagcaagccttccacctcagccccctgagtagctaggactacgggaacattccaccaggcccagctaatttttgtattttttgtagagatggagtttcatgatgttggccaggctggtcttgaactcctcacctcatgcaatccgcctgcctcagcctcccaaagtgctgggattacaggtgtgagcaactgcacccagcgggccccgcccagacctattttcaaaattagaaaaccgtgaggcttctggaagaagatgagaagaatatcttcatgacctgagtgtgtgcaaaggtttcttagggctcaggatgccagagtcacttaaaaaagcaaaaaaaacccaaaaaaaaaaccacacacacaaagataaatatgattgattacatcaaaatgtaatcacagactactctaagaaaatgaatggggaaacacagggacctatttgacaaaagactgatattcaagataaataaagaactaataggccaggcgcggtggctcacgtctgtaatcctggcactttgggaggccgaggcggggggatcacttgagctcaggagttcgagaccagcctgagcaatatagtgaaaccccatctctactaaaaatacaagaattagaattagctgggcgtgatggcacgtgcctgtagtcccagttactcgggaggctgaggctggagaattgcttcagtcaggaagatggaggttgcagtgagccgagattgtgccactgcactccagcctgggcgactgaacaagacttcgtctcaaaaaaccagtagggctccaggcctgggattgggcctctgctgctctactccctggacgtgtggctccgtccttggagtcggcctttggttttcatgaagagtagtgtgcattaacagctgagtggttttatcagcctgtttcctgccaacagtgtatgagagttccagttgctttacatccttgccagcatttggtgttgtcagtcttttgagttattctgatgggtgtggtgtgtcatggtcttaattttagtcctcagtcactaatggtgtttagcactttttcctgtgcccatgacaatgtgcatcttcctttgtgaagtgcctgctcaaatcttttgcccattttacattgggttgtgtgtctttttattattgagttgtagcagttatttatataacctttatatcctggttacctgtcctctgtctggttgcctattcattttcttagagttgtctgatgaacagaagttttacattttgatgtaatcagttttctcttatattttcttttatagttactgctttctgagtcctaggaaatcttggctaccttcaggctgtgaagataatctttcatgttttcttctgtaagttttttttttttttgagacagagtcttgctctgtcgtccaggctggagtgcggtgatggcgatctccgctcactgcaacctctgcctcccaggttcaagcgattctcctgccccagcctcccgagtagctgggattacagacatgcgccaccatgcccaactaatttttgtatttttattagagacagggtttcaccaggttggccaggttggtcttgaactcttgaccttgtgatccacccgcctcggtctcccaacatgctgggattataggcgtgagccaccgtgcccggcctataaattttatagttttagttttatgtttaagcctatcacccatttctagtttaggtgaatggtgtgagatataattaaatattaatttcttttccatatagatatccagtcattccagcaccatttgttgaaaatgctattgtattgcgttttggaaattaagatgactgtacaaatggtaattgatgtctgcactcccttttctgttccattgttcaatccttgtgttagtaccacacttttaattactgtagctttttagtaagtcttgaagtcatgtagttgtaggtcttccaattttgttgttttcaagcttgatgtgaatattctaaatcctctgcatttccatataaatatcagaattatctttaccagttttacagaaaagtctggtaaagttgtgattgggattgcattgaatctatggatcaatttggaaagaaatgacacctaaacagtattgagtcttcaaatatatgaacttggtgcattttccttcttatttaagccttttaaaatttctttttaggccgggtgcagtggcttatgcctgtaatcccagcactttgggagtctgcagcgggcagatcagctgaggtcaggagttcgagaccagcctggccaacatggtgaaaccccgtctctactaaaaatacaaaaattagccaggtgtggtggcaggtgcctgtagtctcagctacttgggaggctgaggcaggagaactgcttgaacttgctcaggaggtggaggttgcagtgagctgagatagtgccattgcactccagcctgggcaacaagagcaaaactctgtctcaaaaaataataataataaaaataaaaattttgggccaggtgtggcggctcacacctgtaatcccagcaatttgggaggctgagccgggtggatcacctgaggtcaggagtttgagaccagcctgaccaacatggagaaaccctgtctctacgaaaaatacaaaatttgccaggcatggtggcgcatgcctgtaatcccagctactctggaggctgaggcaggagaatcacttgaacctgggaggcagaggttgcagtgagccgagatggtgccattgcactccagcctgggcaacaagagtgaaactctgtctcaaaaaaaaaaaattcttttagttctgttttatggttttcagttcagaagtcttatacatattttgttaaattgatttctagatatgtttcttacctttattgtaaaatggagccatcatttgcatcattcattactctgtatgtaatgtgttatcattctctacctgctttcaagattttctctttatttttgttttttagcagtttgtctgtggtgtatctaggtgtcattttatttgtatttatccggagatttattcttgagatttgcagagcttcttaaatctgtaaatttatgtctgtcggccaatttgggaaatttggagctattagttttaaaaatatttcttctgttccattctctttcacttcttctgtatgtgagttcaatttcacttcaattgtatgtgagttagacattttgatattagcccacaggatcctgaggttctttcattcttttcaatcttttttttttctcgaagtttgcatttcgtgagcaggagtgacagtcattcaggatgatttttgagattcctagttcaagagtagttcctattcttttctaggtgtagtcaagtatggcttctaattctactagaaggcttttttgtcggggaggtggttctatgtcctttggctcttacattttctttgtgtctttcacagcacagttttcagagggtaccctttctctttggttttgttttgttttgttttgttttagacggagtcttgctctgtctccaggctggagtgcagtggcgcaatcttggctcactgcaacctctgctcactgctacctctgcctcccgggttcaagcaattctcctgcctcagcttcctgagtagctgggactacaggcacgcgccaccacacccaactaatttttgtatttttagtagagactgggtttcatcatgttggcaaggctgttctccatctcttgacctcgtgatccgcccgccttggcctcccaaagtgctaggattacaggcgtgagccaccgcgcccggccaacagagggtaccctttcattctttttctccttcttcccagaaggcttgcgttttcaagactacctcatcaagttctgcatgtgtttaaaagtgtctctacccgaccttcccttcctccctcccgatttaacggaattctttgttggtgttttcatacttaccgtgagttttctttttcagggtgatattttagttccatcttaggctctccattgtcctcttctctcttctttttttttttgagacagagtctcattctgtcacccaggctggagtgcagtggtgtgatctctgctcactgcaacctctgcctcccaggttcaagtgattctcctgcctcagcctcccgaatagctgggattacaggcgcacacaaccacgcccacctaatttttgtattttcagtagagacggggtttcaccatcttggccaggctggtctcaaactcctgacctcgtgatccgcctgcctcagcttcccagagtgctgggattacaggcatgagccaccgcgcccggtgcgcccagccctcttctctcttctttgcatctctcttcctatctggatccctctttgctgtccttaaagagctgagatgagagattgagaaacatctctacaagaaattgacgtttttctacttatgggtaattagaagcttgtagtattttcagtcttctaagtatgttgaagatatgagacgttggtgattttctttgtttctccggttggttggtctgtgtagtttttggacatgtgtttggatatttggatttatatagctgccataatcttggctatgcaggtagtctttcctgacacttcatcctgaaagatttgaagcctttggacaaattttacagtgggctgggtgcagtggctcacgtctgtaatcccagtgctttgggaggctgggcaggaagattgcttgagcccaggagtttgagaccagcctggacaacatagtgagacccgtgtctctacaaaaaataaaaaatatgccgtgtgtggcgttatacaactgtagtcccagctacttaggaggctgaggtgggaagatcacgagccaaggagtttgagggtacggtgagccatgatcgcctcactgcactgggtggcacagcgagactgtctcaaaaaaaaaatttacaattaatgtctgcatatccttcacctaggttcataaatttgtacttttgctttatctacttgcctttttctctctctctacacacacacacacacacacacacacacacacaattagttgaatgaattgagagtaagttgcagaaaacatgacactttactccaatattgcatcatacaaaatcatacatctagtgataggccattgtcctacagaatcacgatataattatcacactaaccagctgtggtggtgcacacctgtagtctaagctactcgggaggctgaggcagaaggatcacctgagcccaggaggttgtggctgcagtctcatattcatcccatcatcagatttctcccattgtcctaataatattctttatagcttttctttatccctgatccgaaatttcattgaagatcacacagtgcatttagttgtcatgcctcttaagtctttatttatttattatttattttttgagatggagtcttgctctgttacccaaactggagtgcagtggcatgatcttggctcatgcaacctccacccgctgggttcaagtgattatcctgcttcagcctcccgtgttgctgggactacaggtgtgtgccaccatgcccagctactttttatatttttagtagagacgggaattgtaccatgttggccaggctggtcttgaactcctgagctcagatgatccacccgccttggcctcccaaagtgctgggattacaggcgtgggccaccacacccagccttaagcctcttttaacataaaagagttcaccagccattctattttgttttgctttttgagacactgatgctttggagagtccaggccagttgctttgtagatttcaacttgtttgattgtttcctgatgattaggttggtagaaatactacctcaatgatgggaccttcttagtgcgtccatcaggaagcacatgatgtgactgtaattggtgacattaagtttgattccttaataattaaggtggtaactcccaggtttctacattgtaaaggcatcttttgccgccctcctttttattcccaagtagtttatttggagattagtcctttacacagtagaggagcggggaagggagacaggaaaggaaagtttgacaacaaagggtgagttttcaagcctgttgccacgggggaacctaattccactggagaagctcatggcttggtgatgttccacagaggggtcagaaatttagcgtatttcaacaccagctcctgtcaggcaccatttgagggctgctgccagggtggttcaattttctggtgcttacagcttgccataaacaggtgcaaagtagtctggataccaaagaaagctctcaggtaacaagatgcagatgttggcatttggaagtcagaatagggtgcactattgtggtaagagctgaagggatggctgggcgcggtggctcacacctgtagtcccagcactttgggaggatgaggcaggcggatcacctgaggtcagaagttcgagagcagcctggccaacatgacgaaaccccgtctctactaaaaatacaaaaattagccaggcgtggtggtggatgcctgtaatcccagctattcagtaggctgaggcaggagaattgcttgaatctgggaggtgtaggttgcagtgagctgagatcacaccactctgcactccagcctgggtgacagagcgagactctgtctcagaaaaaaaaaaaagctgaagggatgctgagtagagcatccgtagtgtctgctatacctgggtaccctagaacctggagaacctacagcttgaggcaagagcgtatgtgctattattttttcaagaagtgtgctctcaggaagcagaggtaggggaaaggtgagtgaagggagaaggaagattaagtcagttcaagggtgcattttgaagttggttgcccttggtgcaagtacagttggttgcttgttctcctaaagctgtctcccaggaggatgtatacataactgcattccagggcaatccatctaaaggaagggtggacggacccctcagcttctgtatctcactggaaaaaggtttgcttcatggcacattaattcccatagacttctaggttgtgcatgtgtgggtaccaggtgggtcccacagacccttacacctccaaggcaagcagcaagccacgggtgggaagtgataggtacccagtatgagcaggaggtaagggaccgtggggttgtgcctgtgggcagttggttataacccagacgtgtttgatcagcccagtgacagctggagtggacaaagtgaccaagggcctcaaggacacacaaggccaagaagatttgaagtgctgtgtaagatatgcctaatgcatttggattctacctttgtttaacgaatatgcacacataaaaaacacttgaactccttgagcccaggagttcaagaccaacctgggcaacatagtgagacactcatctctaaaaaaattttaaaaaaaattaacctggcatgatagcactcacctgtagtcctgtctactctggaggccgcagtgggaggatcacctgagccctggaggtcaaggttacagtatgctatgattgcaccactgcattccagcctgggtaacagagcaagacgctgtctcttaaattttttttttttttttttttacttttataatggaaaaaccattgtagacagttttaggaaggaaagcagaatagtaagacatctttttcaaagtaaaagagcaaaaaaggcaaaaaatatttcacatttactttatggacaaagataagattgtccttcaataaaagactgaattttttttgtttgttttgttttgttttttgagaaagagtcttgctccattgcccaggctggaatgcagtggtgtggtctcggctcactgcaacctccgcctcccgggtacaagcaattctccagcctcagccccccgagtagctgggactacaggcacgcgccactgcatctggctaagttttgtatttttagtagagatggggtttcaccatgttgaccaggctcgtcttgaactcctgacctcaggttatccacctgcctgggcctcccaaagtgctgggattacaagtgtgagccaccgtgcccggccacaagttgctctttaaatgtgagaagtgttctggcatggtggctcacacctgaggcgggtggatcacttgaggtcaggagttcgagatcaggctggccaacatggtgaaaccccgtctctagttatttatttatttatttatttatttatttatttatttatttttttgagacggagtttcactcttgtttcccaggcgggagtgcaatggcgcaatctcggctcactgcaacctccgccttccgggttcaagcgattctcttgcctcagcctcctgagtagctgggattacaggcatgcaccaccacacccggctaattttgtatttttagtagagacggggtttttccatgttggtcaggctggtctcgaattcctgacctcaggtgatctgccctcctcagcctcccgaagtgttgggattacaggcgtgagccaccacgcccggccctgtctctactaaaaatgcaaaatttagccgggcatggtggcgcacacctgtaatctcagctactcaggagactgaagcagcagattcgcttgaacccaggaggtgaaggttgcagtgagctgagaccacaccactgcagggcagcctaggcgacaagagcgaaacgcttacaaaaaaaaaaaaaaaaaaagattcacaggtgatggtgatgctgctggttaaggaagtgaagtggctttttgctctgtagccttcctgaatgttggggcctcctgctcttcatttgtttcatttctattaagtctcctccctccagctatcttgttagctcctggaaagcatttcagtgattgtggcttctatttctttttgaccccacagtgtccagggtcatgctgcctatatagtagtgagcagtaagttgaggtttttaaaaactttattattattatttttgagatggagtcttgttctgtcacccaggctggagtgcagtggcacaatctcagttcactgcaacctctgcctcccaagttcaagtgattctcctgcctcagcctcccgagtagctgggactacaggcgcctgccaccacatccggctaatttttttgtatttttagtacagatggggtttcactatgttggtcaggctgatctcgaactcctgacctcaggtgatccgcctgctttggcctcccaaagtgttagggttacaggtgtgagccaccacacctggccggtttttttaaactttaaaacagattcacttgatttttcttccctaccccccagcttttttgaggtatgactgacaaaaattgtatatatttagggtgtacaatgtgatgatttgatatgtgaatgcactgtgaaatgattaccacagtcaaggtaattcacatatccaccacctcccagttaccctcttagctagtacaggttgggtattgcttctctgaaatgctttgggaccagaagtgttttggacttcagattttggaatatttgaatatatataatcagatatcttgggaaggggacccaagtctaaacatgaaattcatttgttttcagagcctaaagatgatttttttttttttttttttttgagatggagtctcactctcgcccaggctggagtgccgtggcacaatctcagctcactgcaacctctgcctcccaggttcaagcgattctcctacctcagcctcccaagtagctggaattacaggctcgcactaccacacccggctaatttttgtatttttataaagacatttcaccatgttggccaggctggtctcaaactcctgacctcaggtgatccgcccgcctcagcctcccaaagtgctgggattataggtgtcagtgactgcgtctggctgataattgaatttttctcttggagaagctgaataaactgtgtgttgtgtgcctgcctttttttttgtttttttttttttttgagacagagtcagacactctgtcacccaggctggagtgcgatggggtggtcatagctcactgcagcctcaaactcctgagctcaagcgatcctcccacatcagcctcctaagtagcatagcaccacgcctggctaatttttaaattttttgtagtgatggggttttgttgtctaggctagtctcaaactcctgggctcaagcagtccttctgccttggcctcccaaggtggtaggattataggtttgagccaccatgcctggccattacctgtgttttgactataacacatcatgttggcactcaaaacgttttggattttggagcattttgaattttggatttttggattagcaatgttccacctatagtacattttttgtttgctttcccataaagaattttttgtaattttgattttatagttctaaatgtaatatattcttattgtaaaaatcacctttaatagcaccgccagaatagcaaacatgttaacagaaaggtagaagtagaccttaaagaatcttcagcagcttgagagaccacagctaaccactgaggaactctgttctggattggagcagtgcttagaagcttataaataactcttagggtattgcatagggattctttttttttttttttcctgaaatggagtctcgctctgtcgcccaggctggagtgcagggtgtgatctcagatcactgcaacctccgcctcctgggttcaagcaattctttgcctcagcctcccgagtagctgggattacaggcgcctgccaccatgcccagctaatttttttggatttttagtagagagggggtttcaccatgttagccaggatggtctccatctcctgaccttgtgatccacccacctcggcctcccaaagtgctgggattacaggcatgagccactgtgcctggccgcataaggattctttatgtgatttttcagtagaggctcttgccttttactttaaacattctttgagggttgttttttttttccgctttttatttatatagaggtcaaccagaatcaagatgtctgggactgaggaagcaattcttggaggacgtgacagccatcctgctgctggcggcggctcagtgttatgctttggacaggtaactgtggttccttcatgccgggaaagaatgaggtgaagtgagtaaagttagggcaaggcagtttgtagagcatcgtagtacatgtgtgagcagtacctagtacgtttacctagtacgtgtgtgagcagtacctagtacgtttacctagtacgtgtgtgagcagtacctagtacgttgacgcggtgcgtgcgggggcagtacctagtacgtttacatagtacatgtgtgagctatttgttattggtttttcctttagatgcattttttgggagtcttgtgaactctggagggcattttggaatgttagctatcaaaagactgatagtactggggattagatttagattttaaattttttgtggggggggatagataacatatttgtatgacatcaaattcaaaatgaaactgtgaaaatctccctatttcctattgcccctgtgtgcatgccacccagttctatttcttttttttttcgagactgagtcttgctttgtcacccaggctgcagtgcagtggtgcgatctcagctcactgcaacttccaccctctggattcaagcaattctcctgcctcagcctcccaagtagctgggataacaggcatgcaccaccatggccagctaatttttatatttttagtagagatggggtttaaccatgttggccaggctggtctcgaactcctgacctcaggtgatccgcctgcctcggcctcccaaagtgtttggattacaggcgtgagccaccacgcccgggcttaatttttttgtatttttagtagagatgtggtttcaccatgttggccagggtagtcttgaactcctgacctcgtgatctgcctgcctcggcctcctaaatgctggaattacaggcatgagccaccgcgcctggctccagttgtctttcttggaggcatggaaagttactgggggtcctattccttgtagggacattgtgtgcacagaaaagagtttcttgctttgtccacccaaactccatctttgtctttagcagagagttgtgagtattcatctcatctgagcagggcaagggggacaaaacccaaatcagcaagcagtagtgtgtttctgtttgtgcaggatgggaaattgttgtattggagaaggcgtcaatctctggaaaggacaaatggaagcaaggcttcctacccccgtgctctttccgtacttgcttcctgtgctgacgtcatttacagatctggaggcagaacattttagcttcctaagcttcagaaacatttataaggatggtagcagcagctaaggcagcagttctcaaaatgcagttctcaaaaaccctggggtttctgaagatctttcagagtccagaaggtcaaaattatcttcataataatactatttgcctctttcacactcattgtctcatgagtgaatggtagagttttcagagagtgcatgatatgtggtgatgtcactgctatgatgcctaatggcatgcatgccttaaaagtttctcagttttgattcctaataggatacatagaacccacataaacaaaggttctggggggtctttttaagagtataaagtctccataaaggatggagactcaatgatgtgaggaatggtggaagtgtgaatttaattttcttttttggggttgcagtgccagtacacagcagaagagtaccaggccatccagaaggccctgaggcagaggctgggcccagaatacataagtagccgcatggctggcggaggccagaaggtaggagaattcatgtgcctggaaagcaggcatccataccgcagactccgatggtcttgccagttccctctctgggtcctcagggattcggaagtctgctgttaactgttcctggaggtctcccagtgcccctgggaggggatgggttccagacttcattctcatccgaaggggcctgggcatggtcttgacactcgcataaccgccgtcttaagatttttacatcatctttttttttttttatttttaaagacagggtcttgctctgtcacctaggctggagtccgaccagtggtgtcatctcagctcactgcagcctccacctcccaggctcaagcgatcctcctgcctcagcttcctgactagctgggactacaggcacacgccaccacacctggttaattttttaatgttctgtagagacgacatctcgccatgttgcccaggctgatctcgaactgctgggctcaagtgatcctcccacctcggcctcccaaagtgctgggattacaggtgtgggccaccatgcccagcctttacaccattaaaaaaaaaatgttccttttgccatttgctttttttttttaattaaacactttttaaagaacttatgattgacacataataattgcatatcatttgcttctaattttaacttctgtgtatatttttggtcttccataaaatatgtcaaacagatttgtactttttgcaaactgaattttagcaactgctgggtgagttcctcctcccaacagaccattcgttctcgcgggctccatctagaagatttttgaaataaattcattgagaattttcttgaaaaaaaaattttttttaacagactggttctcactctgtcacttaggctggagtgcagtggcacgatcctagcttactgcagccttgagctcctgggctcaagtgatcctcccacctcagcctcccgagaagaatgtttaaggacagtttatcgaaaaaagtagatgaggaataaattatgtcaattttgattcacatttaagtgtggtaaggaattaacacagcttttccttaaaaacatttgtttttctaggtgtgctacattgagggtcatcgggtaattaatctggccaatgagatgtttggttacaatggctgggcacactccatcacgcagcagaatgtgggtgagtatgctctccagcagtggggacttctgcactgtccagctcctgctgaaagtctgctgtgggtgaggaggtaaggtaggtggactcagctgccagcaggaggaatggttgtggcccagcggtcagtgtcctcttcaacttgctctctttcccactcctagattttgttgacctcaacaatggcaagttctacgtgggagtctgtgcatttgtgagggtccagctgaaggtgaggggatggagtagacctgctgcccggaaggatcagtgggtggtaggagaaggtgagcaggtagggaagtaggtagctggacggggacccaggctccagagttgtgtctcagccagcgttccctagagtggtggaattcaaatactcttgctcatgtgctccctaaaagaatggaaaaactgttctcttgcacatgttcaagctgacacctaaaagttttcaccatatataaaaattgttgcaaaggatgtattttttggcatatggtaaaatctgacattttaaaatacaataattttaccatcactgataagtgtttggaaactcaactttaggcaaagcaggtccttttgttataacattgatgaaaacaaaaatatgttttgttaataagttgtttcacttcaagtcacagttatttaaggtgttaagtgagcacttaccgtaaatctgttgaatcttgttaaatattccagtggactctaaatactatagaggataagatctatcatttatttgaagaaatacaatgaacaagcttttttttaatcattagaaattttacattgttctttctttatctgaactcatatttctattctatttccccactggttttaatcctaatacatatttatggttgaaagtttggctaggcggggtggctcattcgtgtaaccccagcactttgggaggcccaggtggaaggactgcttgagcccagggatttgagaccagcctgggcaacatagcgaaagcccgtctctactaaaaatacaaaaaattagctgggcatggtggtgtatgcttgtagtcctagctactcaagaggctgaggtgggaggatcacctgagcccaggaagtcgaggctgtggtgagctgtgattgcgccactgaactcctgggtggaaaaaaagaaaagttttatcggtagccttactgtgcttctctgcctttgcctgtgtataaaaataaaaatttttggtaaattttcagtgcacttaaggctctaaatattaaaatatttcttttggatttagttatattatagctactgttaacacacaattgaccagacaattgtgtttatggtgaagagaaaacataaatacagcaaaattttgatacttagaaaaattaaagatatgaaatcttgccacaaaaataaaaaatttaaaatataaaatttatggaaaatgtatatcttaatgagatggatggtgctgttttttcttttcagttagtttatatatccatatatccataactgaatattacttacttcttttttttttttgagatggagttttgctcttgttgcccaggctggagggcaatggttcaatctcagctcaccgcaacctccacctcctgggttcaagcgattctcctgcctcagcctcccaagtagctgggattacaggcatgcgccaccccgcccgcctaattttttgtgtgtgttttcagtagagacgcggtttctccatgttggtcaggctggtctggaactcacaacctcaggtgatccacccgccttggcctccaaaagtgctgggattacaggcgtgagccaccgcacccggcctacttatttcttgaatgaacaattcagcattaattctattctgacttatttttctaaatagtactaaaaaatcttgtatctatgagtgagtagctgagaatggaaagaattgtgttatagtgtcactcatttatttgagtgctttctgagttattttttaaaaatcacagagcgctgtcatcaaacattgtatttaattctcaatcagcgaatgatgtgctcaggtccaccttctcttttggtgagaggcaggagctggacgccacctgatttacaaagggtttgctctcccgtccttacagaccattagatccagtgttcaaatcatccctttgtttcatatcccagaggtttttttttttccaagacgtagtctcactctatcacccaggctggagtgcagtggtgcaatctcggctcactgcaacctctgcctcccaggttcaagtgattctcctgcctcagtctcctgagtagctgggattacaggtgcccaccaccacacccggctaatttttgtatttttagtagagatagggtttcaccatgttgaccaggctggtcttgaactcctgacctcaagtgatccacctcccttgacctcccaaagggctgggattacagcgtgagccaccacgcccggcccggccatcccagaggttttttttaccttagggtgatgcacactgataggatttggggtgagtttctaatgtgccctttgtgtgttgggaagttgggaagggaggatcgtcttgacaccttgaccgcaggcacatgtccaggcagcccaggtctaggaagcagcactcgcgatggattctcacccagccttctgcccgtgcccctgtagcaaggccgccaggtgggagagtccggctttgaaccctgctgcttgaggaacaggggagttgtggcacgcctgccgctctcgtgtttgagttcaaactccttttctgcccccaggatggttcatatcatgaagatgttggttatggtgttagtgagggcctcaagtccaaggctttatctttggagaaggcaaggaaggaggcggtgacagacgggctgaagcgagccctcaggtgagcgcggggctgggagtctaacctgcgtcatttcagctcttgcttcagagcagatttcgattttttttggaagaggtaacacatccacatggttcaaaaatccaagcagcgtggaaggtaattctcacccctgccctggttcctgtctgccgttttcccactttcgttagtattttttcaatgtttctgtttcaggcttcccttgctgggagtaagtggtagaatcctgtactctctcttctccgtgcactcagtcatgtgtgccggaggccttcccactcctactgcgagtgcacagacagcaccctcctctccgtgctcctcagcagtcctccgctacgcacaggtagcatagttaacgtagttacacagtcacgcagatgtccgtgttagtccatttatgttgctatacaggaataccagaggctgggtaatttataaataaaggaggtttgattggcttatgattctgtggactgtactggaagcctggtgccagcatccacttctgctgaggcctcaggaagcttctaatcatggcagaaggtgaagagggaacgtggagagagagggagcaagagagagaaggaaggagtcccaggcttatttatttattttattgttgtttttcattttttgagacagggtcttgctctgttgcacaggctggggtgcagtggtgccgtcatcgctcagtgcagccttgaactcctgggctgaagtgatcttcccgcctcagcctcccgagtagctgggatcacaggcacataacaccacccccagttaattaaaaaaaaatttttttttttttggagagacagggtctccctttgttgcctaggctggtctcaaactcctgggctcaagtcatcctcctgccttgtgcctcccaaagtgccgggatcacaggcatgagccatcatgcccagcccccacactcaaaaccaccagatctctcatgagctgagtgagaactcactcaacaccaaggggatggcactaagctgtttatgaggaatccagccccaggatccagtacctcccaccaggccgcaccccccggcattggaggtcacgtttcaacatgaaatttggaggggataaacatccaaaccatatccgtgtctttgagaattgaagtgaattgaaccagaaaaacctatgagttctgtgggggagtccgtagatcccaagttaagaactctggtcatgggaggttgtgcccttgagcccccggtccccaagtgtgtgttgcctactcctgctgggaaattggagcagcctttggggggaaaaaaaagaaaaactctctgcagtttgttctccatgtcaggaggtggctggtgggttttgtgaatggcgccgtaatcttttcatactcatcttctctgtgagggcagggacttgtgtcttgtcctcactgcagtattctcagaaactaacacagtgcaggaacatgctagatgcttaccagacatcaatggggaatgcatgttagggtccacttcctctgctgctcctgagaagcaacctgtacaaaagttgtaattctattctctgatattcatgtgtaacaattcttaaccctgtttcacctttttttctcttgcccttaggagttttgggaatgcacttggaaactgtattctggacaaagactacctgagatcactaaataagcttccacgccaggtatatcagacatggatgagtggagtgaagataatgcggcaaactcttgtgtgtcatgggttgagtatttggaggatgcaaggagaaaaagtgaggactcagctctttagagggtcgggaatgttgatttcagatttcgaatgttagagacagcaggaactaatcccaacattttccttttttctaaagtacatcatgtgggccggggaccgtggctcacgcctggaatcccagcactttgggaggtggaggcaggtggatcacaaggtcaggagatcgagaccatcctggctaacacggtgaaaccctgtctctactaaaaatacaaaaaattagccgggcgaggtggtgggcgcctgtagtcccagctactcgggaggctgaggcaggagaatggcgtgaacccgggaggcagagcttgcagtgagccgagatggcaccactgcactccaacctgggcgacagagccagactccgtctccaaaaaaaaaaaaaaaaaaaatcacaccatttgacaagaatgtgaggtctagagaatttgtgtacgtgtaggtagtgaactgtggttgggggtagtctgtgaagcctcaaagcaagcacacagccctctgcagcaccactgtccttcccagacactcccagcctcgctgttgagccttctttcttttccttagttctggtgtcattacatgtctgatgtcattacaatgtcatttacatgtccattatttctgtcaatacctataacgtgatctgagcctttgcctttggagaatggggtctgtggtggggcagccctggagtcacactgccttgccatgagtggcttctggagtgttcctcctgcctcatctgctctccgaggtccctgccatgtcgctccccagggcagcattcccatcctgtgcctgagggattcttgtcctcatggagccccacaaggtgtgtgtcactgggcatctgtaaaaactcctttaaaaaaatcatttttaaacattattggattcagtttgctaatattttgttagacttttttttttgagacggagtctcgctctgtcgcccaggctgaagtgcagtggtgtgatcttggctcactgcaacctctgcctcctgggttccagcgatgctcctgcctcagcctcctgagtagctgggattacaggtgtgtaccaccacgcctggctaatttttgtatttttttagtagagacggggtttcaccatcttggtcaggctggtctcgaattcctgacctcatgattcgcctgcctcggcctcccaaagtgctgagattacaggcgtgagcccccgcgcccggcctttgttaggcatttttgcatctatgtttatgagagatattagtcaagttttctttttctttttttttttttgagatagtctcactctgtcgcccaggctggagtgcagtagtgtgatctcagctcactgcaacctctgcctcccgggttcatgccattctcctgcctcagcctcccaagtcgctgggactacaggtgccagccaccaccatgcccagctaatttttttatttttagtagatggggtttcgtcctgttggccaggctggtcttgaactcctgacctcaagtaatccgcctgcctcggcctccgaaagttttgggatgacaggcgtgagccaccgcacccggccttttctttttttaaattgtagtaaaacacatcacattttaactatttttagtgtgtggtcgagtagtgttaagtgtattcccattgttgtgaaattgatctgcagaactaagaccctgcacccgtaaaacaagaactccgcatttccccctttcccagacccttgtaactacttccactttctttcctttttttttttttttaatttattttatgaaagatgaggtcttgctctgtcagccaggctggaatgcaggagtgccatcataattcactgcatccttgcactcctgggcccaagggatcctcctggatcctcctgcctcagcctctcaggtggctgggactacaggtatgtgccagtgcacctagctaatttattttttaaacaattattactattttttttgtagagacagaatttctcagggctggtcatgaactgctgggctcatgtgatcctcctgcctcggcctcccaaagcgctgggattgcagcgtgggccactgtacctggagccagctaattaactttttttgggggcttttttttttaagaggtgagttcttgctatgttgctgaggctggtcttgatctttttttcttttttaaaaaattaggttaggcgctgtggctcctgcctataatcctagcactttgggaggccgaggtggttagatcacttgagcctaggagtttgagaccaccctggccaacatggtgaaaccctgtctctactaaaaaatacaaaaatcagctgggcatggtggtcagcctgcctgtaatcccggtggtcagcctgcctgtaatcccagctcttctggaggctgaggcatgagaatcgcttgaacctgggaggtggaggctgcagtgagccaagattgcactactgcactccagcctgggagacagagtgagattctgtctcaaaataataataataaaatataaaaataaaatacttttttgtgtgtggtcatggagttttgctattgcccaggctagtctcaaactcctggctacaagcgatcctcccactcagcctccttaagtgctgagattataggtatatgtgtctactttctgtttctgtgaatttgtctactctggatacctcatataaatggaatcacataatttttgctttttgtgactggcttatttcacttagctagcattaatgcctttaagattcatccatgtagtagtgtgtatcagaattcccttctttttgtggctgaatattctgttgtatatatagaccacattttgtttatgcattcatttggtgatggggatttgggttgctttcaacctcttggctattgtgaataatgctgctatgaacgagggtgtgtaactctctttgagatcttgctttcaattcttttagacatattctgaaggggattgctgggtcatggtaatcctatttttaatttttcgaggagctgccacactgattttcatacagttgccccattttaccattccaccaacagggcacatgagttcagatttttctaaatcctaaccagcacttgttattttctgagtttttggttttttttttttttttttttttaagccaacctaatgggcgtgatattttattggggttatgatttgcatacccctgatgattagtgatgttgaccatattttcttttttgagacagaatctcactctgttacccaggctggagtgcagtggcacaatcttggttcactgcaacctctgcctctgggttcaaacaattctcctgtctcagcctcccaagtagctgggactataggcgcctgccaccatgccgggctaatttttgtatttttagtagagatggggtttcaccatgttggtcaggctggtctcgaactcctgacctcaggtgatccgcccgccttggcctcccaaagtgatgggattacaggtgtgagcccccgcacccagccaaccatattttcatatgcttgttggccatctgtttatcgtctttggagagatgtctattcaagtcctttgtcattttattttgttttattattttaatttaatttcttttattcatctcatctcatctcatctcatgacaagatctcgccctgtcacccaggctggaatgcagtggtctgatcatggcttggctccctggagcctcgacatcctgggcttgagtgatcctcccacgcaggctggagggcagtcgtgtgatctcggctcactgcagcctctatatcccagactcaaatgatcctcctgccttagcctcccaagtagctgggactacaggcatttgccaccatgccaggctaatttttttattttttgtacagaatacaaaaaattttaccgtgttgcccaggctggtctcaaactcctggcctcaagtgatccacctgccttggcctcccaaaatgctgggataacaggcgtgagaaacccatatggcccaactcctacttttattgagctttttcgtattgtttttgtattctctctttcacttatgtttgctgtcatctttttagaatttcctttcttctagctttgggtgtaactttttttttctagttctttgaggtatagcgtagatttgagatcttttttttttaactatgtgtgtaacttccctcttacgacttctttccctgcaccccagaagtttggtaggttgtgttgtagtatcatttgtctctgggaattcttctaagttggcttgttacatttcctttgactttaagagtgtggtgtttaatttctactgatttgtggattttccagttttctttttgctgttgatttctagtttcattccattgtgattgaaaagatactttatatgatttcaatcttgaatttgttaggacttgttttgtggcctaacatgtagtctgtcttggagaatgttccatgtgtacttgagaagaatgtattttctgctattggtgggtggaatgttatgtatatgactgttaggtccagttggcctatagtattgttcaaatactctatcgccttattcatcttttgtttggttgttttatctattattgaaagttgagtagtgaagtctcctactattattgtgttgcttttatttcaccttacaatcctctcaaagtttgcttcatatatttaggacctctggtgtttggtgcataaatatttataattgttatatcttcttggtgaattgacattcttttttttttttttgagacggagtctcactctgtcgcccaggctggagtgcagtggcggtgcgatctcagctcactgcaggctctgcctcctgggttcacaccattctcctgcctcagcctcctgagtagctgggactacaggcgcccgccacctacgcccggctaattttttgtatttttagtagagacggggtttcaccatgttagccaggatggtctcgatatcctgacctcgtgatctgcccacctcggcctcccaaaatgctgggattataggtgtgagccactgcacctggctgacattcttatcattatataatactctcgtctcctataacaattttttttttttttttgagacggagtcttgctctgccgcccaggctagagtgcagtggtgcgatcttggctcactgcatcctttgcctcctgggttcaagcagttctcctgcctcagcctcctgagtagctggaactacaggtgcgtgctaccatgcccggctaattttttttttttttgagacagagtttttgctcttgttgcccaggctggggtgcaattgtgtgatctcggctcactgccatctctgcctcccaggttcaggcaattcttctacctcagcctcccaactagctaggactacaggtgtgtgccaccacacccagctaattttttgtattttgtagagagggggtttcaccatgttggtcaggctgatcttggactcttaacctcagatgatccgcccacctcggcctcccaaggtgttgggattacaggcgtgagccaccacgctgagcccagatttttttttttttttttagacagagtcttgctctgtcgcccaggctggagtgcagtggcgctatcttggctcactgcaacctccgcctcccgggttcaagcgattctcgtgcctcagcctcctgagtagctgggactacaggcgcccaccaccacacccaactaatgtttcgtattttttagtagagcggggttttgctgtgttggccaggctggtctcaaactcctgggctcaagtgatcaatccacctgccttggcctcccaaagttctgggattacaggtgtgagccactgagcctggccccaaatttctctttttttgttgttgagacggaatttcactcttgtcaccgaggctggagtgcaatgttgtgatcactgcaacctctgcctcgtgggttcaagcgattctccagcctcagcctcccaagtaactgggattacaggcgcccgccaccatgcccggctaatttttatacttttagtagaaatggggtttcgccatgttggccagggtgatctcaaactcctgacctcaagtgatccacctgcctcagcctcccaaagtgttgggattacaggcatgagccaccatttcctaagtgagcacagctgttcacctcccagatagagaatcagacctttaccagcagcccagaagccccattttgccctcttccagtcactgccttgctttccttttttcaaaagtaactactatcctgtcttctattctgacttccatggattattttttcctgtttttgaactttatatatgtaaagttcacaaatggaattgtactgtaagtggaattgtacagttcatattttaagaaaattgaccgaagtatgaaaaagaacatatagacaggttagacgagtgcacgtatcatccatgctcagcttgatgaattttccaaccaaacacatccacacagccaacatctgaatcaagacactgccagtaccgagaaggcccagctgtgttccttgcagtcactgccatcccctgccctccttcccactctgagcaaaccgcttttaacaacacagattggccgggtgtggtggctcactcctgtaatcccaccacttgagaggccaaggaagaaggattgcttgagcccaagagttggagaccagccaggacaacatagtgggaccctgtctgtacgaaataaaaataaaaataaaaataaaaattagctgggcctggtggtggcgcctgtagtcccagctgcttgggaggctgggctgggagaatcatttgagcctaggaggcccaggctgcagtgagctgtgattacgccactgcactccagcctgggccacagagcgagaccctctctcaaaaaacaaaacaaaaaacaaagaaagccaccaatttgtttttattgttatgtacttttttggaatcctacagtttgaactctttgtatcttacttgaattcagcatggttgtgagattcattcatggtacgagcagcagtttcattgctgtataattttcttttgcatgagtatgtggcaatttatttttctagtcttttcttagtagacattttggtttttgtagcttgtggctgtttcgattagagatgctgttagcattcttttgctgtacagttgcactcatttttgttgggaattattgggggagaagataggtacgtgtttagttttagtaggttcttcccgttttcctgtatggttgtattaattcacaccccacgtggcattgcgtaagttccaattgttctgtatctttgacagcacttggtatcgccagtctttcatatttttcaaagctcgtttcttttttttgagacacagtcttgctctgtcgcccaggctggagtgcggtggtgcgatctccgcccactgcaacctctgtctcccaggtttaagtgattctccctgcctcagcctcccgagtagctgggattgttggtgtgtgccaccatgcccagctaatttttttttttttttttttgtatttttagtagagacaggctgttactcaggagttccttcgattttttttttttgtatttttgtatttttgccattttggccaggctggtcttgaacccctggactcaagtgatctgcttcggcttgccaaagtgctgggattacaggcatgagtcaacgtgcctggccaaagctcatttctttttaaactactcatttatctttcaatgtagacatgaaatctgcactataattttcattttcaggtcaaaatgtaatcatcttaatccctcatattcaaacaattattccatcagcatcagttttatgaattgagagatgttttcccaagtaaaaatgttctggatttctgtaggaatccgtgtggaaatgaaaccatttgccctgtgccacgcagcacaggactgtcccttctcatgttgatgagatgcagagcagccccgttctggaagattccttgcagccttggctggcagccggcgtccgtgcctcccaagggttcttccctctgtcgtttgaagggttcttcgtgatgccacagcgtgcccgaggctccctcagtgacgagcgcgatttgcaggggtggccctggcagaaagggttgggaaggtacagacctccacagagactgtgtgtgctcatttccgtggaaaaaggacaaggaggcagcaaagacagacccagcagcccaggaaagattcaaatgcgattttacagaacatctgccctaagtcaaaaccaaagaaggattcctttttatcaaaacttcactaacacagaacatgaaattgtttggctcctcctgctcatggagttacaggacctagaaggcgtgatggatggaggatgtcaaatgcgattttccaggaatcgcaatctgtgagtcagggagaagcagcggagggcaagagccagttgaaggaatttgtttttcttctttccttctagttgcctcttgaagtggatttaactaaagcgaagagacaagatcttgaaccgtctgtggaggaggcaagatacaacagctgccgaccgaacatggccctgggacacccacagctgcagcaggtgacctccccttccagacccagccatgctgtgataccggcggaccaggactgcagctcccggtatgcggcctaagtcccctcctttcctctgcggcccctcctgtgtcacggggctgcctccactcaggcctccagagccagccagccgtgcgtgtcctcccagcagccgcggctgttgctcaggagcccgtcctcgccgccgccctctcatgcagaagcctgagctcatccgccgtggagagcgaggccacgcaccagcggaagctccggcagaagcagctgcagcagcagttccgggagcggatggagaagcagcaggttcgagtctccacgccgtcagctgagaagagtgagggtgagcgaggggtgggagcagggccctgggaggcgtctgcaggaggaagtgtagccgcagggtcttctgattctctgcggtaaccctgggccggctccaaaccaggcctcgctgggacttctctcaagctacacgcaggagagatgagcccaggaaattcagatatttaaatctgctgtacattttcccgtttctaaagacaatgatttcttttttcccccgtggaactaagtgggccttgataaaatcttctagaattagaaatttcagggtaaagaacttttttttgcttcgaatgctttggccatctctacattagaaagccttggccgggcacggtggctcatgtccgtaatcccagcactttgggaggccaaggtgggcggatcacgtgaggtcaggagtttgagaccagcctggccatcatggcgaaaccccgtctctattaaaaatacataaaaattagccaggtgtggtggtgcatgcctgtggtcccccctactcgggaggctgaggcagaattgcttgaatccagaaggcagaggttgcagtgaaccaagatcgtgccactgcactccagcctgggcaacagagtgagaccctgtctcaaaacaaaaacaaaacaaaaaaaaaacaagccttgtgtttctgagatatcttcgaatacaaggcaaaattgggattgagaataacgggaacttttggcagattatttatcaactttagtttatttcagagtccagattgagtgggaatagtgatacagatgccttctttctttcttctctgtctccccacctgttctctcctgcccatccagcggtaggtagtccttactcagagagtggaaacagagaaagggcttgtctcagacccatcgagcttttgcccagtttttccctacaaattgtgaagcagattcacagaggacttgcttcatggttggttcattcatatgcccctcagcaccgacaggctgaaattaacataaaaaccaaaacagaaccacttcctgtcctgtggatatccttactgttgagttattgcaggtgtttagcttcttaaccattgcagaagctcccgggtagattgtggaggaagctgccctccaggcctttcctgccccttggcagacaacccgagccattgttattttaatccatttcacacatcagattttggctgaagattttgtttgttggtttgttttcagacagggtcttgctctgtcacccagcctggagtgcagtggcgggatcagggttcactgcagctttgaccttcctgagctcaagtgatcctccttcctcagcctcctgagtggctgggactacaagtgcatgctaccacacccgctgatattttattttttgtagaggtggcgtctcgaattcctggtttcaagcgatcctcccaccttggcctcccaaagtgctggggttacaggtgtgagccactgtgcctggtcagattttagtttaagattttgtttgagcaagggttatggctgttaacaagcgagccagacactggattagatggcctgtgagaaaccttttacttttgctgtgaaaggagaaagaaacttgtttttcccactggtgagaagaattcaaaccacagacagatctgtaggtaggactgggactcgggaagctgaagttctttttactggcagaagcagcgcagccctaagcggtgttgtgcttcggagagtgttccctctaacaagaggggagtggacccacgctctgaaatcccatgcagtgatgtgatgatgacttgtcctttctctcctctgtgaaccgtagcagcgcctccggcccctcctgtgacgcacagcactcctgtaactgtctcagaaccactcctggagaaagacttccttgcaggagtgactcaagaattaatcagtaaataccttgaaatgcttgtaagctactgtgctgtatgtttctagtagccacagaataccttttaggcgacataaaaatcctcattttcgtgtggttttgttgagggggttctggctgatagcatatgtccagttcctctttggtcctaaccaaagggaagtgtacttttagggggaggggagagaaattccaaaaactttcagaaggtactgaagacatggaatttctgagggccagtttttccagtgctttctgtgagaatacttcattatttgctgatgacgcacttttccttgacctctgtagagactcttgaagacaactctgaaaagtgggctgtgactcccgatgcaggggatggtgtggtcaagccctcgtctagagcagacccagcccagacctctgacacattagccttgaacaaccagatggtgacccagaacaggactccacacagcgtttgccaccagaaaccacaagcaaaatctggatcttgggacctccaaacttatagcgctgaccaacgcacaacaggtagcagagaggtgtttaggcacaaaaattaaggggagatcctagctttaattctgggaatttttgaggaaggatgacatttcatttaaagtttgatagaatcgggaacttctattagggaatggtactgcaagtagaacagaattgatttaagagccagaacgtttcctttgggctcctgacttcaggtgcagcccttttcagctcctgataatagcaggaagcggaaacgactgcatggagagctgtccctcccagcagcaggtctgtcatgagcacgaggccacttggtctaggagaatcatctgccttcctcctaacagtaattctcattcttgggcttagtctaaattaggatcattaatataatccagaaatcattagctgtcagtttattttaaaattatggcagctacatttaagccattttgtcttccataggaaactgggaatctcataggaagagccaggacatgaagaaaaggaaatatgatccatcttaactgaggctcaggccacataattggactctgtcacaaagggactttggaaaactactttttggtcatgaaattgttcatcgctgctggagaatgaacgtcattgcgatttatcttgcttcattctgaaccttatcaagaggatctgactgagagcccactgcagttagagctgagcacttttgaaaagcttgtccatcactctagtagggagaggctctggacagatgaataccttttcttcggcttgtgaggcttcccactatttattactgaactattatgttaatgaagatggacattttaggaatcaccaatggctccttgccctcaagcaatataggccagacttggtcctaagcacctgcctcagcaattgtctacattcagttgttttgcataacgtctgccttctttcctttacggtccatgcctttaatgttgcccacattaagcactgtggatcacgacaggaaaaaggttggagcagtgcttttcactactttgtatcaatccaggctacaatcttcatttaatataaataatttatggatttatgacattacaatcctgcattgtttcaagactgacattttttcctaaggaaggaaataatcatctaagaccacgaaaaaa

SEQ ID NO: 15763 - DNA, 33462 bp, Homo sapiens
gatctcttccccttgtccatagcctagatcgagctccctgtgtgcaccgcgcgctgcccgaggcgcgtaagtgggggaggagagcggcttcccccggggtggttctagccgtgggtgtggagcgtgggaaggctcagcttccgggtcgagaacctggggctgcggtggacctgatcctgaggtctcagcgtagagatgctgagtccagaggcctgttctagttcaccagtgcagtgaggggctcagtatccgggcctcccgagaggtgggtaggaaggcggggtacaggaaacttggcaccaacgcgccgggaccccaccgcggtgcggacagccaggtgtccgtggtggcgcttccttggagatgctgcctgcagacaggcgtggggaatctgaagtttgtgttaatagctaaacgaagttgagttgcagggagcgggggacgctgggaagaaatgattgatttaaaaggaatttgacgccgggcatggtggcggcatgcccccatgttccctggaggtcaagcctgcagtgagccgagatcgcacccgtaccacgacactccgtcccgggcgacagagcgagaccctgtcacgggggaaaaaataaaaataaaaatttgacgctcactttagctgagtattgagccttgttataacattgagatagaggtctggcgcggcgtctcacacctgtaatcccagaactttggaaggccgatgcgggaggatcgcttgaggccaggagttctacgccagcctggctaacatagcgaaaccccgtctctactaaaaatacaaaactaggcaggcctggtggcgggcgcctgtaatccccgctactcgggaggcggaggcatgagaatcgcttgaacccagtaggcaggtgtgccggtaagccgacatcgcaccactgcactccagcctgggggacagagcgagaatccatccaaaaaaaaaaaagttataattcacgtacaattaaattcactcccttttttaaaaaaaagtggagacatagtctcgctctgttgcccaggctggagtacagtggcgccgtctcggctcactgcaacgtccgcctcctgggttcaagcgattctttgcttcagcctctcaagtagctggaattacaggcgcataccaccacacccagctactttgtatttttcaccatgttggttaggctggtctcgaactcctcgcccttccaaagttcagggattacaggtgtgagccaccacacccagtctaaattcacccttttaaagtgtgcaattcagtggttttaatatattcacaaggttgtgcaatcaccactattatctaattccagaacatttttatcatccctaaaagaaaccttaaaaccattagcagacacccattatttcctcctactcccagcagcactaatctatgaatttacccattctcagtactgtattatacaatatttgttcttttgtgtttggtttatttcacttcatgattcaaagtccatctatgttgtatgtagcatgtatcaacttcattttttaaataactgaattatttattgtgtggatataccacattttgtttctccatttttgatggatactggtgattttctaggctttctaggtctagtcctccacagaactcgcagtctgaggcacagacatttaaaacttaagtttttggaaactagcatttaactcttgggttgggtcaggtaattcagtggcctcaggtctggtatcgtttagggcagttttttttttgttttttttttttttttgagatgaagtttcactcttgttgcccagggtggagtgcaatggcgtatctgggctcactgcaacctcacctcctgggttcaagcgcttctcctatctcagcctcctcggtaactgggcttacaggcgcatgccactatgcccggctaatttttggtatttttagtagagacagggtttcaccatgttggccatgctggtctcgaactcctgacctcaggtgatccacccatctcggcctcccaaagtgctgggattacaggtgtgagccaccgcgcctgggtgggagttttgtttttttgtttgtctgttgttttttggggggacagagtttctctcagcctcctcggtaactgggcttacaggcgcatgccactatgccaggctaatttttggtatttttagtagagacagggtttcaccgtgttggcaatgctggtctcaaactcctgacctcaggtgatccacccgcctcggcctcccaaagtgctgggattacaggtgtgagccaccacacctgggcgggagttttgtttttttgtttgtctgttgtttttttggggggacagagtttcgctcttgttgcccaggctggactgcagtggcgagatcttgactcactgccacttctgcctcctggattcaagcgattctcctgcctcagcctcccgagtagctgggattacaggtgtgcaccaccacacccggctaattttgtatttttagtagagaaggggtttctccatgttggttacgctggtctcgaactccctacctcaggtgatcctcccgccttggcctcccaaagtgttgggattacaggcgtgagccactgcgcccctctgggagtgttttttaaagtgttctattctcagttcaccacttaccaggccgttaattatcgtggtatcaagcagagaaatgtttgtgtgctggtcttctcagggaggcagaaaccgtcagagattgctgttgtgtaatgtacaccaaaacgtgttatcttgtagtataaacggtgtagttggagatgagtgtatgaaaaatgtaactgagctagctgtgggagagactagttgtgaaaaattttgagtcacccactgtatgctttcccagctatgttcaaataaggtgacactctgccttcctgtttcagctctaaaactgttcataagtgttattttggctgtatacgtagtgccatgtttttttgtatttttgtgcttttggtgattttgctgtttataggggcctccaagaatagaagtgctgtctagcatttccaagttgaaggctgtgatatatcttatagagaaaagataagcttttagattagctttgttcaggcatcacttttgttgttggctgtgagttcatgttactgcatcaacaatatatattaaataagatatctttaaacagaagcacacataaaacaaggttatgtattggcctgttgagtaaccctgtatttcccctgggagcagtggctcagtatttgctagttcagtgttcatgatggctttacaggacataactaccctgaataatgagaactgactgtctcagtagtgcttcaagggcagaaagcctagtggatatttttccatctctgcagcttttagcatttcttcactcaaggcactcatttttaatattgaactggcagttttgatgtggagagaagctaaaataaggctaaaatgctcttcatactatgtgctgagtggggactgtgctgagtgttggggattcagtgattagtgtatggccccgcagttctctaatggctgagtgtgggagtgcagagaaatgatcagtgtgagggaattaatcctatgttcccaccgtgtttttttgttttttttgagacggagtttcactcttgtcgcccaggctggagtgcggtggcgtgatctcggctcactgcaacctccgtctcccaggttcaagcgattctcctgcctcaacctcccgagtagctgggattacaggtacccgccaccgtgcccagctaatttttgtatttttagtagagacggagtttcaccatgttggccgggctggtctcgaactcctgacctcatgatctgcctgcctcggcctcccaaagtgctgggattactgggttcccacaaattttaagacttacttcaggccaggtgtggtggcttatgcctgtaatcccagcattttgggaggccgaggtgggcagatcacctgaggtcaggagttcgagaccagcctggccaacatggtgaaacccctgcctctactaaaagtacagaaaattagctgggtgtggtcgcgcatgcctgtagttccagctactcaggaggctgaggcaccagaatcacttgaacctgggaggtggaggttgcagtgagctgagattgcgccactgtactccagcctgggcaacagagtgtctccccctcaaaaaaaaaaagacatacttcagagtgtggtgagctgcataaggctttagaggtaatgacattttgagatttcaattaaaaattttttttctactttttttttttgagacagagtctcactcttgctcaggctagagtgcagtggtgcgatcttggctcactgcaaccttcgcctcctggattcaagcgattcttgtgccttagcctcctgaggagctgagattacaggcacctgccaccatgcccagctaatttttgtatctttagtagagaagaggtttcatcatgttagccgggctggtcttgaactcctgacctcaggtgatctgtctgcattggccttccaaagtgctgagattacagatgtgagccaccgtgcctggccactttttttctacttttgctaatttttttaaagtttcatgaacattatagtactgtgttcataaatgaaaataaaagaaacttgctccagtcttgttcatcaagccgttcttgaccttcacagtcagaatctcacccatcaccttgtcacatctccctcttgatctgtatatccagagtccacctgacatgcttcttcagccctccacatataataagaaatggttttgtgagccgagattgtgccattgcactgcagcttgggcaacagtgtgagactcctcaaaaaaaaaaaaaaagaaagaaaaatgcttttaggtgataaggaaatggagaagaataaaacatctttgccagtctttacctttttaatatcttgaattcatgatttcttgccatagccactatcctagtccaggctctctcccttctacccctgagttttttttttttttttttttaccatgtttttatttcctctgggaaaacacctatcagaattttgggatcatatgacagatacatatttaatttctttctttcttttttgagacagggtcttcctctgttgcccaggctggagtgtagtggtatgatcatggctcactgcagccttgaccccttcctcgcccccgctcaagtgatcctcccaccacagcttcctgagtagctgggactgccggcatgctccaccatgcccgactaacgttttgctgcttgtagagacagccatgttccctaggcttgtcttgaactcctgagcctcaagcgatccttccacttcagcctcaagtgctgggattacaggcgtgagccaccactcctggctacttaatttctttctttctttttttttgagacagtctcgttctgtcacccaggctggagtgcagtggggtgatctcttctcactgcagcctctaccttccaggctgaagcaagccttccacctcagccccctgagtagctaggactacgggaacattccaccaggcccagctaatttttgtattttttgtagagatggagtttcatgatgttggccaggctggtcttgaactcctcacctcatgcaatccgcctgcctcagcctcccaaagtgctgggattacaggtgtgagcaactgcacccagcgggccccgcccagacctattttcaaaattagaaaaccgtgaggcttctggaagaagatgagaagaatatcttcatgacctgagtgtgtgcaaaggtttcttagggctcaggatgccagagtcacttaaaaaagcaaaaaaaacccaaaaaaaaaaccacacacacaaagataaatatgattgattacatcaaaatgtaatcacagactactctaagaaaatgaatggggaaacacagggacctatttgacaaaagactgatattcaagataaataaagaactaataggccaggcgcggtggctcacgtctgtaatcctggcactttgggaggccgaggcggggggatcacttgagctcaggagttcgagaccagcctgagcaatatagtgaaaccccatctctactaaaaatacaagaattagaattagctgggcgtgatggcacgtgcctgtagtcccagttactcgggaggctgaggctggagaattgcttcagtcaggaagatggaggttgcagtgagccgagattgtgccactgcactccagcctgggcgactgaacaagacttcgtctcaaaaaaccagtagggctccaggcctgggattgggcctctgctgctctactccctggacgtgtggctccgtccttggagtcggcctttggttttcatgaagagtagtgtgcattaacagctgagtggttttatcagcctgtttcctgccaacagtgtatgagagttccagttgctttacatccttgccagcatttggtgttgtcagtcttttgagttattctgatgggtgtggtgtgtcatggtcttaattttagtcctcagtcactaatggtgtttagcactttttcctgtgcccatgacaatgtgcatcttcctttgtgaagtgcctgctcaaatcttttgcccattttacattgggttgtgtgtctttttattattgagttgtagcagttatttatataacctttatatcctggttacctgtcctctgtctggttgcctattcattttcttagagttgtctgatgaacagaagttttacattttgatgtaatcagttttctcttatattttcttttatagttactgctttctgagtcctaggaaatcttggctaccttcaggctgtgaagataatctttcatgttttcttctgtaagttttttttttttttgagacagagtcttgctctgtcgtccaggctggagtgcggtgatggcgatctccgctcactgcaacctctgcctcccaggttcaagcgattctcctgccccagcctcccgagtagctgggattacagacatgcgccaccatgcccaactaatttttgtatttttattagagacagggtttcaccaggttggccaggttggtcttgaactcttgaccttgtgatccacccgcctcggtctcccaacatgctgggattataggcgtgagccaccgtgcccggcctataaattttatagttttagttttatgtttaagcctatcacccatttctagtttaggtgaatggtgtgagatataattaaatattaatttcttttccatatagatatccagtcattccagcaccatttgttgaaaatgctattgtattgcgttttggaaattaagatgactgtacaaatggtaattgatgtctgcactcccttttctgttccattgttcaatccttgtgttagtaccacacttttaattactgtagctttttagtaagtcttgaagtcatgtagttgtaggtcttccaattttgttgttttcaagcttgatgtgaatattctaaatcctctgcatttccatataaatatcagaattatctttaccagttttacagaaaagtctggtaaagttgtgattgggattgcattgaatctatggatcaatttggaaagaaatgacacctaaacagtattgagtcttcaaatatatgaacttggtgcattttccttcttatttaagccttttaaaatttctttttaggccgggtgcagtggcttatgcctgtaatcccagcactttgggagtctgcagcgggcagatcagctgaggtcaggagttcgagaccagcctggccaacatggtgaaaccccgtctctactaaaaatacaaaaattagccaggtgtggtggcaggtgcctgtagtctcagctacttgggaggctgaggcaggagaactgcttgaacttgctcaggaggtggaggttgcagtgagctgagatagtgccattgcactccagcctgggcaacaagagcaaaactctgtctcaaaaaataataataataaaaataaaaattttgggccaggtgtggcggctcacacctgtaatcccagcaatttgggaggctgagccgggtggatcacctgaggtcaggagtttgagaccagcctgaccaacatggagaaaccctgtctctacgaaaaatacaaaatttgccaggcatggtggcgcatgcctgtaatcccagctactctggaggctgaggcaggagaatcacttgaacctgggaggcagaggttgcagtgagccgagatggtgccattgcactccagcctgggcaacaagagtgaaactctgtctcaaaaaaaaaaaattcttttagttctgttttatggttttcagttcagaagtcttatacatattttgttaaattgatttctagatatgtttcttacctttattgtaaaatggagccatcatttgcatcattcattactctgtatgtaatgtgttatcattctctacctgctttcaagattttctctttatttttgttttttagcagtttgtctgtggtgtatctaggtgtcattttatttgtatttatccggagatttattcttgagatttgcagagcttcttaaatctgtaaatttatgtctgtcggccaatttgggaaatttggagctattagttttaaaaatatttcttctgttccattctctttcacttcttctgtatgtgagttcaatttcacttcaattgtatgtgagttagacattttgatattagcccacaggatcctgaggttctttcattcttttcaatcttttttttttctcgaagtttgcatttcgtgagcaggagtgacagtcattcaggatgatttttgagattcctagttcaagagtagttcctattcttttctaggtgtagtcaagtatggcttctaattctactagaaggcttttttgtcggggaggtggttctatgtcctttggctcttacattttctttgtgtctttcacagcacagttttcagagggtaccctttctctttggttttgttttgttttgttttgttttagacggagtcttgctctgtctccaggctggagtgcagtggcgcaatcttggctcactgcaacctctgctcactgctacctctgcctcccgggttcaagcaattctcctgcctcagcttcctgagtagctgggactacaggcacgcgccaccacacccaactaatttttgtatttttagtagagactgggtttcatcatgttggcaaggctgttctccatctcttgacctcgtgatccgcccgccttggcctcccaaagtgctaggattacaggcgtgagccaccgcgcccggccaacagagggtaccctttcattctttttctccttcttcccagaaggcttgcgttttcaagactacctcatcaagttctgcatgtgtttaaaagtgtctctacccgaccttcccttcctccctcccgatttaacggaattctttgttggtgttttcatacttaccgtgagttttctttttcagggtgatattttagttccatcttaggctctccattgtcctcttctctcttctttttttttttgagacagagtctcattctgtcacccaggctggagtgcagtggtgtgatctctgctcactgcaacctctgcctcccaggttcaagtgattctcctgcctcagcctcccgaatagctgggattacaggcgcacacaaccacgcccacctaatttttgtattttcagtagagacggggtttcaccatcttggccaggctggtctcaaactcctgacctcgtgatccgcctgcctcagcttcccagagtgctgggattacaggcatgagccaccgcgcccggtgcgcccagccctcttctctcttctttgcatctctcttcctatctggatccctctttgctgtccttaaagagctgagatgagagattgagaaacatctctacaagaaattgacgtttttctacttatgggtaattagaagcttgtagtattttcagtcttctaagtatgttgaagatatgagacgttggtgattttctttgtttctccggttggttggtctgtgtagtttttggacatgtgtttggatatttggatttatatagctgccataatcttggctatgcaggtagtctttcctgacacttcatcctgaaagatttgaagcctttggacaaattttacagtgggctgggtgcagtggctcacgtctgtaatcccagtgctttgggaggctgggcaggaagattgcttgagcccaggagtttgagaccagcctggacaacatagtgagacccgtgtctctacaaaaaataaaaaatatgccgtgtgtggcgttatacaactgtagtcccagctacttaggaggctgaggtgggaagatcacgagccaaggagtttgagggtacggtgagccatgatcgcctcactgcactgggtggcacagcgagactgtctcaaaaaaaaaatttacaattaatgtctgcatatccttcacctaggttcataaatttgtacttttgctttatctacttgcctttttctctctctctacacacacacacacacacacacacacacacacaattagttgaatgaattgagagtaagttgcagaaaacatgacactttactccaatattgcatcatacaaaatcatacatctagtgataggccattgtcctacagaatcacgatataattatcacactaaccagctgtggtggtgcacacctgtagtctaagctactcgggaggctgaggcagaaggatcacctgagcccaggaggttgtggctgcagtctcatattcatcccatcatcagatttctcccattgtcctaataatattctttatagcttttctttatccctgatccgaaatttcattgaagatcacacagtgcatttagttgtcatgcctcttaagtctttatttatttattatttattttttgagatggagtcttgctctgttacccaaactggagtgcagtggcatgatcttggctcatgcaacctccacccgctgggttcaagtgattatcctgcttcagcctcccgtgttgctgggactacaggtgtgtgccaccatgcccagctactttttatatttttagtagagacgggaattgtaccatgttggccaggctggtcttgaactcctgagctcagatgatccacccgccttggcctcccaaagtgctgggattacaggcgtgggccaccacacccagccttaagcctcttttaacataaaagagttcaccagccattctattttgttttgctttttgagacactgatgctttggagagtccaggccagttgctttgtagatttcaacttgtttgattgtttcctgatgattaggttggtagaaatactacctcaatgatgggaccttcttagtgcgtccatcaggaagcacatgatgtgactgtaattggtgacattaagtttgattccttaataattaaggtggtaactcccaggtttctacattgtaaaggcatcttttgccgccctcctttttattcccaagtagtttatttggagattagtcctttacacagtagaggagcggggaagggagacaggaaaggaaagtttgacaacaaagggtgagttttcaagcctgttgccacgggggaacctaattccactggagaagctcatggcttggtgatgttccacagaggggtcagaaatttagcgtatttcaacaccagctcctgtcaggcaccatttgagggctgctgccagggtggttcaattttctggtgcttacagcttgccataaacaggtgcaaagtagtctggataccaaagaaagctctcaggtaacaagatgcagatgttggcatttggaagtcagaatagggtgcactattgtggtaagagctgaagggatggctgggcgcggtggctcacacctgtagtcccagcactttgggaggatgaggcaggcggatcacctgaggtcagaagttcgagagcagcctggccaacatgacgaaaccccgtctctactaaaaatacaaaaattagccaggcgtggtggtggatgcctgtaatcccagctattcagtaggctgaggcaggagaattgcttgaatctgggaggtgtaggttgcagtgagctgagatcacaccactctgcactccagcctgggtgacagagcgagactctgtctcagaaaaaaaaaaaagctgaagggatgctgagtagagcatccgtagtgtctgctatacctgggtaccctagaacctggagaacctacagcttgaggcaagagcgtatgtgctattattttttcaagaagtgtgctctcaggaagcagaggtaggggaaaggtgagtgaagggagaaggaagattaagtcagttcaagggtgcattttgaagttggttgcccttggtgcaagtacagttggttgcttgttctcctaaagctgtctcccaggaggatgtatacataactgcattccagggcaatccatctaaaggaagggtggacggacccctcagcttctgtatctcactggaaaaaggtttgcttcatggcacattaattcccatagacttctaggttgtgcatgtgtgggtaccaggtgggtcccacagacccttacacctccaaggcaagcagcaagccacgggtgggaagtgataggtacccagtatgagcaggaggtaagggaccgtggggttgtgcctgtgggcagttggttataacccagacgtgtttgatcagcccagtgacagctggagtggacaaagtgaccaagggcctcaaggacacacaaggccaagaagatttgaagtgctgtgtaagatatgcctaatgcatttggattctacctttgtttaacgaatatgcacacataaaaaacacttgaactccttgagcccaggagttcaagaccaacctgggcaacatagtgagacactcatctctaaaaaaattttaaaaaaaattaacctggcatgatagcactcacctgtagtcctgtctactctggaggccgcagtgggaggatcacctgagccctggaggtcaaggttacagtatgctatgattgcaccactgcattccagcctgggtaacagagcaagacgctgtctcttaaattttttttttttttttttttacttttataatggaaaaaccattgtagacagttttaggaaggaaagcagaatagtaagacatctttttcaaagtaaaagagcaaaaaaggcaaaaaatatttcacatttactttatggacaaagataagattgtccttcaataaaagactgaattttttttgtttgttttgttttgttttttgagaaagagtcttgctccattgcccaggctggaatgcagtggtgtggtctcggctcactgcaacctccgcctcccgggtacaagcaattctccagcctcagccccccgagtagctgggactacaggcacgcgccactgcatctggctaagttttgtatttttagtagagatggggtttcaccatgttgaccaggctcgtcttgaactcctgacctcaggttatccacctgcctgggcctcccaaagtgctgggattacaagtgtgagccaccgtgcccggccacaagttgctctttaaatgtgagaagtgttctggcatggtggctcacacctgaggcgggtggatcacttgaggtcaggagttcgagatcaggctggccaacatggtgaaaccccgtctctagttatttatttatttatttatttatttatttatttatttatttttttgagacggagtttcactcttgtttcccaggcgggagtgcaatggcgcaatctcggctcactgcaacctccgccttccgggttcaagcgattctcttgcctcagcctcctgagtagctgggattacaggcatgcaccaccacacccggctaattttgtatttttagtagagacggggtttttccatgttggtcaggctggtctcgaattcctgacctcaggtgatctgccctcctcagcctcccgaagtgttgggattacaggcgtgagccaccacgcccggccctgtctctactaaaaatgcaaaatttagccgggcatggtggcgcacacctgtaatctcagctactcaggagactgaagcagcagattcgcttgaacccaggaggtgaaggttgcagtgagctgagaccacaccactgcagggcagcctaggcgacaagagcgaaacgcttacaaaaaaaaaaaaaaaaaaagattcacaggtgatggtgatgctgctggttaaggaagtgaagtggctttttgctctgtagccttcctgaatgttggggcctcctgctcttcatttgtttcatttctattaagtctcctccctccagctatcttgttagctcctggaaagcatttcagtgattgtggcttctatttctttttgaccccacagtgtccagggtcatgctgcctatatagtagtgagcagtaagttgaggtttttaaaaactttattattattatttttgagatggagtcttgttctgtcacccaggctggagtgcagtggcacaatctcagttcactgcaacctctgcctcccaagttcaagtgattctcctgcctcagcctcccgagtagctgggactacaggcgcctgccaccacatccggctaatttttttgtatttttagtacagatggggtttcactatgttggtcaggctgatctcgaactcctgacctcaggtgatccgcctgctttggcctcccaaagtgttagggttacaggtgtgagccaccacacctggccggtttttttaaactttaaaacagattcacttgatttttcttccctaccccccagcttttttgaggtatgactgacaaaaattgtatatatttagggtgtacaatgtgatgatttgatatgtgaatgcactgtgaaatgattaccacagtcaaggtaattcacatatccaccacctcccagttaccctcttagctagtacaggttgggtattgcttctctgaaatgctttgggaccagaagtgttttggacttcagattttggaatatttgaatatatataatcagatatcttgggaaggggacccaagtctaaacatgaaattcatttgttttcagagcctaaagatgatttttttttttttttttttttgagatggagtctcactctcgcccaggctggagtgccgtggcacaatctcagctcactgcaacctctgcctcccaggttcaagcgattctcctacctcagcctcccaagtagctggaattacaggctcgcactaccacacccggctaatttttgtatttttataaagacatttcaccatgttggccaggctggtctcaaactcctgacctcaggtgatccgcccgcctcagcctcccaaagtgctgggattataggtgtcagtgactgcgtctggctgataattgaatttttctcttggagaagctgaataaactgtgtgttgtgtgcctgcctttttttttgtttttttttttttttgagacagagtcagacactctgtcacccaggctggagtgcgatggggtggtcatagctcactgcagcctcaaactcctgagctcaagcgatcctcccacatcagcctcctaagtagcatagcaccacgcctggctaatttttaaattttttgtagtgatggggttttgttgtctaggctagtctcaaactcctgggctcaagcagtccttctgccttggcctcccaaggtggtaggattataggtttgagccaccatgcctggccattacctgtgttttgactataacacatcatgttggcactcaaaacgttttggattttggagcattttgaattttggatttttggattagcaatgttccacctatagtacattttttgtttgctttcccataaagaattttttgtaattttgattttatagttctaaatgtaatatattcttattgtaaaaatcacctttaatagcaccgccagaatagcaaacatgttaacagaaaggtagaagtagaccttaaagaatcttcagcagcttgagagaccacagctaaccactgaggaactctgttctggattggagcagtgcttagaagcttataaataactcttagggtattgcatagggattctttttttttttttttcctgaaatggagtctcgctctgtcgcccaggctggagtgcagggtgtgatctcagatcactgcaacctccgcctcctgggttcaagcaattctttgcctcagcctcccgagtagctgggattacaggcgcctgccaccatgcccagctaatttttttggatttttagtagagagggggtttcaccatgttagccaggatggtctccatctcctgaccttgtgatccacccacctcggcctcccaaagtgctgggattacaggcatgagccactgtgcctggccgcataaggattctttatgtgatttttcagtagaggctcttgccttttactttaaacattctttgagggttgttttttttttccgctttttatttatatagaggtcaaccagaatcaagatgtctgggactgaggaagcaattcttggaggacgtgacagccatcctgctgctggcggcggctcagtgttatgctttggacaggtaactgtggttccttcatgccgggaaagaatgaggtgaagtgagtaaagttagggcaaggcagtttgtagagcatcgtagtacatgtgtgagcagtacctagtacgtttacctagtacgtgtgtgagcagtacctagtacgtttacctagtacgtgtgtgagcagtacctagtacgttgacgcggtgcgtgcgggggcagtacctagtacgtttacatagtacatgtgtgagctatttgttattggtttttcctttagatgcattttttgggagtcttgtgaactctggagggcattttggaatgttagctatcaaaagactgatagtactggggattagatttagattttaaattttttgtggggggggatagataacatatttgtatgacatcaaattcaaaatgaaactgtgaaaatctccctatttcctattgcccctgtgtgcatgccacccagttctatttcttttttttttcgagactgagtcttgctttgtcacccaggctgcagtgcagtggtgcgatctcagctcactgcaacttccaccctctggattcaagcaattctcctgcctcagcctcccaagtagctgggataacaggcatgcaccaccatggccagctaatttttatatttttagtagagatggggtttaaccatgttggccaggctggtctcgaactcctgacctcaggtgatccgcctgcctcggcctcccaaagtgtttggattacaggcgtgagccaccacgcccgggcttaatttttttgtatttttagtagagatgtggtttcaccatgttggccagggtagtcttgaactcctgacctcgtgatctgcctgcctcggcctcctaaatgctggaattacaggcatgagccaccgcgcctggctccagttgtctttcttggaggcatggaaagttactgggggtcctattccttgtagggacattgtgtgcacagaaaagagtttcttgctttgtccacccaaactccatctttgtctttagcagagagttgtgagtattcatctcatctgagcagggcaagggggacaaaacccaaatcagcaagcagtagtgtgtttctgtttgtgcaggatgggaaattgttgtattggagaaggcgtcaatctctggaaaggacaaatggaagcaaggcttcctacccccgtgctctttccgtacttgcttcctgtgctgacgtcatttacagatctggaggcagaacattttagcttcctaagcttcagaaacatttataaggatggtagcagcagctaaggcagcagttctcaaaatgcagttctcaaaaaccctggggtttctgaagatctttcagagtccagaaggtcaaaattatcttcataataatactatttgcctctttcacactcattgtctcatgagtgaatggtagagttttcagagagtgcatgatatgtggtgatgtcactgctatgatgcctaatggcatgcatgccttaaaagtttctcagttttgattcctaataggatacatagaacccacataaacaaaggttctggggggtctttttaagagtataaagtctccataaaggatggagactcaatgatgtgaggaatggtggaagtgtgaatttaattttcttttttggggttgcagtgccagtacacagcagaagagtaccaggccatccagaaggccctgaggcagaggctgggcccagaatacataagtagccgcatggctggcggaggccagaaggtaggagaattcatgtgcctggaaagcaggcatccataccgcagactccgatggtcttgccagttccctctctgggtcctcagggattcggaagtctgctgttaactgttcctggaggtctcccagtgcccctgggaggggatgggttccagacttcattctcatccgaaggggcctgggcatggtcttgacactcgcataaccgccgtcttaagatttttacatcatctttttttttttttatttttaaagacagggtcttgctctgtcacctaggctggagtccgaccagtggtgtcatctcagctcactgcagcctccacctcccaggctcaagcgatcctcctgcctcagcttcctgactagctgggactacaggcacacgccaccacacctggttaattttttaatgttctgtagagacgacatctcgccatgttgcccaggctgatctcgaactgctgggctcaagtgatcctcccacctcggcctcccaaagtgctgggattacaggtgtgggccaccatgcccagcctttacaccattaaaaaaaaaatgttccttttgccatttgctttttttttttaattaaacactttttaaagaacttatgattgacacataataattgcatatcatttgcttctaattttaacttctgtgtatatttttggtcttccataaaatatgtcaaacagatttgtactttttgcaaactgaattttagcaactgctgggtgagttcctcctcccaacagaccattcgttctcgcgggctccatctagaagatttttgaaataaattcattgagaattttcttgaaaaaaaaattttttttaacagactggttctcactctgtcacttaggctggagtgcagtggcacgatcctagcttactgcagccttgagctcctgggctcaagtgatcctcccacctcagcctcccgagaagaatgtttaaggacagtttatcgaaaaaagtagatgaggaataaattatgtcaattttgattcacatttaagtgtggtaaggaattaacacagcttttccttaaaaacatttgtttttctaggtgtgctacattgagggtcatcgggtaattaatctggccaatgagatgtttggttacaatggctgggcacactccatcacgcagcagaatgtgggtgagtatgctctccagcagtggggacttctgcactgtccagctcctgctgaaagtctgctgtgggtgaggaggtaaggtaggtggactcagctgccagcaggaggaatggttgtggcccagcggtcagtgtcctcttcaacttgctctctttcccactcctagattttgttgacctcaacaatggcaagttctacgtgggagtctgtgcatttgtgagggtccagctgaaggtgaggggatggagtagacctgctgcccggaaggatcagtgggtggtaggagaaggtgagcaggtagggaagtaggtagctggacggggacccaggctccagagttgtgtctcagccagcgttccctagagtggtggaattcaaatactcttgctcatgtgctccctaaaagaatggaaaaactgttctcttgcacatgttcaagctgacacctaaaagttttcaccatatataaaaattgttgcaaaggatgtattttttggcatatggtaaaatctgacattttaaaatacaataattttaccatcactgataagtgtttggaaactcaactttaggcaaagcaggtccttttgttataacattgatgaaaacaaaaatatgttttgttaataagttgtttcacttcaagtcacagttatttaaggtgttaagtgagcacttaccgtaaatctgttgaatcttgttaaatattccagtggactctaaatactatagaggataagatctatcatttatttgaagaaatacaatgaacaagcttttttttaatcattagaaattttacattgttctttctttatctgaactcatatttctattctatttccccactggttttaatcctaatacatatttatggttgaaagtttggctaggcggggtggctcattcgtgtaaccccagcactttgggaggcccaggtggaaggactgcttgagcccagggatttgagaccagcctgggcaacatagcgaaagcccgtctctactaaaaatacaaaaaattagctgggcatggtggtgtatgcttgtagtcctagctactcaagaggctgaggtgggaggatcacctgagcccaggaagtcgaggctgtggtgagctgtgattgcgccactgaactcctgggtggaaaaaaagaaaagttttatcggtagccttactgtgcttctctgcctttgcctgtgtataaaaataaaaatttttggtaaattttcagtgcacttaaggctctaaatattaaaatatttcttttggatttagttatattatagctactgttaacacacaattgaccagacaattgtgtttatggtgaagagaaaacataaatacagcaaaattttgatacttagaaaaattaaagatatgaaatcttgccacaaaaataaaaaatttaaaatataaaatttatggaaaatgtatatcttaatgagatggatggtgctgttttttcttttcagttagtttatatatccatatatccataactgaatattacttacttcttttttttttttgagatggagttttgctcttgttgcccaggctggagggcaatggttcaatctcagctcaccgcaacctccacctcctgggttcaagcgattctcctgcctcagcctcccaagtagctgggattacaggcatgcgccaccccgcccgcctaattttttgtgtgtgttttcagtagagacgcggtttctccatgttggtcaggctggtctggaactcacaacctcaggtgatccacccgccttggcctccaaaagtgctgggattacaggcgtgagccaccgcacccggcctacttatttcttgaatgaacaattcagcattaattctattctgacttatttttctaaatagtactaaaaaatcttgtatctatgagtgagtagctgagaatggaaagaattgtgttatagtgtcactcatttatttgagtgctttctgagttattttttaaaaatcacagagcgctgtcatcaaacattgtatttaattctcaatcagcgaatgatgtgctcaggtccaccttctcttttggtgagaggcaggagctggacgccacctgatttacaaagggtttgctctcccgtccttacagaccattagatccagtgttcaaatcatccctttgtttcatatcccagaggtttttttttttccaagacgtagtctcactctatcacccaggctggagtgcagtggtgcaatctcggctcactgcaacctctgcctcccaggttcaagtgattctcctgcctcagtctcctgagtagctgggattacaggtgcccaccaccacacccggctaatttttgtatttttagtagagatagggtttcaccatgttgaccaggctggtcttgaactcctgacctcaagtgatccacctcccttgacctcccaaagggctgggattacagcgtgagccaccacgcccggcccggccatcccagaggttttttttaccttagggtgatgcacactgataggatttggggtgagtttctaatgtgccctttgtgtgttgggaagttgggaagggaggatcgtcttgacaccttgaccgcaggcacatgtccaggcagcccaggtctaggaagcagcactcgcgatggattctcacccagccttctgcccgtgcccctgtagcaaggccgccaggtgggagagtccggctttgaaccctgctgcttgaggaacaggggagttgtggcacgcctgccgctctcgtgtttgagttcaaactccttttctgcccccaggatggttcatatcatgaagatgttggttatggtgttagtgagggcctcaagtccaaggctttatctttggagaaggcaaggaaggaggcggtgacagacgggctgaagcgagccctcaggtgagcgcggggctgggagtctaacctgcgtcatttcagctcttgcttcagagcagatttcgattttttttggaagaggtaacacatccacatggttcaaaaatccaagcagcgtggaaggtaattctcacccctgccctggttcctgtctgccgttttcccactttcgttagtattttttcaatgtttctgtttcaggcttcccttgctgggagtaagtggtagaatcctgtactctctcttctccgtgcactcagtcatgtgtgccggaggccttcccactcctactgcgagtgcacagacagcaccctcctctccgtgctcctcagcagtcctccgctacgcacaggtagcatagttaacgtagttacacagtcacgcagatgtccgtgttagtccatttatgttgctatacaggaataccagaggctgggtaatttataaataaaggaggtttgattggcttatgattctgtggactgtactggaagcctggtgccagcatccacttctgctgaggcctcaggaagcttctaatcatggcagaaggtgaagagggaacgtggagagagagggagcaagagagagaaggaaggagtcccaggcttatttatttattttattgttgtttttcattttttgagacagggtcttgctctgttgcacaggctggggtgcagtggtgccgtcatcgctcagtgcagccttgaactcctgggctgaagtgatcttcccgcctcagcctcccgagtagctgggatcacaggcacataacaccacccccagttaattaaaaaaaaatttttttttttttggagagacagggtctccctttgttgcctaggctggtctcaaactcctgggctcaagtcatcctcctgccttgtgcctcccaaagtgccgggatcacaggcatgagccatcatgcccagcccccacactcaaaaccaccagatctctcatgagctgagtgagaactcactcaacaccaaggggatggcactaagctgtttatgaggaatccagccccaggatccagtacctcccaccaggccgcaccccccggcattggaggtcacgtttcaacatgaaatttggaggggataaacatccaaaccatatccgtgtctttgagaattgaagtgaattgaaccagaaaaacctatgagttctgtgggggagtccgtagatcccaagttaagaactctggtcatgggaggttgtgcccttgagcccccggtccccaagtgtgtgttgcctactcctgctgggaaattggagcagcctttggggggaaaaaaaagaaaaactctctgcagtttgttctccatgtcaggaggtggctggtgggttttgtgaatggcgccgtaatcttttcatactcatcttctctgtgagggcagggacttgtgtcttgtcctcactgcagtattctcagaaactaacacagtgcaggaacatgctagatgcttaccagacatcaatggggaatgcatgttagggtccacttcctctgctgctcctgagaagcaacctgtacaaaagttgtaattctattctctgatattcatgtgtaacaattcttaaccctgtttcacctttttttctcttgcccttaggagttttgggaatgcacttggaaactgtattctggacaaagactacctgagatcactaaataagcttccacgccaggtatatcagacatggatgagtggagtgaagataatgcggcaaactcttgtgtgtcatgggttgagtatttggaggatgcaaggagaaaaagtgaggactcagctctttagagggtcgggaatgttgatttcagatttcgaatgttagagacagcaggaactaatcccaacattttccttttttctaaagtacatcatgtgggccggggaccgtggctcacgcctggaatcccagcactttgggaggtggaggcaggtggatcacaaggtcaggagatcgagaccatcctggctaacacggtgaaaccctgtctctactaaaaatacaaaaaattagccgggcgaggtggtgggcgcctgtagtcccagctactcgggaggctgaggcaggagaatggcgtgaacccgggaggcagagcttgcagtgagccgagatggcaccactgcactccaacctgggcgacagagccagactccgtctccaaaaaaaaaaaaaaaaaaaatcacaccatttgacaagaatgtgaggtctagagaatttgtgtacgtgtaggtagtgaactgtggttgggggtagtctgtgaagcctcaaagcaagcacacagccctctgcagcaccactgtccttcccagacactcccagcctcgctgttgagccttctttcttttccttagttctggtgtcattacatgtctgatgtcattacaatgtcatttacatgtccattatttctgtcaatacctataacgtgatctgagcctttgcctttggagaatggggtctgtggtggggcagccctggagtcacactgccttgccatgagtggcttctggagtgttcctcctgcctcatctgctctccgaggtccctgccatgtcgctccccagggcagcattcccatcctgtgcctgagggattcttgtcctcatggagccccacaaggtgtgtgtcactgggcatctgtaaaaactcctttaaaaaaatcatttttaaacattattggattcagtttgctaatattttgttagacttttttttttgagacggagtctcgctctgtcgcccaggctgaagtgcagtggtgtgatcttggctcactgcaacctctgcctcctgggttccagcgatgctcctgcctcagcctcctgagtagctgggattacaggtgtgtaccaccacgcctggctaatttttgtatttttttagtagagacggggtttcaccatcttggtcaggctggtctcgaattcctgacctcatgattcgcctgcctcggcctcccaaagtgctgagattacaggcgtgagcccccgcgcccggcctttgttaggcatttttgcatctatgtttatgagagatattagtcaagttttctttttctttttttttttttgagatagtctcactctgtcgcccaggctggagtgcagtagtgtgatctcagctcactgcaacctctgcctcccgggttcatgccattctcctgcctcagcctcccaagtcgctgggactacaggtgccagccaccaccatgcccagctaatttttttatttttagtagatggggtttcgtcctgttggccaggctggtcttgaactcctgacctcaagtaatccgcctgcctcggcctccgaaagttttgggatgacaggcgtgagccaccgcacccggccttttctttttttaaattgtagtaaaacacatcacattttaactatttttagtgtgtggtcgagtagtgttaagtgtattcccattgttgtgaaattgatctgcagaactaagaccctgcacccgtaaaacaagaactccgcatttccccctttcccagacccttgtaactacttccactttctttcctttttttttttttttaatttattttatgaaagatgaggtcttgctctgtcagccaggctggaatgcaggagtgccatcataattcactgcatccttgcactcctgggcccaagggatcctcctggatcctcctgcctcagcctctcaggtggctgggactacaggtatgtgccagtgcacctagctaatttattttttaaacaattattactattttttttgtagagacagaatttctcagggctggtcatgaactgctgggctcatgtgatcctcctgcctcggcctcccaaagcgctgggattgcagcgtgggccactgtacctggagccagctaattaactttttttgggggcttttttttttaagaggtgagttcttgctatgttgctgaggctggtcttgatctttttttcttttttaaaaaattaggttaggcgctgtggctcctgcctataatcctagcactttgggaggccgaggtggttagatcacttgagcctaggagtttgagaccaccctggccaacatggtgaaaccctgtctctactaaaaaatacaaaaatcagctgggcatggtggtcagcctgcctgtaatcccggtggtcagcctgcctgtaatcccagctcttctggaggctgaggcatgagaatcgcttgaacctgggaggtggaggctgcagtgagccaagattgcactactgcactccagcctgggagacagagtgagattctgtctcaaaataataataataaaatataaaaataaaatacttttttgtgtgtggtcatggagttttgctattgcccaggctagtctcaaactcctggctacaagcgatcctcccactcagcctccttaagtgctgagattataggtatatgtgtctactttctgtttctgtgaatttgtctactctggatacctcatataaatggaatcacataatttttgctttttgtgactggcttatttcacttagctagcattaatgcctttaagattcatccatgtagtagtgtgtatcagaattcccttctttttgtggctgaatattctgttgtatatatagaccacattttgtttatgcattcatttggtgatggggatttgggttgctttcaacctcttggctattgtgaataatgctgctatgaacgagggtgtgtaactctctttgagatcttgctttcaattcttttagacatattctgaaggggattgctgggtcatggtaatcctatttttaatttttcgaggagctgccacactgattttcatacagttgccccattttaccattccaccaacagggcacatgagttcagatttttctaaatcctaaccagcacttgttattttctgagtttttggttttttttttttttttttttttaagccaacctaatgggcgtgatattttattggggttatgatttgcatacccctgatgattagtgatgttgaccatattttcttttttgagacagaatctcactctgttacccaggctggagtgcagtggcacaatcttggttcactgcaacctctgcctctgggttcaaacaattctcctgtctcagcctcccaagtagctgggactataggcgcctgccaccatgccgggctaatttttgtatttttagtagagatggggtttcaccatgttggtcaggctggtctcgaactcctgacctcaggtgatccgcccgccttggcctcccaaagtgatgggattacaggtgtgagcccccgcacccagccaaccatattttcatatgcttgttggccatctgtttatcgtctttggagagatgtctattcaagtcctttgtcattttattttgttttattattttaatttaatttcttttattcatctcatctcatctcatctcatgacaagatctcgccctgtcacccaggctggaatgcagtggtctgatcatggcttggctccctggagcctcgacatcctgggcttgagtgatcctcccacgcaggctggagggcagtcgtgtgatctcggctcactgcagcctctatatcccagactcaaatgatcctcctgccttagcctcccaagtagctgggactacaggcatttgccaccatgccaggctaatttttttattttttgtacagaatacaaaaaattttaccgtgttgcccaggctggtctcaaactcctggcctcaagtgatccacctgccttggcctcccaaaatgctgggataacaggcgtgagaaacccatatggcccaactcctacttttattgagctttttcgtattgtttttgtattctctctttcacttatgtttgctgtcatctttttagaatttcctttcttctagctttgggtgtaactttttttttctagttctttgaggtatagcgtagatttgagatcttttttttttaactatgtgtgtaacttccctcttacgacttctttccctgcaccccagaagtttggtaggttgtgttgtagtatcatttgtctctgggaattcttctaagttggcttgttacatttcctttgactttaagagtgtggtgtttaatttctactgatttgtggattttccagttttctttttgctgttgatttctagtttcattccattgtgattgaaaagatactttatatgatttcaatcttgaatttgttaggacttgttttgtggcctaacatgtagtctgtcttggagaatgttccatgtgtacttgagaagaatgtattttctgctattggtgggtggaatgttatgtatatgactgttaggtccagttggcctatagtattgttcaaatactctatcgccttattcatcttttgtttggttgttttatctattattgaaagttgagtagtgaagtctcctactattattgtgttgcttttatttcaccttacaatcctctcaaagtttgcttcatatatttaggacctctggtgtttggtgcataaatatttataattgttatatcttcttggtgaattgacattcttttttttttttttgagacggagtctcactctgtcgcccaggctggagtgcagtggcggtgcgatctcagctcactgcaggctctgcctcctgggttcacaccattctcctgcctcagcctcctgagtagctgggactacaggcgcccgccacctacgcccggctaattttttgtatttttagtagagacggggtttcaccatgttagccaggatggtctcgatatcctgacctcgtgatctgcccacctcggcctcccaaaatgctgggattataggtgtgagccactgcacctggctgacattcttatcattatataatactctcgtctcctataacaattttttttttttttttgagacggagtcttgctctgccgcccaggctagagtgcagtggtgcgatcttggctcactgcatcctttgcctcctgggttcaagcagttctcctgcctcagcctcctgagtagctggaactacaggtgcgtgctaccatgcccggctaattttttttttttttgagacagagtttttgctcttgttgcccaggctggggtgcaattgtgtgatctcggctcactgccatctctgcctcccaggttcaggcaattcttctacctcagcctcccaactagctaggactacaggtgtgtgccaccacacccagctaattttttgtattttgtagagagggggtttcaccatgttggtcaggctgatcttggactcttaacctcagatgatccgcccacctcggcctcccaaggtgttgggattacaggcgtgagccaccacgctgagcccagatttttttttttttttttagacagagtcttgctctgtcgcccaggctggagtgcagtggcgctatcttggctcactgcaacctccgcctcccgggttcaagcgattctcgtgcctcagcctcctgagtagctgggactacaggcgcccaccaccacacccaactaatgtttcgtattttttagtagagcggggttttgctgtgttggccaggctggtctcaaactcctgggctcaagtgatcaatccacctgccttggcctcccaaagttctgggattacaggtgtgagccactgagcctggccccaaatttctctttttttgttgttgagacggaatttcactcttgtcaccgaggctggagtgcaatgttgtgatcactgcaacctctgcctcgtgggttcaagcgattctccagcctcagcctcccaagtaactgggattacaggcgcccgccaccatgcccggctaatttttatacttttagtagaaatggggtttcgccatgttggccagggtgatctcaaactcctgacctcaagtgatccacctgcctcagcctcccaaagtgttgggattacaggcatgagccaccatttcctaagtgagcacagctgttcacctcccagatagagaatcagacctttaccagcagcccagaagccccattttgccctcttccagtcactgccttgctttccttttttcaaaagtaactactatcctgtcttctattctgacttccatggattattttttcctgtttttgaactttatatatgtaaagttcacaaatggaattgtactgtaagtggaattgtacagttcatattttaagaaaattgaccgaagtatgaaaaagaacatatagacaggttagacgagtgcacgtatcatccatgctcagcttgatgaattttccaaccaaacacatccacacagccaacatctgaatcaagacactgccagtaccgagaaggcccagctgtgttccttgcagtcactgccatcccctgccctccttcccactctgagcaaaccgcttttaacaacacagattggccgggtgtggtggctcactcctgtaatcccaccacttgagaggccaaggaagaaggattgcttgagcccaagagttggagaccagccaggacaacatagtgggaccctgtctgtacgaaataaaaataaaaataaaaataaaaattagctgggcctggtggtggcgcctgtagtcccagctgcttgggaggctgggctgggagaatcatttgagcctaggaggcccaggctgcagtgagctgtgattacgccactgcactccagcctgggccacagagcgagaccctctctcaaaaaacaaaacaaaaaacaaagaaagccaccaatttgtttttattgttatgtacttttttggaatcctacagtttgaactctttgtatcttacttgaattcagcatggttgtgagattcattcatggtacgagcagcagtttcattgctgtataattttcttttgcatgagtatgtggcaatttatttttctagtcttttcttagtagacattttggtttttgtagcttgtggctgtttcgattagagatgctgttagcattcttttgctgtacagttgcactcatttttgttgggaattattgggggagaagataggtacgtgtttagttttagtaggttcttcccgttttcctgtatggttgtattaattcacaccccacgtggcattgcgtaagttccaattgttctgtatctttgacagcacttggtatcgccagtctttcatatttttcaaagctcgtttcttttttttgagacacagtcttgctctgtcgcccaggctggagtgcggtggtgcgatctccgcccactgcaacctctgtctcccaggtttaagtgattctccctgcctcagcctcccgagtagctgggattgttggtgtgtgccaccatgcccagctaatttttttttttttttttttgtatttttagtagagacaggctgttactcaggagttccttcgattttttttttttgtatttttgtatttttgccattttggccaggctggtcttgaacccctggactcaagtgatctgcttcggcttgccaaagtgctgggattacaggcatgagtcaacgtgcctggccaaagctcatttctttttaaactactcatttatctttcaatgtagacatgaaatctgcactataattttcattttcaggtcaaaatgtaatcatcttaatccctcatattcaaacaattattccatcagcatcagttttatgaattgagagatgttttcccaagtaaaaatgttctggatttctgtaggaatccgtgtggaaatgaaaccatttgccctgtgccacgcagcacaggactgtcccttctcatgttgatgagatgcagagcagccccgttctggaagattccttgcagccttggctggcagccggcgtccgtgcctcccaagggttcttccctctgtcgtttgaagggttcttcgtgatgccacagcgtgcccgaggctccctcagtgacgagcgcgatttgcaggggtggccctggcagaaagggttgggaaggtacagacctccacagagactgtgtgtgctcatttccgtggaaaaaggacaaggaggcagcaaagacagacccagcagcccaggaaagattcaaatgcgattttacagaacatctgccctaagtcaaaaccaaagaaggattcctttttatcaaaacttcactaacacagaacatgaaattgtttggctcctcctgctcatggagttacaggacctagaaggcgtgatggatggaggatgtcaaatgcgattttccaggaatcgcaatctgtgagtcagggagaagcagcggagggcaagagccagttgaaggaatttgtttttcttctttccttctagttgcctcttgaagtggatttaactaaagcgaagagacaagatcttgaaccgtctgtggaggaggcaagatacaacagctgccgaccgaacatggccctgggacacccacagctgcagcaggtgacctccccttccagacccagccatgctgtgataccggcggaccaggactgcagctcccggtatgcggcctaagtcccctcctttcctctgcggcccctcctgtgtcacggggctgcctccactcaggcctccagagccagccagccgtgcgtgtcctcccagcagccgcggctgttgctcaggagcccgtcctcgccgccgccctctcatgcagaagcctgagctcatccgccgtggagagcgaggccacgcaccagcggaagctccggcagaagcagctgcagcagcagttccgggagcggatggagaagcagcaggttcgagtctccacgccgtcagctgagaagagtgagggtgagcgaggggtgggagcagggccctgggaggcgtctgcaggaggaagtgtagccgcagggtcttctgattctctgcggtaaccctgggccggctccaaaccaggcctcgctgggacttctctcaagctacacgcag

SEQ ID NO: 15764 - DNA, 32965 bp, Homo sapiens
aagatctcttccccttgtccatagcctagatcgagctccctgtgtgcaccgcgcgctgcccgaggcgcgtaagtgggggaggagagcggcttcccccggggtggttctagccgtgggtgtggagcgtgggaaggctcagcttccgggtcgagaacctggggctgcggtggacctgatcctgaggtctcagcgtagagatgctgagtccagaggcctgttctagttcaccagtgcagtgaggggctcagtatccgggcctcccgagaggtgggtaggaaggcggggtacaggaaacttggcaccaacgcgccgggaccccaccgcggtgcggacagccaggtgtccgtggtggcgcttccttggagatgctgcctgcagacaggcgtggggaatctgaagtttgtgttaatagctaaacgaagttgagttgcagggagcgggggacgctgggaagaaatgattgatttaaaaggaatttgacgccgggcatggtggcggcatgcccccatgttccctggaggtcaagcctgcagtgagccgagatcgcacccgtaccacgacactccgtcccgggcgacagagcgagaccctgtcacgggggaaaaaataaaaataaaaatttgacgctcactttagctgagtattgagccttgttataacattgagatagaggtctggcgcggcgtctcacacctgtaatcccagaactttggaaggccgatgcgggaggatcgcttgaggccaggagttctacgccagcctggctaacatagcgaaaccccgtctctactaaaaatacaaaactaggcaggcctggtggcgggcgcctgtaatccccgctactcgggaggcggaggcatgagaatcgcttgaacccagtaggcaggtgtgccggtaagccgacatcgcaccactgcactccagcctgggggacagagcgagaatccatccaaaaaaaaaaaagttataattcacgtacaattaaattcactcccttttttaaaaaaaagtggagacatagtctcgctctgttgcccaggctggagtacagtggcgccgtctcggctcactgcaacgtccgcctcctgggttcaagcgattctttgcttcagcctctcaagtagctggaattacaggcgcataccaccacacccagctactttgtatttttcaccatgttggttaggctggtctcgaactcctcgcccttccaaagttcagggattacaggtgtgagccaccacacccagtctaaattcacccttttaaagtgtgcaattcagtggttttaatatattcacaaggttgtgcaatcaccactattatctaattccagaacatttttatcatccctaaaagaaaccttaaaaccattagcagacacccattatttcctcctactcccagcagcactaatctatgaatttacccattctcagtactgtattatacaatatttgttcttttgtgtttggtttatttcacttcatgattcaaagtccatctatgttgtatgtagcatgtatcaacttcattttttaaataactgaattatttattgtgtggatataccacattttgtttctccatttttgatggatactggtgattttctaggctttctaggtctagtcctccacagaactcgcagtctgaggcacagacatttaaaacttaagtttttggaaactagcatttaactcttgggttgggtcaggtaattcagtggcctcaggtctggtatcgtttagggcagttttttttttgttttttttttttttttgagatgaagtttcactcttgttgcccagggtggagtgcaatggcgtatctgggctcactgcaacctcacctcctgggttcaagcgcttctcctatctcagcctcctcggtaactgggcttacaggcgcatgccactatgcccggctaatttttggtatttttagtagagacagggtttcaccatgttggccatgctggtctcgaactcctgacctcaggtgatccacccatctcggcctcccaaagtgctgggattacaggtgtgagccaccgcgcctgggtgggagttttgtttttttgtttgtctgttgttttttggggggacagagtttctctcagcctcctcggtaactgggcttacaggcgcatgccactatgccaggctaatttttggtatttttagtagagacagggtttcaccgtgttggcaatgctggtctcaaactcctgacctcaggtgatccacccgcctcggcctcccaaagtgctgggattacaggtgtgagccaccacacctgggcgggagttttgtttttttgtttgtctgttgtttttttggggggacagagtttcgctcttgttgcccaggctggactgcagtggcgagatcttgactcactgccacttctgcctcctggattcaagcgattctcctgcctcagcctcccgagtagctgggattacaggtgtgcaccaccacacccggctaattttgtatttttagtagagaaggggtttctccatgttggttacgctggtctcgaactccctacctcaggtgatcctcccgccttggcctcccaaagtgttgggattacaggcgtgagccactgcgcccctctgggagtgttttttaaagtgttctattctcagttcaccacttaccaggccgttaattatcgtggtatcaagcagagaaatgtttgtgtgctggtcttctcagggaggcagaaaccgtcagagattgctgttgtgtaatgtacaccaaaacgtgttatcttgtagtataaacggtgtagttggagatgagtgtatgaaaaatgtaactgagctagctgtgggagagactagttgtgaaaaattttgagtcacccactgtatgctttcccagctatgttcaaataaggtgacactctgccttcctgtttcagctctaaaactgttcataagtgttattttggctgtatacgtagtgccatgtttttttgtatttttgtgcttttggtgattttgctgtttataggggcctccaagaatagaagtgctgtctagcatttccaagttgaaggctgtgatatatcttatagagaaaagataagcttttagattagctttgttcaggcatcacttttgttgttggctgtgagttcatgttactgcatcaacaatatatattaaataagatatctttaaacagaagcacacataaaacaaggttatgtattggcctgttgagtaaccctgtatttcccctgggagcagtggctcagtatttgctagttcagtgttcatgatggctttacaggacataactaccctgaataatgagaactgactgtctcagtagtgcttcaagggcagaaagcctagtggatatttttccatctctgcagcttttagcatttcttcactcaaggcactcatttttaatattgaactggcagttttgatgtggagagaagctaaaataaggctaaaatgctcttcatactatgtgctgagtggggactgtgctgagtgttggggattcagtgattagtgtatggccccgcagttctctaatggctgagtgtgggagtgcagagaaatgatcagtgtgagggaattaatcctatgttcccaccgtgtttttttgttttttttgagacggagtttcactcttgtcgcccaggctggagtgcggtggcgtgatctcggctcactgcaacctccgtctcccaggttcaagcgattctcctgcctcaacctcccgagtagctgggattacaggtacccgccaccgtgcccagctaatttttgtatttttagtagagacggagtttcaccatgttggccgggctggtctcgaactcctgacctcatgatctgcctgcctcggcctcccaaagtgctgggattactgggttcccacaaattttaagacttacttcaggccaggtgtggtggcttatgcctgtaatcccagcattttgggaggccgaggtgggcagatcacctgaggtcaggagttcgagaccagcctggccaacatggtgaaacccctgcctctactaaaagtacagaaaattagctgggtgtggtcgcgcatgcctgtagttccagctactcaggaggctgaggcaccagaatcacttgaacctgggaggtggaggttgcagtgagctgagattgcgccactgtactccagcctgggcaacagagtgtctccccctcaaaaaaaaaaagacatacttcagagtgtggtgagctgcataaggctttagaggtaatgacattttgagatttcaattaaaaattttttttctactttttttttttgagacagagtctcactcttgctcaggctagagtgcagtggtgcgatcttggctcactgcaaccttcgcctcctggattcaagcgattcttgtgccttagcctcctgaggagctgagattacaggcacctgccaccatgcccagctaatttttgtatctttagtagagaagaggtttcatcatgttagccgggctggtcttgaactcctgacctcaggtgatctgtctgcattggccttccaaagtgctgagattacagatgtgagccaccgtgcctggccactttttttctacttttgctaatttttttaaagtttcatgaacattatagtactgtgttcataaatgaaaataaaagaaacttgctccagtcttgttcatcaagccgttcttgaccttcacagtcagaatctcacccatcaccttgtcacatctccctcttgatctgtatatccagagtccacctgacatgcttcttcagccctccacatataataagaaatggttttgtgagccgagattgtgccattgcactgcagcttgggcaacagtgtgagactcctcaaaaaaaaaaaaaaagaaagaaaaatgcttttaggtgataaggaaatggagaagaataaaacatctttgccagtctttacctttttaatatcttgaattcatgatttcttgccatagccactatcctagtccaggctctctcccttctacccctgagttttttttttttttttttttaccatgtttttatttcctctgggaaaacacctatcagaattttgggatcatatgacagatacatatttaatttctttctttcttttttgagacagggtcttcctctgttgcccaggctggagtgtagtggtatgatcatggctcactgcagccttgaccccttcctcgcccccgctcaagtgatcctcccaccacagcttcctgagtagctgggactgccggcatgctccaccatgcccgactaacgttttgctgcttgtagagacagccatgttccctaggcttgtcttgaactcctgagcctcaagcgatccttccacttcagcctcaagtgctgggattacaggcgtgagccaccactcctggctacttaatttctttctttctttttttttgagacagtctcgttctgtcacccaggctggagtgcagtggggtgatctcttctcactgcagcctctaccttccaggctgaagcaagccttccacctcagccccctgagtagctaggactacgggaacattccaccaggcccagctaatttttgtattttttgtagagatggagtttcatgatgttggccaggctggtcttgaactcctcacctcatgcaatccgcctgcctcagcctcccaaagtgctgggattacaggtgtgagcaactgcacccagcgggccccgcccagacctattttcaaaattagaaaaccgtgaggcttctggaagaagatgagaagaatatcttcatgacctgagtgtgtgcaaaggtttcttagggctcaggatgccagagtcacttaaaaaagcaaaaaaaacccaaaaaaaaaaccacacacacaaagataaatatgattgattacatcaaaatgtaatcacagactactctaagaaaatgaatggggaaacacagggacctatttgacaaaagactgatattcaagataaataaagaactaataggccaggcgcggtggctcacgtctgtaatcctggcactttgggaggccgaggcggggggatcacttgagctcaggagttcgagaccagcctgagcaatatagtgaaaccccatctctactaaaaatacaagaattagaattagctgggcgtgatggcacgtgcctgtagtcccagttactcgggaggctgaggctggagaattgcttcagtcaggaagatggaggttgcagtgagccgagattgtgccactgcactccagcctgggcgactgaacaagacttcgtctcaaaaaaccagtagggctccaggcctgggattgggcctctgctgctctactccctggacgtgtggctccgtccttggagtcggcctttggttttcatgaagagtagtgtgcattaacagctgagtggttttatcagcctgtttcctgccaacagtgtatgagagttccagttgctttacatccttgccagcatttggtgttgtcagtcttttgagttattctgatgggtgtggtgtgtcatggtcttaattttagtcctcagtcactaatggtgtttagcactttttcctgtgcccatgacaatgtgcatcttcctttgtgaagtgcctgctcaaatcttttgcccattttacattgggttgtgtgtctttttattattgagttgtagcagttatttatataacctttatatcctggttacctgtcctctgtctggttgcctattcattttcttagagttgtctgatgaacagaagttttacattttgatgtaatcagttttctcttatattttcttttatagttactgctttctgagtcctaggaaatcttggctaccttcaggctgtgaagataatctttcatgttttcttctgtaagttttttttttttttgagacagagtcttgctctgtcgtccaggctggagtgcggtgatggcgatctccgctcactgcaacctctgcctcccaggttcaagcgattctcctgccccagcctcccgagtagctgggattacagacatgcgccaccatgcccaactaatttttgtatttttattagagacagggtttcaccaggttggccaggttggtcttgaactcttgaccttgtgatccacccgcctcggtctcccaacatgctgggattataggcgtgagccaccgtgcccggcctataaattttatagttttagttttatgtttaagcctatcacccatttctagtttaggtgaatggtgtgagatataattaaatattaatttcttttccatatagatatccagtcattccagcaccatttgttgaaaatgctattgtattgcgttttggaaattaagatgactgtacaaatggtaattgatgtctgcactcccttttctgttccattgttcaatccttgtgttagtaccacacttttaattactgtagctttttagtaagtcttgaagtcatgtagttgtaggtcttccaattttgttgttttcaagcttgatgtgaatattctaaatcctctgcatttccatataaatatcagaattatctttaccagttttacagaaaagtctggtaaagttgtgattgggattgcattgaatctatggatcaatttggaaagaaatgacacctaaacagtattgagtcttcaaatatatgaacttggtgcattttccttcttatttaagccttttaaaatttctttttaggccgggtgcagtggcttatgcctgtaatcccagcactttgggagtctgcagcgggcagatcagctgaggtcaggagttcgagaccagcctggccaacatggtgaaaccccgtctctactaaaaatacaaaaattagccaggtgtggtggcaggtgcctgtagtctcagctacttgggaggctgaggcaggagaactgcttgaacttgctcaggaggtggaggttgcagtgagctgagatagtgccattgcactccagcctgggcaacaagagcaaaactctgtctcaaaaaataataataataaaaataaaaattttgggccaggtgtggcggctcacacctgtaatcccagcaatttgggaggctgagccgggtggatcacctgaggtcaggagtttgagaccagcctgaccaacatggagaaaccctgtctctacgaaaaatacaaaatttgccaggcatggtggcgcatgcctgtaatcccagctactctggaggctgaggcaggagaatcacttgaacctgggaggcagaggttgcagtgagccgagatggtgccattgcactccagcctgggcaacaagagtgaaactctgtctcaaaaaaaaaaaattcttttagttctgttttatggttttcagttcagaagtcttatacatattttgttaaattgatttctagatatgtttcttacctttattgtaaaatggagccatcatttgcatcattcattactctgtatgtaatgtgttatcattctctacctgctttcaagattttctctttatttttgttttttagcagtttgtctgtggtgtatctaggtgtcattttatttgtatttatccggagatttattcttgagatttgcagagcttcttaaatctgtaaatttatgtctgtcggccaatttgggaaatttggagctattagttttaaaaatatttcttctgttccattctctttcacttcttctgtatgtgagttcaatttcacttcaattgtatgtgagttagacattttgatattagcccacaggatcctgaggttctttcattcttttcaatcttttttttttctcgaagtttgcatttcgtgagcaggagtgacagtcattcaggatgatttttgagattcctagttcaagagtagttcctattcttttctaggtgtagtcaagtatggcttctaattctactagaaggcttttttgtcggggaggtggttctatgtcctttggctcttacattttctttgtgtctttcacagcacagttttcagagggtaccctttctctttggttttgttttgttttgttttgttttagacggagtcttgctctgtctccaggctggagtgcagtggcgcaatcttggctcactgcaacctctgctcactgctacctctgcctcccgggttcaagcaattctcctgcctcagcttcctgagtagctgggactacaggcacgcgccaccacacccaactaatttttgtatttttagtagagactgggtttcatcatgttggcaaggctgttctccatctcttgacctcgtgatccgcccgccttggcctcccaaagtgctaggattacaggcgtgagccaccgcgcccggccaacagagggtaccctttcattctttttctccttcttcccagaaggcttgcgttttcaagactacctcatcaagttctgcatgtgtttaaaagtgtctctacccgaccttcccttcctccctcccgatttaacggaattctttgttggtgttttcatacttaccgtgagttttctttttcagggtgatattttagttccatcttaggctctccattgtcctcttctctcttctttttttttttgagacagagtctcattctgtcacccaggctggagtgcagtggtgtgatctctgctcactgcaacctctgcctcccaggttcaagtgattctcctgcctcagcctcccgaatagctgggattacaggcgcacacaaccacgcccacctaatttttgtattttcagtagagacggggtttcaccatcttggccaggctggtctcaaactcctgacctcgtgatccgcctgcctcagcttcccagagtgctgggattacaggcatgagccaccgcgcccggtgcgcccagccctcttctctcttctttgcatctctcttcctatctggatccctctttgctgtccttaaagagctgagatgagagattgagaaacatctctacaagaaattgacgtttttctacttatgggtaattagaagcttgtagtattttcagtcttctaagtatgttgaagatatgagacgttggtgattttctttgtttctccggttggttggtctgtgtagtttttggacatgtgtttggatatttggatttatatagctgccataatcttggctatgcaggtagtctttcctgacacttcatcctgaaagatttgaagcctttggacaaattttacagtgggctgggtgcagtggctcacgtctgtaatcccagtgctttgggaggctgggcaggaagattgcttgagcccaggagtttgagaccagcctggacaacatagtgagacccgtgtctctacaaaaaataaaaaatatgccgtgtgtggcgttatacaactgtagtcccagctacttaggaggctgaggtgggaagatcacgagccaaggagtttgagggtacggtgagccatgatcgcctcactgcactgggtggcacagcgagactgtctcaaaaaaaaaatttacaattaatgtctgcatatccttcacctaggttcataaatttgtacttttgctttatctacttgcctttttctctctctctacacacacacacacacacacacacacacacacaattagttgaatgaattgagagtaagttgcagaaaacatgacactttactccaatattgcatcatacaaaatcatacatctagtgataggccattgtcctacagaatcacgatataattatcacactaaccagctgtggtggtgcacacctgtagtctaagctactcgggaggctgaggcagaaggatcacctgagcccaggaggttgtggctgcagtctcatattcatcccatcatcagatttctcccattgtcctaataatattctttatagcttttctttatccctgatccgaaatttcattgaagatcacacagtgcatttagttgtcatgcctcttaagtctttatttatttattatttattttttgagatggagtcttgctctgttacccaaactggagtgcagtggcatgatcttggctcatgcaacctccacccgctgggttcaagtgattatcctgcttcagcctcccgtgttgctgggactacaggtgtgtgccaccatgcccagctactttttatatttttagtagagacgggaattgtaccatgttggccaggctggtcttgaactcctgagctcagatgatccacccgccttggcctcccaaagtgctgggattacaggcgtgggccaccacacccagccttaagcctcttttaacataaaagagttcaccagccattctattttgttttgctttttgagacactgatgctttggagagtccaggccagttgctttgtagatttcaacttgtttgattgtttcctgatgattaggttggtagaaatactacctcaatgatgggaccttcttagtgcgtccatcaggaagcacatgatgtgactgtaattggtgacattaagtttgattccttaataattaaggtggtaactcccaggtttctacattgtaaaggcatcttttgccgccctcctttttattcccaagtagtttatttggagattagtcctttacacagtagaggagcggggaagggagacaggaaaggaaagtttgacaacaaagggtgagttttcaagcctgttgccacgggggaacctaattccactggagaagctcatggcttggtgatgttccacagaggggtcagaaatttagcgtatttcaacaccagctcctgtcaggcaccatttgagggctgctgccagggtggttcaattttctggtgcttacagcttgccataaacaggtgcaaagtagtctggataccaaagaaagctctcaggtaacaagatgcagatgttggcatttggaagtcagaatagggtgcactattgtggtaagagctgaagggatggctgggcgcggtggctcacacctgtagtcccagcactttgggaggatgaggcaggcggatcacctgaggtcagaagttcgagagcagcctggccaacatgacgaaaccccgtctctactaaaaatacaaaaattagccaggcgtggtggtggatgcctgtaatcccagctattcagtaggctgaggcaggagaattgcttgaatctgggaggtgtaggttgcagtgagctgagatcacaccactctgcactccagcctgggtgacagagcgagactctgtctcagaaaaaaaaaaaagctgaagggatgctgagtagagcatccgtagtgtctgctatacctgggtaccctagaacctggagaacctacagcttgaggcaagagcgtatgtgctattattttttcaagaagtgtgctctcaggaagcagaggtaggggaaaggtgagtgaagggagaaggaagattaagtcagttcaagggtgcattttgaagttggttgcccttggtgcaagtacagttggttgcttgttctcctaaagctgtctcccaggaggatgtatacataactgcattccagggcaatccatctaaaggaagggtggacggacccctcagcttctgtatctcactggaaaaaggtttgcttcatggcacattaattcccatagacttctaggttgtgcatgtgtgggtaccaggtgggtcccacagacccttacacctccaaggcaagcagcaagccacgggtgggaagtgataggtacccagtatgagcaggaggtaagggaccgtggggttgtgcctgtgggcagttggttataacccagacgtgtttgatcagcccagtgacagctggagtggacaaagtgaccaagggcctcaaggacacacaaggccaagaagatttgaagtgctgtgtaagatatgcctaatgcatttggattctacctttgtttaacgaatatgcacacataaaaaacacttgaactccttgagcccaggagttcaagaccaacctgggcaacatagtgagacactcatctctaaaaaaattttaaaaaaaattaacctggcatgatagcactcacctgtagtcctgtctactctggaggccgcagtgggaggatcacctgagccctggaggtcaaggttacagtatgctatgattgcaccactgcattccagcctgggtaacagagcaagacgctgtctcttaaattttttttttttttttttttacttttataatggaaaaaccattgtagacagttttaggaaggaaagcagaatagtaagacatctttttcaaagtaaaagagcaaaaaaggcaaaaaatatttcacatttactttatggacaaagataagattgtccttcaataaaagactgaattttttttgtttgttttgttttgttttttgagaaagagtcttgctccattgcccaggctggaatgcagtggtgtggtctcggctcactgcaacctccgcctcccgggtacaagcaattctccagcctcagccccccgagtagctgggactacaggcacgcgccactgcatctggctaagttttgtatttttagtagagatggggtttcaccatgttgaccaggctcgtcttgaactcctgacctcaggttatccacctgcctgggcctcccaaagtgctgggattacaagtgtgagccaccgtgcccggccacaagttgctctttaaatgtgagaagtgttctggcatggtggctcacacctgaggcgggtggatcacttgaggtcaggagttcgagatcaggctggccaacatggtgaaaccccgtctctagttatttatttatttatttatttatttatttatttatttatttttttgagacggagtttcactcttgtttcccaggcgggagtgcaatggcgcaatctcggctcactgcaacctccgccttccgggttcaagcgattctcttgcctcagcctcctgagtagctgggattacaggcatgcaccaccacacccggctaattttgtatttttagtagagacggggtttttccatgttggtcaggctggtctcgaattcctgacctcaggtgatctgccctcctcagcctcccgaagtgttgggattacaggcgtgagccaccacgcccggccctgtctctactaaaaatgcaaaatttagccgggcatggtggcgcacacctgtaatctcagctactcaggagactgaagcagcagattcgcttgaacccaggaggtgaaggttgcagtgagctgagaccacaccactgcagggcagcctaggcgacaagagcgaaacgcttacaaaaaaaaaaaaaaaaaaagattcacaggtgatggtgatgctgctggttaaggaagtgaagtggctttttgctctgtagccttcctgaatgttggggcctcctgctcttcatttgtttcatttctattaagtctcctccctccagctatcttgttagctcctggaaagcatttcagtgattgtggcttctatttctttttgaccccacagtgtccagggtcatgctgcctatatagtagtgagcagtaagttgaggtttttaaaaactttattattattatttttgagatggagtcttgttctgtcacccaggctggagtgcagtggcacaatctcagttcactgcaacctctgcctcccaagttcaagtgattctcctgcctcagcctcccgagtagctgggactacaggcgcctgccaccacatccggctaatttttttgtatttttagtacagatggggtttcactatgttggtcaggctgatctcgaactcctgacctcaggtgatccgcctgctttggcctcccaaagtgttagggttacaggtgtgagccaccacacctggccggtttttttaaactttaaaacagattcacttgatttttcttccctaccccccagcttttttgaggtatgactgacaaaaattgtatatatttagggtgtacaatgtgatgatttgatatgtgaatgcactgtgaaatgattaccacagtcaaggtaattcacatatccaccacctcccagttaccctcttagctagtacaggttgggtattgcttctctgaaatgctttgggaccagaagtgttttggacttcagattttggaatatttgaatatatataatcagatatcttgggaaggggacccaagtctaaacatgaaattcatttgttttcagagcctaaagatgatttttttttttttttttttttgagatggagtctcactctcgcccaggctggagtgccgtggcacaatctcagctcactgcaacctctgcctcccaggttcaagcgattctcctacctcagcctcccaagtagctggaattacaggctcgcactaccacacccggctaatttttgtatttttataaagacatttcaccatgttggccaggctggtctcaaactcctgacctcaggtgatccgcccgcctcagcctcccaaagtgctgggattataggtgtcagtgactgcgtctggctgataattgaatttttctcttggagaagctgaataaactgtgtgttgtgtgcctgcctttttttttgtttttttttttttttgagacagagtcagacactctgtcacccaggctggagtgcgatggggtggtcatagctcactgcagcctcaaactcctgagctcaagcgatcctcccacatcagcctcctaagtagcatagcaccacgcctggctaatttttaaattttttgtagtgatggggttttgttgtctaggctagtctcaaactcctgggctcaagcagtccttctgccttggcctcccaaggtggtaggattataggtttgagccaccatgcctggccattacctgtgttttgactataacacatcatgttggcactcaaaacgttttggattttggagcattttgaattttggatttttggattagcaatgttccacctatagtacattttttgtttgctttcccataaagaattttttgtaattttgattttatagttctaaatgtaatatattcttattgtaaaaatcacctttaatagcaccgccagaatagcaaacatgttaacagaaaggtagaagtagaccttaaagaatcttcagcagcttgagagaccacagctaaccactgaggaactctgttctggattggagcagtgcttagaagcttataaataactcttagggtattgcatagggattctttttttttttttttcctgaaatggagtctcgctctgtcgcccaggctggagtgcagggtgtgatctcagatcactgcaacctccgcctcctgggttcaagcaattctttgcctcagcctcccgagtagctgggattacaggcgcctgccaccatgcccagctaatttttttggatttttagtagagagggggtttcaccatgttagccaggatggtctccatctcctgaccttgtgatccacccacctcggcctcccaaagtgctgggattacaggcatgagccactgtgcctggccgcataaggattctttatgtgatttttcagtagaggctcttgccttttactttaaacattctttgagggttgttttttttttccgctttttatttatatagaggtcaaccagaatcaagatgtctgggactgaggaagcaattcttggaggacgtgacagccatcctgctgctggcggcggctcagtgttatgctttggacaggtaactgtggttccttcatgccgggaaagaatgaggtgaagtgagtaaagttagggcaaggcagtttgtagagcatcgtagtacatgtgtgagcagtacctagtacgtttacctagtacgtgtgtgagcagtacctagtacgtttacctagtacgtgtgtgagcagtacctagtacgttgacgcggtgcgtgcgggggcagtacctagtacgtttacatagtacatgtgtgagctatttgttattggtttttcctttagatgcattttttgggagtcttgtgaactctggagggcattttggaatgttagctatcaaaagactgatagtactggggattagatttagattttaaattttttgtggggggggatagataacatatttgtatgacatcaaattcaaaatgaaactgtgaaaatctccctatttcctattgcccctgtgtgcatgccacccagttctatttcttttttttttcgagactgagtcttgctttgtcacccaggctgcagtgcagtggtgcgatctcagctcactgcaacttccaccctctggattcaagcaattctcctgcctcagcctcccaagtagctgggataacaggcatgcaccaccatggccagctaatttttatatttttagtagagatggggtttaaccatgttggccaggctggtctcgaactcctgacctcaggtgatccgcctgcctcggcctcccaaagtgtttggattacaggcgtgagccaccacgcccgggcttaatttttttgtatttttagtagagatgtggtttcaccatgttggccagggtagtcttgaactcctgacctcgtgatctgcctgcctcggcctcctaaatgctggaattacaggcatgagccaccgcgcctggctccagttgtctttcttggaggcatggaaagttactgggggtcctattccttgtagggacattgtgtgcacagaaaagagtttcttgctttgtccacccaaactccatctttgtctttagcagagagttgtgagtattcatctcatctgagcagggcaagggggacaaaacccaaatcagcaagcagtagtgtgtttctgtttgtgcaggatgggaaattgttgtattggagaaggcgtcaatctctggaaaggacaaatggaagcaaggcttcctacccccgtgctctttccgtacttgcttcctgtgctgacgtcatttacagatctggaggcagaacattttagcttcctaagcttcagaaacatttataaggatggtagcagcagctaaggcagcagttctcaaaatgcagttctcaaaaaccctggggtttctgaagatctttcagagtccagaaggtcaaaattatcttcataataatactatttgcctctttcacactcattgtctcatgagtgaatggtagagttttcagagagtgcatgatatgtggtgatgtcactgctatgatgcctaatggcatgcatgccttaaaagtttctcagttttgattcctaataggatacatagaacccacataaacaaaggttctggggggtctttttaagagtataaagtctccataaaggatggagactcaatgatgtgaggaatggtggaagtgtgaatttaattttcttttttggggttgcagtgccagtacacagcagaagagtaccaggccatccagaaggccctgaggcagaggctgggcccagaatacataagtagccgcatggctggcggaggccagaaggtaggagaattcatgtgcctggaaagcaggcatccataccgcagactccgatggtcttgccagttccctctctgggtcctcagggattcggaagtctgctgttaactgttcctggaggtctcccagtgcccctgggaggggatgggttccagacttcattctcatccgaaggggcctgggcatggtcttgacactcgcataaccgccgtcttaagatttttacatcatctttttttttttttatttttaaagacagggtcttgctctgtcacctaggctggagtccgaccagtggtgtcatctcagctcactgcagcctccacctcccaggctcaagcgatcctcctgcctcagcttcctgactagctgggactacaggcacacgccaccacacctggttaattttttaatgttctgtagagacgacatctcgccatgttgcccaggctgatctcgaactgctgggctcaagtgatcctcccacctcggcctcccaaagtgctgggattacaggtgtgggccaccatgcccagcctttacaccattaaaaaaaaaatgttccttttgccatttgctttttttttttaattaaacactttttaaagaacttatgattgacacataataattgcatatcatttgcttctaattttaacttctgtgtatatttttggtcttccataaaatatgtcaaacagatttgtactttttgcaaactgaattttagcaactgctgggtgagttcctcctcccaacagaccattcgttctcgcgggctccatctagaagatttttgaaataaattcattgagaattttcttgaaaaaaaaattttttttaacagactggttctcactctgtcacttaggctggagtgcagtggcacgatcctagcttactgcagccttgagctcctgggctcaagtgatcctcccacctcagcctcccgagaagaatgtttaaggacagtttatcgaaaaaagtagatgaggaataaattatgtcaattttgattcacatttaagtgtggtaaggaattaacacagcttttccttaaaaacatttgtttttctaggtgtgctacattgagggtcatcgggtaattaatctggccaatgagatgtttggttacaatggctgggcacactccatcacgcagcagaatgtgggtgagtatgctctccagcagtggggacttctgcactgtccagctcctgctgaaagtctgctgtgggtgaggaggtaaggtaggtggactcagctgccagcaggaggaatggttgtggcccagcggtcagtgtcctcttcaacttgctctctttcccactcctagattttgttgacctcaacaatggcaagttctacgtgggagtctgtgcatttgtgagggtccagctgaaggtgaggggatggagtagacctgctgcccggaaggatcagtgggtggtaggagaaggtgagcaggtagggaagtaggtagctggacggggacccaggctccagagttgtgtctcagccagcgttccctagagtggtggaattcaaatactcttgctcatgtgctccctaaaagaatggaaaaactgttctcttgcacatgttcaagctgacacctaaaagttttcaccatatataaaaattgttgcaaaggatgtattttttggcatatggtaaaatctgacattttaaaatacaataattttaccatcactgataagtgtttggaaactcaactttaggcaaagcaggtccttttgttataacattgatgaaaacaaaaatatgttttgttaataagttgtttcacttcaagtcacagttatttaaggtgttaagtgagcacttaccgtaaatctgttgaatcttgttaaatattccagtggactctaaatactatagaggataagatctatcatttatttgaagaaatacaatgaacaagcttttttttaatcattagaaattttacattgttctttctttatctgaactcatatttctattctatttccccactggttttaatcctaatacatatttatggttgaaagtttggctaggcggggtggctcattcgtgtaaccccagcactttgggaggcccaggtggaaggactgcttgagcccagggatttgagaccagcctgggcaacatagcgaaagcccgtctctactaaaaatacaaaaaattagctgggcatggtggtgtatgcttgtagtcctagctactcaagaggctgaggtgggaggatcacctgagcccaggaagtcgaggctgtggtgagctgtgattgcgccactgaactcctgggtggaaaaaaagaaaagttttatcggtagccttactgtgcttctctgcctttgcctgtgtataaaaataaaaatttttggtaaattttcagtgcacttaaggctctaaatattaaaatatttcttttggatttagttatattatagctactgttaacacacaattgaccagacaattgtgtttatggtgaagagaaaacataaatacagcaaaattttgatacttagaaaaattaaagatatgaaatcttgccacaaaaataaaaaatttaaaatataaaatttatggaaaatgtatatcttaatgagatggatggtgctgttttttcttttcagttagtttatatatccatatatccataactgaatattacttacttcttttttttttttgagatggagttttgctcttgttgcccaggctggagggcaatggttcaatctcagctcaccgcaacctccacctcctgggttcaagcgattctcctgcctcagcctcccaagtagctgggattacaggcatgcgccaccccgcccgcctaattttttgtgtgtgttttcagtagagacgcggtttctccatgttggtcaggctggtctggaactcacaacctcaggtgatccacccgccttggcctccaaaagtgctgggattacaggcgtgagccaccgcacccggcctacttatttcttgaatgaacaattcagcattaattctattctgacttatttttctaaatagtactaaaaaatcttgtatctatgagtgagtagctgagaatggaaagaattgtgttatagtgtcactcatttatttgagtgctttctgagttattttttaaaaatcacagagcgctgtcatcaaacattgtatttaattctcaatcagcgaatgatgtgctcaggtccaccttctcttttggtgagaggcaggagctggacgccacctgatttacaaagggtttgctctcccgtccttacagaccattagatccagtgttcaaatcatccctttgtttcatatcccagaggtttttttttttccaagacgtagtctcactctatcacccaggctggagtgcagtggtgcaatctcggctcactgcaacctctgcctcccaggttcaagtgattctcctgcctcagtctcctgagtagctgggattacaggtgcccaccaccacacccggctaatttttgtatttttagtagagatagggtttcaccatgttgaccaggctggtcttgaactcctgacctcaagtgatccacctcccttgacctcccaaagggctgggattacagcgtgagccaccacgcccggcccggccatcccagaggttttttttaccttagggtgatgcacactgataggatttggggtgagtttctaatgtgccctttgtgtgttgggaagttgggaagggaggatcgtcttgacaccttgaccgcaggcacatgtccaggcagcccaggtctaggaagcagcactcgcgatggattctcacccagccttctgcccgtgcccctgtagcaaggccgccaggtgggagagtccggctttgaaccctgctgcttgaggaacaggggagttgtggcacgcctgccgctctcgtgtttgagttcaaactccttttctgcccccaggatggttcatatcatgaagatgttggttatggtgttagtgagggcctcaagtccaaggctttatctttggagaaggcaaggaaggaggcggtgacagacgggctgaagcgagccctcaggtgagcgcggggctgggagtctaacctgcgtcatttcagctcttgcttcagagcagatttcgattttttttggaagaggtaacacatccacatggttcaaaaatccaagcagcgtggaaggtaattctcacccctgccctggttcctgtctgccgttttcccactttcgttagtattttttcaatgtttctgtttcaggcttcccttgctgggagtaagtggtagaatcctgtactctctcttctccgtgcactcagtcatgtgtgccggaggccttcccactcctactgcgagtgcacagacagcaccctcctctccgtgctcctcagcagtcctccgctacgcacaggtagcatagttaacgtagttacacagtcacgcagatgtccgtgttagtccatttatgttgctatacaggaataccagaggctgggtaatttataaataaaggaggtttgattggcttatgattctgtggactgtactggaagcctggtgccagcatccacttctgctgaggcctcaggaagcttctaatcatggcagaaggtgaagagggaacgtggagagagagggagcaagagagagaaggaaggagtcccaggcttatttatttattttattgttgtttttcattttttgagacagggtcttgctctgttgcacaggctggggtgcagtggtgccgtcatcgctcagtgcagccttgaactcctgggctgaagtgatcttcccgcctcagcctcccgagtagctgggatcacaggcacataacaccacccccagttaattaaaaaaaaatttttttttttttggagagacagggtctccctttgttgcctaggctggtctcaaactcctgggctcaagtcatcctcctgccttgtgcctcccaaagtgccgggatcacaggcatgagccatcatgcccagcccccacactcaaaaccaccagatctctcatgagctgagtgagaactcactcaacaccaaggggatggcactaagctgtttatgaggaatccagccccaggatccagtacctcccaccaggccgcaccccccggcattggaggtcacgtttcaacatgaaatttggaggggataaacatccaaaccatatccgtgtctttgagaattgaagtgaattgaaccagaaaaacctatgagttctgtgggggagtccgtagatcccaagttaagaactctggtcatgggaggttgtgcccttgagcccccggtccccaagtgtgtgttgcctactcctgctgggaaattggagcagcctttggggggaaaaaaaagaaaaactctctgcagtttgttctccatgtcaggaggtggctggtgggttttgtgaatggcgccgtaatcttttcatactcatcttctctgtgagggcagggacttgtgtcttgtcctcactgcagtattctcagaaactaacacagtgcaggaacatgctagatgcttaccagacatcaatggggaatgcatgttagggtccacttcctctgctgctcctgagaagcaacctgtacaaaagttgtaattctattctctgatattcatgtgtaacaattcttaaccctgtttcacctttttttctcttgcccttaggagttttgggaatgcacttggaaactgtattctggacaaagactacctgagatcactaaataagcttccacgccaggtatatcagacatggatgagtggagtgaagataatgcggcaaactcttgtgtgtcatgggttgagtatttggaggatgcaaggagaaaaagtgaggactcagctctttagagggtcgggaatgttgatttcagatttcgaatgttagagacagcaggaactaatcccaacattttccttttttctaaagtacatcatgtgggccggggaccgtggctcacgcctggaatcccagcactttgggaggtggaggcaggtggatcacaaggtcaggagatcgagaccatcctggctaacacggtgaaaccctgtctctactaaaaatacaaaaaattagccgggcgaggtggtgggcgcctgtagtcccagctactcgggaggctgaggcaggagaatggcgtgaacccgggaggcagagcttgcagtgagccgagatggcaccactgcactccaacctgggcgacagagccagactccgtctccaaaaaaaaaaaaaaaaaaaatcacaccatttgacaagaatgtgaggtctagagaatttgtgtacgtgtaggtagtgaactgtggttgggggtagtctgtgaagcctcaaagcaagcacacagccctctgcagcaccactgtccttcccagacactcccagcctcgctgttgagccttctttcttttccttagttctggtgtcattacatgtctgatgtcattacaatgtcatttacatgtccattatttctgtcaatacctataacgtgatctgagcctttgcctttggagaatggggtctgtggtggggcagccctggagtcacactgccttgccatgagtggcttctggagtgttcctcctgcctcatctgctctccgaggtccctgccatgtcgctccccagggcagcattcccatcctgtgcctgagggattcttgtcctcatggagccccacaaggtgtgtgtcactgggcatctgtaaaaactcctttaaaaaaatcatttttaaacattattggattcagtttgctaatattttgttagacttttttttttgagacggagtctcgctctgtcgcccaggctgaagtgcagtggtgtgatcttggctcactgcaacctctgcctcctgggttccagcgatgctcctgcctcagcctcctgagtagctgggattacaggtgtgtaccaccacgcctggctaatttttgtatttttttagtagagacggggtttcaccatcttggtcaggctggtctcgaattcctgacctcatgattcgcctgcctcggcctcccaaagtgctgagattacaggcgtgagcccccgcgcccggcctttgttaggcatttttgcatctatgtttatgagagatattagtcaagttttctttttctttttttttttttgagatagtctcactctgtcgcccaggctggagtgcagtagtgtgatctcagctcactgcaacctctgcctcccgggttcatgccattctcctgcctcagcctcccaagtcgctgggactacaggtgccagccaccaccatgcccagctaatttttttatttttagtagatggggtttcgtcctgttggccaggctggtcttgaactcctgacctcaagtaatccgcctgcctcggcctccgaaagttttgggatgacaggcgtgagccaccgcacccggccttttctttttttaaattgtagtaaaacacatcacattttaactatttttagtgtgtggtcgagtagtgttaagtgtattcccattgttgtgaaattgatctgcagaactaagaccctgcacccgtaaaacaagaactccgcatttccccctttcccagacccttgtaactacttccactttctttcctttttttttttttttaatttattttatgaaagatgaggtcttgctctgtcagccaggctggaatgcaggagtgccatcataattcactgcatccttgcactcctgggcccaagggatcctcctggatcctcctgcctcagcctctcaggtggctgggactacaggtatgtgccagtgcacctagctaatttattttttaaacaattattactattttttttgtagagacagaatttctcagggctggtcatgaactgctgggctcatgtgatcctcctgcctcggcctcccaaagcgctgggattgcagcgtgggccactgtacctggagccagctaattaactttttttgggggcttttttttttaagaggtgagttcttgctatgttgctgaggctggtcttgatctttttttcttttttaaaaaattaggttaggcgctgtggctcctgcctataatcctagcactttgggaggccgaggtggttagatcacttgagcctaggagtttgagaccaccctggccaacatggtgaaaccctgtctctactaaaaaatacaaaaatcagctgggcatggtggtcagcctgcctgtaatcccggtggtcagcctgcctgtaatcccagctcttctggaggctgaggcatgagaatcgcttgaacctgggaggtggaggctgcagtgagccaagattgcactactgcactccagcctgggagacagagtgagattctgtctcaaaataataataataaaatataaaaataaaatacttttttgtgtgtggtcatggagttttgctattgcccaggctagtctcaaactcctggctacaagcgatcctcccactcagcctccttaagtgctgagattataggtatatgtgtctactttctgtttctgtgaatttgtctactctggatacctcatataaatggaatcacataatttttgctttttgtgactggcttatttcacttagctagcattaatgcctttaagattcatccatgtagtagtgtgtatcagaattcccttctttttgtggctgaatattctgttgtatatatagaccacattttgtttatgcattcatttggtgatggggatttgggttgctttcaacctcttggctattgtgaataatgctgctatgaacgagggtgtgtaactctctttgagatcttgctttcaattcttttagacatattctgaaggggattgctgggtcatggtaatcctatttttaatttttcgaggagctgccacactgattttcatacagttgccccattttaccattccaccaacagggcacatgagttcagatttttctaaatcctaaccagcacttgttattttctgagtttttggttttttttttttttttttttttaagccaacctaatgggcgtgatattttattggggttatgatttgcatacccctgatgattagtgatgttgaccatattttcttttttgagacagaatctcactctgttacccaggctggagtgcagtggcacaatcttggttcactgcaacctctgcctctgggttcaaacaattctcctgtctcagcctcccaagtagctgggactataggcgcctgccaccatgccgggctaatttttgtatttttagtagagatggggtttcaccatgttggtcaggctggtctcgaactcctgacctcaggtgatccgcccgccttggcctcccaaagtgatgggattacaggtgtgagcccccgcacccagccaaccatattttcatatgcttgttggccatctgtttatcgtctttggagagatgtctattcaagtcctttgtcattttattttgttttattattttaatttaatttcttttattcatctcatctcatctcatctcatgacaagatctcgccctgtcacccaggctggaatgcagtggtctgatcatggcttggctccctggagcctcgacatcctgggcttgagtgatcctcccacgcaggctggagggcagtcgtgtgatctcggctcactgcagcctctatatcccagactcaaatgatcctcctgccttagcctcccaagtagctgggactacaggcatttgccaccatgccaggctaatttttttattttttgtacagaatacaaaaaattttaccgtgttgcccaggctggtctcaaactcctggcctcaagtgatccacctgccttggcctcccaaaatgctgggataacaggcgtgagaaacccatatggcccaactcctacttttattgagctttttcgtattgtttttgtattctctctttcacttatgtttgctgtcatctttttagaatttcctttcttctagctttgggtgtaactttttttttctagttctttgaggtatagcgtagatttgagatcttttttttttaactatgtgtgtaacttccctcttacgacttctttccctgcaccccagaagtttggtaggttgtgttgtagtatcatttgtctctgggaattcttctaagttggcttgttacatttcctttgactttaagagtgtggtgtttaatttctactgatttgtggattttccagttttctttttgctgttgatttctagtttcattccattgtgattgaaaagatactttatatgatttcaatcttgaatttgttaggacttgttttgtggcctaacatgtagtctgtcttggagaatgttccatgtgtacttgagaagaatgtattttctgctattggtgggtggaatgttatgtatatgactgttaggtccagttggcctatagtattgttcaaatactctatcgccttattcatcttttgtttggttgttttatctattattgaaagttgagtagtgaagtctcctactattattgtgttgcttttatttcaccttacaatcctctcaaagtttgcttcatatatttaggacctctggtgtttggtgcataaatatttataattgttatatcttcttggtgaattgacattcttttttttttttttgagacggagtctcactctgtcgcccaggctggagtgcagtggcggtgcgatctcagctcactgcaggctctgcctcctgggttcacaccattctcctgcctcagcctcctgagtagctgggactacaggcgcccgccacctacgcccggctaattttttgtatttttagtagagacggggtttcaccatgttagccaggatggtctcgatatcctgacctcgtgatctgcccacctcggcctcccaaaatgctgggattataggtgtgagccactgcacctggctgacattcttatcattatataatactctcgtctcctataacaattttttttttttttttgagacggagtcttgctctgccgcccaggctagagtgcagtggtgcgatcttggctcactgcatcctttgcctcctgggttcaagcagttctcctgcctcagcctcctgagtagctggaactacaggtgcgtgctaccatgcccggctaattttttttttttttgagacagagtttttgctcttgttgcccaggctggggtgcaattgtgtgatctcggctcactgccatctctgcctcccaggttcaggcaattcttctacctcagcctcccaactagctaggactacaggtgtgtgccaccacacccagctaattttttgtattttgtagagagggggtttcaccatgttggtcaggctgatcttggactcttaacctcagatgatccgcccacctcggcctcccaaggtgttgggattacaggcgtgagccaccacgctgagcccagatttttttttttttttttagacagagtcttgctctgtcgcccaggctggagtgcagtggcgctatcttggctcactgcaacctccgcctcccgggttcaagcgattctcgtgcctcagcctcctgagtagctgggactacaggcgcccaccaccacacccaactaatgtttcgtattttttagtagagcggggttttgctgtgttggccaggctggtctcaaactcctgggctcaagtgatcaatccacctgccttggcctcccaaagttctgggattacaggtgtgagccactgagcctggccccaaatttctctttttttgttgttgagacggaatttcactcttgtcaccgaggctggagtgcaatgttgtgatcactgcaacctctgcctcgtgggttcaagcgattctccagcctcagcctcccaagtaactgggattacaggcgcccgccaccatgcccggctaatttttatacttttagtagaaatggggtttcgccatgttggccagggtgatctcaaactcctgacctcaagtgatccacctgcctcagcctcccaaagtgttgggattacaggcatgagccaccatttcctaagtgagcacagctgttcacctcccagatagagaatcagacctttaccagcagcccagaagccccattttgccctcttccagtcactgccttgctttccttttttcaaaagtaactactatcctgtcttctattctgacttccatggattattttttcctgtttttgaactttatatatgtaaagttcacaaatggaattgtactgtaagtggaattgtacagttcatattttaagaaaattgaccgaagtatgaaaaagaacatatagacaggttagacgagtgcacgtatcatccatgctcagcttgatgaattttccaaccaaacacatccacacagccaacatctgaatcaagacactgccagtaccgagaaggcccagctgtgttccttgcagtcactgccatcccctgccctccttcccactctgagcaaaccgcttttaacaacacagattggccgggtgtggtggctcactcctgtaatcccaccacttgagaggccaaggaagaaggattgcttgagcccaagagttggagaccagccaggacaacatagtgggaccctgtctgtacgaaataaaaataaaaataaaaataaaaattagctgggcctggtggtggcgcctgtagtcccagctgcttgggaggctgggctgggagaatcatttgagcctaggaggcccaggctgcagtgagctgtgattacgccactgcactccagcctgggccacagagcgagaccctctctcaaaaaacaaaacaaaaaacaaagaaagccaccaatttgtttttattgttatgtacttttttggaatcctacagtttgaactctttgtatcttacttgaattcagcatggttgtgagattcattcatggtacgagcagcagtttcattgctgtataattttcttttgcatgagtatgtggcaatttatttttctagtcttttcttagtagacattttggtttttgtagcttgtggctgtttcgattagagatgctgttagcattcttttgctgtacagttgcactcatttttgttgggaattattgggggagaagataggtacgtgtttagttttagtaggttcttcccgttttcctgtatggttgtattaattcacaccccacgtggcattgcgtaagttccaattgttctgtatctttgacagcacttggtatcgccagtctttcatatttttcaaagctcgtttcttttttttgagacacagtcttgctctgtcgcccaggctggagtgcggtggtgcgatctccgcccactgcaacctctgtctcccaggtttaagtgattctccctgcctcagcctcccgagtagctgggattgttggtgtgtgccaccatgcccagctaatttttttttttttttttttgtatttttagtagagacaggctgttactcaggagttccttcgattttttttttttgtatttttgtatttttgccattttggccaggctggtcttgaacccctggactcaagtgatctgcttcggcttgccaaagtgctgggattacaggcatgagtcaacgtgcctggccaaagctcatttctttttaaactactcatttatctttcaatgtagacatgaaatctgcactataattttcattttcaggtcaaaatgtaatcatcttaatccctcatattcaaacaattattccatcagcatcagttttatgaattgagagatgttttcccaagtaaaaatgttctggatttctgtaggaatccgtgtggaaatgaaaccatttgccctgtgccacgcagcacaggactgtcccttctcatgttgatgagatgcagagcagccccgttctggaagattccttgcagccttggctggcagccggcgtccgtgcctcccaagggttcttccctctgtcgtttgaagggttcttcgtgatgccacagcgtgcccgaggctccctcagtgacgagcgcgatttgcaggggtggccctggcagaaagggttgggaaggtacagacctccacagagactgtgtgtgctcatttccgtggaaaaaggacaaggaggcagcaaagacagacccagcagcccaggaaagattcaaatgcgattttacagaacatctgccctaagtcaaaaccaaagaaggattcctttttatcaaaacttcactaacacagaacatgaaattgtttggctcctcctgctcatggagttacaggacctagaaggcgtgatggatggaggatgtcaaatgcgattttccaggaatcgcaatctgtgagtcagggagaagcagcggagggcaagagccagttgaaggaatttgtttttcttctttccttctagttgcctcttgaagtggatttaactaaagcgaagagacaagatcttgaaccgtctgtggaggaggcaagatacaacagctgccgaccgaacatggccctgggacacccacagctgca

SEQ ID NO: 15765 - DNA, 35774 bp, Homo sapiens
tctcttccccttgtccatagcctagatcgagctccctgtgtgcaccgcgcgctgcccgaggcgcgtaagtgggggaggagagcggcttcccccggggtggttctagccgtgggtgtggagcgtgggaaggctcagcttccgggtcgagaacctggggctgcggtggacctgatcctgaggtctcagcgtagagatgctgagtccagaggcctgttctagttcaccagtgcagtgaggggctcagtatccgggcctcccgagaggtgggtaggaaggcggggtacaggaaacttggcaccaacgcgccgggaccccaccgcggtgcggacagccaggtgtccgtggtggcgcttccttggagatgctgcctgcagacaggcgtggggaatctgaagtttgtgttaatagctaaacgaagttgagttgcagggagcgggggacgctgggaagaaatgattgatttaaaaggaatttgacgccgggcatggtggcggcatgcccccatgttccctggaggtcaagcctgcagtgagccgagatcgcacccgtaccacgacactccgtcccgggcgacagagcgagaccctgtcacgggggaaaaaataaaaataaaaatttgacgctcactttagctgagtattgagccttgttataacattgagatagaggtctggcgcggcgtctcacacctgtaatcccagaactttggaaggccgatgcgggaggatcgcttgaggccaggagttctacgccagcctggctaacatagcgaaaccccgtctctactaaaaatacaaaactaggcaggcctggtggcgggcgcctgtaatccccgctactcgggaggcggaggcatgagaatcgcttgaacccagtaggcaggtgtgccggtaagccgacatcgcaccactgcactccagcctgggggacagagcgagaatccatccaaaaaaaaaaaagttataattcacgtacaattaaattcactcccttttttaaaaaaaagtggagacatagtctcgctctgttgcccaggctggagtacagtggcgccgtctcggctcactgcaacgtccgcctcctgggttcaagcgattctttgcttcagcctctcaagtagctggaattacaggcgcataccaccacacccagctactttgtatttttcaccatgttggttaggctggtctcgaactcctcgcccttccaaagttcagggattacaggtgtgagccaccacacccagtctaaattcacccttttaaagtgtgcaattcagtggttttaatatattcacaaggttgtgcaatcaccactattatctaattccagaacatttttatcatccctaaaagaaaccttaaaaccattagcagacacccattatttcctcctactcccagcagcactaatctatgaatttacccattctcagtactgtattatacaatatttgttcttttgtgtttggtttatttcacttcatgattcaaagtccatctatgttgtatgtagcatgtatcaacttcattttttaaataactgaattatttattgtgtggatataccacattttgtttctccatttttgatggatactggtgattttctaggctttctaggtctagtcctccacagaactcgcagtctgaggcacagacatttaaaacttaagtttttggaaactagcatttaactcttgggttgggtcaggtaattcagtggcctcaggtctggtatcgtttagggcagttttttttttgttttttttttttttttgagatgaagtttcactcttgttgcccagggtggagtgcaatggcgtatctgggctcactgcaacctcacctcctgggttcaagcgcttctcctatctcagcctcctcggtaactgggcttacaggcgcatgccactatgcccggctaatttttggtatttttagtagagacagggtttcaccatgttggccatgctggtctcgaactcctgacctcaggtgatccacccatctcggcctcccaaagtgctgggattacaggtgtgagccaccgcgcctgggtgggagttttgtttttttgtttgtctgttgttttttggggggacagagtttctctcagcctcctcggtaactgggcttacaggcgcatgccactatgccaggctaatttttggtatttttagtagagacagggtttcaccgtgttggcaatgctggtctcaaactcctgacctcaggtgatccacccgcctcggcctcccaaagtgctgggattacaggtgtgagccaccacacctgggcgggagttttgtttttttgtttgtctgttgtttttttggggggacagagtttcgctcttgttgcccaggctggactgcagtggcgagatcttgactcactgccacttctgcctcctggattcaagcgattctcctgcctcagcctcccgagtagctgggattacaggtgtgcaccaccacacccggctaattttgtatttttagtagagaaggggtttctccatgttggttacgctggtctcgaactccctacctcaggtgatcctcccgccttggcctcccaaagtgttgggattacaggcgtgagccactgcgcccctctgggagtgttttttaaagtgttctattctcagttcaccacttaccaggccgttaattatcgtggtatcaagcagagaaatgtttgtgtgctggtcttctcagggaggcagaaaccgtcagagattgctgttgtgtaatgtacaccaaaacgtgttatcttgtagtataaacggtgtagttggagatgagtgtatgaaaaatgtaactgagctagctgtgggagagactagttgtgaaaaattttgagtcacccactgtatgctttcccagctatgttcaaataaggtgacactctgccttcctgtttcagctctaaaactgttcataagtgttattttggctgtatacgtagtgccatgtttttttgtatttttgtgcttttggtgattttgctgtttataggggcctccaagaatagaagtgctgtctagcatttccaagttgaaggctgtgatatatcttatagagaaaagataagcttttagattagctttgttcaggcatcacttttgttgttggctgtgagttcatgttactgcatcaacaatatatattaaataagatatctttaaacagaagcacacataaaacaaggttatgtattggcctgttgagtaaccctgtatttcccctgggagcagtggctcagtatttgctagttcagtgttcatgatggctttacaggacataactaccctgaataatgagaactgactgtctcagtagtgcttcaagggcagaaagcctagtggatatttttccatctctgcagcttttagcatttcttcactcaaggcactcatttttaatattgaactggcagttttgatgtggagagaagctaaaataaggctaaaatgctcttcatactatgtgctgagtggggactgtgctgagtgttggggattcagtgattagtgtatggccccgcagttctctaatggctgagtgtgggagtgcagagaaatgatcagtgtgagggaattaatcctatgttcccaccgtgtttttttgttttttttgagacggagtttcactcttgtcgcccaggctggagtgcggtggcgtgatctcggctcactgcaacctccgtctcccaggttcaagcgattctcctgcctcaacctcccgagtagctgggattacaggtacccgccaccgtgcccagctaatttttgtatttttagtagagacggagtttcaccatgttggccgggctggtctcgaactcctgacctcatgatctgcctgcctcggcctcccaaagtgctgggattactgggttcccacaaattttaagacttacttcaggccaggtgtggtggcttatgcctgtaatcccagcattttgggaggccgaggtgggcagatcacctgaggtcaggagttcgagaccagcctggccaacatggtgaaacccctgcctctactaaaagtacagaaaattagctgggtgtggtcgcgcatgcctgtagttccagctactcaggaggctgaggcaccagaatcacttgaacctgggaggtggaggttgcagtgagctgagattgcgccactgtactccagcctgggcaacagagtgtctccccctcaaaaaaaaaaagacatacttcagagtgtggtgagctgcataaggctttagaggtaatgacattttgagatttcaattaaaaattttttttctactttttttttttgagacagagtctcactcttgctcaggctagagtgcagtggtgcgatcttggctcactgcaaccttcgcctcctggattcaagcgattcttgtgccttagcctcctgaggagctgagattacaggcacctgccaccatgcccagctaatttttgtatctttagtagagaagaggtttcatcatgttagccgggctggtcttgaactcctgacctcaggtgatctgtctgcattggccttccaaagtgctgagattacagatgtgagccaccgtgcctggccactttttttctacttttgctaatttttttaaagtttcatgaacattatagtactgtgttcataaatgaaaataaaagaaacttgctccagtcttgttcatcaagccgttcttgaccttcacagtcagaatctcacccatcaccttgtcacatctccctcttgatctgtatatccagagtccacctgacatgcttcttcagccctccacatataataagaaatggttttgtgagccgagattgtgccattgcactgcagcttgggcaacagtgtgagactcctcaaaaaaaaaaaaaaagaaagaaaaatgcttttaggtgataaggaaatggagaagaataaaacatctttgccagtctttacctttttaatatcttgaattcatgatttcttgccatagccactatcctagtccaggctctctcccttctacccctgagttttttttttttttttttttaccatgtttttatttcctctgggaaaacacctatcagaattttgggatcatatgacagatacatatttaatttctttctttcttttttgagacagggtcttcctctgttgcccaggctggagtgtagtggtatgatcatggctcactgcagccttgaccccttcctcgcccccgctcaagtgatcctcccaccacagcttcctgagtagctgggactgccggcatgctccaccatgcccgactaacgttttgctgcttgtagagacagccatgttccctaggcttgtcttgaactcctgagcctcaagcgatccttccacttcagcctcaagtgctgggattacaggcgtgagccaccactcctggctacttaatttctttctttctttttttttgagacagtctcgttctgtcacccaggctggagtgcagtggggtgatctcttctcactgcagcctctaccttccaggctgaagcaagccttccacctcagccccctgagtagctaggactacgggaacattccaccaggcccagctaatttttgtattttttgtagagatggagtttcatgatgttggccaggctggtcttgaactcctcacctcatgcaatccgcctgcctcagcctcccaaagtgctgggattacaggtgtgagcaactgcacccagcgggccccgcccagacctattttcaaaattagaaaaccgtgaggcttctggaagaagatgagaagaatatcttcatgacctgagtgtgtgcaaaggtttcttagggctcaggatgccagagtcacttaaaaaagcaaaaaaaacccaaaaaaaaaaccacacacacaaagataaatatgattgattacatcaaaatgtaatcacagactactctaagaaaatgaatggggaaacacagggacctatttgacaaaagactgatattcaagataaataaagaactaataggccaggcgcggtggctcacgtctgtaatcctggcactttgggaggccgaggcggggggatcacttgagctcaggagttcgagaccagcctgagcaatatagtgaaaccccatctctactaaaaatacaagaattagaattagctgggcgtgatggcacgtgcctgtagtcccagttactcgggaggctgaggctggagaattgcttcagtcaggaagatggaggttgcagtgagccgagattgtgccactgcactccagcctgggcgactgaacaagacttcgtctcaaaaaaccagtagggctccaggcctgggattgggcctctgctgctctactccctggacgtgtggctccgtccttggagtcggcctttggttttcatgaagagtagtgtgcattaacagctgagtggttttatcagcctgtttcctgccaacagtgtatgagagttccagttgctttacatccttgccagcatttggtgttgtcagtcttttgagttattctgatgggtgtggtgtgtcatggtcttaattttagtcctcagtcactaatggtgtttagcactttttcctgtgcccatgacaatgtgcatcttcctttgtgaagtgcctgctcaaatcttttgcccattttacattgggttgtgtgtctttttattattgagttgtagcagttatttatataacctttatatcctggttacctgtcctctgtctggttgcctattcattttcttagagttgtctgatgaacagaagttttacattttgatgtaatcagttttctcttatattttcttttatagttactgctttctgagtcctaggaaatcttggctaccttcaggctgtgaagataatctttcatgttttcttctgtaagttttttttttttttgagacagagtcttgctctgtcgtccaggctggagtgcggtgatggcgatctccgctcactgcaacctctgcctcccaggttcaagcgattctcctgccccagcctcccgagtagctgggattacagacatgcgccaccatgcccaactaatttttgtatttttattagagacagggtttcaccaggttggccaggttggtcttgaactcttgaccttgtgatccacccgcctcggtctcccaacatgctgggattataggcgtgagccaccgtgcccggcctataaattttatagttttagttttatgtttaagcctatcacccatttctagtttaggtgaatggtgtgagatataattaaatattaatttcttttccatatagatatccagtcattccagcaccatttgttgaaaatgctattgtattgcgttttggaaattaagatgactgtacaaatggtaattgatgtctgcactcccttttctgttccattgttcaatccttgtgttagtaccacacttttaattactgtagctttttagtaagtcttgaagtcatgtagttgtaggtcttccaattttgttgttttcaagcttgatgtgaatattctaaatcctctgcatttccatataaatatcagaattatctttaccagttttacagaaaagtctggtaaagttgtgattgggattgcattgaatctatggatcaatttggaaagaaatgacacctaaacagtattgagtcttcaaatatatgaacttggtgcattttccttcttatttaagccttttaaaatttctttttaggccgggtgcagtggcttatgcctgtaatcccagcactttgggagtctgcagcgggcagatcagctgaggtcaggagttcgagaccagcctggccaacatggtgaaaccccgtctctactaaaaatacaaaaattagccaggtgtggtggcaggtgcctgtagtctcagctacttgggaggctgaggcaggagaactgcttgaacttgctcaggaggtggaggttgcagtgagctgagatagtgccattgcactccagcctgggcaacaagagcaaaactctgtctcaaaaaataataataataaaaataaaaattttgggccaggtgtggcggctcacacctgtaatcccagcaatttgggaggctgagccgggtggatcacctgaggtcaggagtttgagaccagcctgaccaacatggagaaaccctgtctctacgaaaaatacaaaatttgccaggcatggtggcgcatgcctgtaatcccagctactctggaggctgaggcaggagaatcacttgaacctgggaggcagaggttgcagtgagccgagatggtgccattgcactccagcctgggcaacaagagtgaaactctgtctcaaaaaaaaaaaattcttttagttctgttttatggttttcagttcagaagtcttatacatattttgttaaattgatttctagatatgtttcttacctttattgtaaaatggagccatcatttgcatcattcattactctgtatgtaatgtgttatcattctctacctgctttcaagattttctctttatttttgttttttagcagtttgtctgtggtgtatctaggtgtcattttatttgtatttatccggagatttattcttgagatttgcagagcttcttaaatctgtaaatttatgtctgtcggccaatttgggaaatttggagctattagttttaaaaatatttcttctgttccattctctttcacttcttctgtatgtgagttcaatttcacttcaattgtatgtgagttagacattttgatattagcccacaggatcctgaggttctttcattcttttcaatcttttttttttctcgaagtttgcatttcgtgagcaggagtgacagtcattcaggatgatttttgagattcctagttcaagagtagttcctattcttttctaggtgtagtcaagtatggcttctaattctactagaaggcttttttgtcggggaggtggttctatgtcctttggctcttacattttctttgtgtctttcacagcacagttttcagagggtaccctttctctttggttttgttttgttttgttttgttttagacggagtcttgctctgtctccaggctggagtgcagtggcgcaatcttggctcactgcaacctctgctcactgctacctctgcctcccgggttcaagcaattctcctgcctcagcttcctgagtagctgggactacaggcacgcgccaccacacccaactaatttttgtatttttagtagagactgggtttcatcatgttggcaaggctgttctccatctcttgacctcgtgatccgcccgccttggcctcccaaagtgctaggattacaggcgtgagccaccgcgcccggccaacagagggtaccctttcattctttttctccttcttcccagaaggcttgcgttttcaagactacctcatcaagttctgcatgtgtttaaaagtgtctctacccgaccttcccttcctccctcccgatttaacggaattctttgttggtgttttcatacttaccgtgagttttctttttcagggtgatattttagttccatcttaggctctccattgtcctcttctctcttctttttttttttgagacagagtctcattctgtcacccaggctggagtgcagtggtgtgatctctgctcactgcaacctctgcctcccaggttcaagtgattctcctgcctcagcctcccgaatagctgggattacaggcgcacacaaccacgcccacctaatttttgtattttcagtagagacggggtttcaccatcttggccaggctggtctcaaactcctgacctcgtgatccgcctgcctcagcttcccagagtgctgggattacaggcatgagccaccgcgcccggtgcgcccagccctcttctctcttctttgcatctctcttcctatctggatccctctttgctgtccttaaagagctgagatgagagattgagaaacatctctacaagaaattgacgtttttctacttatgggtaattagaagcttgtagtattttcagtcttctaagtatgttgaagatatgagacgttggtgattttctttgtttctccggttggttggtctgtgtagtttttggacatgtgtttggatatttggatttatatagctgccataatcttggctatgcaggtagtctttcctgacacttcatcctgaaagatttgaagcctttggacaaattttacagtgggctgggtgcagtggctcacgtctgtaatcccagtgctttgggaggctgggcaggaagattgcttgagcccaggagtttgagaccagcctggacaacatagtgagacccgtgtctctacaaaaaataaaaaatatgccgtgtgtggcgttatacaactgtagtcccagctacttaggaggctgaggtgggaagatcacgagccaaggagtttgagggtacggtgagccatgatcgcctcactgcactgggtggcacagcgagactgtctcaaaaaaaaaatttacaattaatgtctgcatatccttcacctaggttcataaatttgtacttttgctttatctacttgcctttttctctctctctacacacacacacacacacacacacacacacacaattagttgaatgaattgagagtaagttgcagaaaacatgacactttactccaatattgcatcatacaaaatcatacatctagtgataggccattgtcctacagaatcacgatataattatcacactaaccagctgtggtggtgcacacctgtagtctaagctactcgggaggctgaggcagaaggatcacctgagcccaggaggttgtggctgcagtctcatattcatcccatcatcagatttctcccattgtcctaataatattctttatagcttttctttatccctgatccgaaatttcattgaagatcacacagtgcatttagttgtcatgcctcttaagtctttatttatttattatttattttttgagatggagtcttgctctgttacccaaactggagtgcagtggcatgatcttggctcatgcaacctccacccgctgggttcaagtgattatcctgcttcagcctcccgtgttgctgggactacaggtgtgtgccaccatgcccagctactttttatatttttagtagagacgggaattgtaccatgttggccaggctggtcttgaactcctgagctcagatgatccacccgccttggcctcccaaagtgctgggattacaggcgtgggccaccacacccagccttaagcctcttttaacataaaagagttcaccagccattctattttgttttgctttttgagacactgatgctttggagagtccaggccagttgctttgtagatttcaacttgtttgattgtttcctgatgattaggttggtagaaatactacctcaatgatgggaccttcttagtgcgtccatcaggaagcacatgatgtgactgtaattggtgacattaagtttgattccttaataattaaggtggtaactcccaggtttctacattgtaaaggcatcttttgccgccctcctttttattcccaagtagtttatttggagattagtcctttacacagtagaggagcggggaagggagacaggaaaggaaagtttgacaacaaagggtgagttttcaagcctgttgccacgggggaacctaattccactggagaagctcatggcttggtgatgttccacagaggggtcagaaatttagcgtatttcaacaccagctcctgtcaggcaccatttgagggctgctgccagggtggttcaattttctggtgcttacagcttgccataaacaggtgcaaagtagtctggataccaaagaaagctctcaggtaacaagatgcagatgttggcatttggaagtcagaatagggtgcactattgtggtaagagctgaagggatggctgggcgcggtggctcacacctgtagtcccagcactttgggaggatgaggcaggcggatcacctgaggtcagaagttcgagagcagcctggccaacatgacgaaaccccgtctctactaaaaatacaaaaattagccaggcgtggtggtggatgcctgtaatcccagctattcagtaggctgaggcaggagaattgcttgaatctgggaggtgtaggttgcagtgagctgagatcacaccactctgcactccagcctgggtgacagagcgagactctgtctcagaaaaaaaaaaaagctgaagggatgctgagtagagcatccgtagtgtctgctatacctgggtaccctagaacctggagaacctacagcttgaggcaagagcgtatgtgctattattttttcaagaagtgtgctctcaggaagcagaggtaggggaaaggtgagtgaagggagaaggaagattaagtcagttcaagggtgcattttgaagttggttgcccttggtgcaagtacagttggttgcttgttctcctaaagctgtctcccaggaggatgtatacataactgcattccagggcaatccatctaaaggaagggtggacggacccctcagcttctgtatctcactggaaaaaggtttgcttcatggcacattaattcccatagacttctaggttgtgcatgtgtgggtaccaggtgggtcccacagacccttacacctccaaggcaagcagcaagccacgggtgggaagtgataggtacccagtatgagcaggaggtaagggaccgtggggttgtgcctgtgggcagttggttataacccagacgtgtttgatcagcccagtgacagctggagtggacaaagtgaccaagggcctcaaggacacacaaggccaagaagatttgaagtgctgtgtaagatatgcctaatgcatttggattctacctttgtttaacgaatatgcacacataaaaaacacttgaactccttgagcccaggagttcaagaccaacctgggcaacatagtgagacactcatctctaaaaaaattttaaaaaaaattaacctggcatgatagcactcacctgtagtcctgtctactctggaggccgcagtgggaggatcacctgagccctggaggtcaaggttacagtatgctatgattgcaccactgcattccagcctgggtaacagagcaagacgctgtctcttaaattttttttttttttttttttacttttataatggaaaaaccattgtagacagttttaggaaggaaagcagaatagtaagacatctttttcaaagtaaaagagcaaaaaaggcaaaaaatatttcacatttactttatggacaaagataagattgtccttcaataaaagactgaattttttttgtttgttttgttttgttttttgagaaagagtcttgctccattgcccaggctggaatgcagtggtgtggtctcggctcactgcaacctccgcctcccgggtacaagcaattctccagcctcagccccccgagtagctgggactacaggcacgcgccactgcatctggctaagttttgtatttttagtagagatggggtttcaccatgttgaccaggctcgtcttgaactcctgacctcaggttatccacctgcctgggcctcccaaagtgctgggattacaagtgtgagccaccgtgcccggccacaagttgctctttaaatgtgagaagtgttctggcatggtggctcacacctgaggcgggtggatcacttgaggtcaggagttcgagatcaggctggccaacatggtgaaaccccgtctctagttatttatttatttatttatttatttatttatttatttatttttttgagacggagtttcactcttgtttcccaggcgggagtgcaatggcgcaatctcggctcactgcaacctccgccttccgggttcaagcgattctcttgcctcagcctcctgagtagctgggattacaggcatgcaccaccacacccggctaattttgtatttttagtagagacggggtttttccatgttggtcaggctggtctcgaattcctgacctcaggtgatctgccctcctcagcctcccgaagtgttgggattacaggcgtgagccaccacgcccggccctgtctctactaaaaatgcaaaatttagccgggcatggtggcgcacacctgtaatctcagctactcaggagactgaagcagcagattcgcttgaacccaggaggtgaaggttgcagtgagctgagaccacaccactgcagggcagcctaggcgacaagagcgaaacgcttacaaaaaaaaaaaaaaaaaaagattcacaggtgatggtgatgctgctggttaaggaagtgaagtggctttttgctctgtagccttcctgaatgttggggcctcctgctcttcatttgtttcatttctattaagtctcctccctccagctatcttgttagctcctggaaagcatttcagtgattgtggcttctatttctttttgaccccacagtgtccagggtcatgctgcctatatagtagtgagcagtaagttgaggtttttaaaaactttattattattatttttgagatggagtcttgttctgtcacccaggctggagtgcagtggcacaatctcagttcactgcaacctctgcctcccaagttcaagtgattctcctgcctcagcctcccgagtagctgggactacaggcgcctgccaccacatccggctaatttttttgtatttttagtacagatggggtttcactatgttggtcaggctgatctcgaactcctgacctcaggtgatccgcctgctttggcctcccaaagtgttagggttacaggtgtgagccaccacacctggccggtttttttaaactttaaaacagattcacttgatttttcttccctaccccccagcttttttgaggtatgactgacaaaaattgtatatatttagggtgtacaatgtgatgatttgatatgtgaatgcactgtgaaatgattaccacagtcaaggtaattcacatatccaccacctcccagttaccctcttagctagtacaggttgggtattgcttctctgaaatgctttgggaccagaagtgttttggacttcagattttggaatatttgaatatatataatcagatatcttgggaaggggacccaagtctaaacatgaaattcatttgttttcagagcctaaagatgatttttttttttttttttttttgagatggagtctcactctcgcccaggctggagtgccgtggcacaatctcagctcactgcaacctctgcctcccaggttcaagcgattctcctacctcagcctcccaagtagctggaattacaggctcgcactaccacacccggctaatttttgtatttttataaagacatttcaccatgttggccaggctggtctcaaactcctgacctcaggtgatccgcccgcctcagcctcccaaagtgctgggattataggtgtcagtgactgcgtctggctgataattgaatttttctcttggagaagctgaataaactgtgtgttgtgtgcctgcctttttttttgtttttttttttttttgagacagagtcagacactctgtcacccaggctggagtgcgatggggtggtcatagctcactgcagcctcaaactcctgagctcaagcgatcctcccacatcagcctcctaagtagcatagcaccacgcctggctaatttttaaattttttgtagtgatggggttttgttgtctaggctagtctcaaactcctgggctcaagcagtccttctgccttggcctcccaaggtggtaggattataggtttgagccaccatgcctggccattacctgtgttttgactataacacatcatgttggcactcaaaacgttttggattttggagcattttgaattttggatttttggattagcaatgttccacctatagtacattttttgtttgctttcccataaagaattttttgtaattttgattttatagttctaaatgtaatatattcttattgtaaaaatcacctttaatagcaccgccagaatagcaaacatgttaacagaaaggtagaagtagaccttaaagaatcttcagcagcttgagagaccacagctaaccactgaggaactctgttctggattggagcagtgcttagaagcttataaataactcttagggtattgcatagggattctttttttttttttttcctgaaatggagtctcgctctgtcgcccaggctggagtgcagggtgtgatctcagatcactgcaacctccgcctcctgggttcaagcaattctttgcctcagcctcccgagtagctgggattacaggcgcctgccaccatgcccagctaatttttttggatttttagtagagagggggtttcaccatgttagccaggatggtctccatctcctgaccttgtgatccacccacctcggcctcccaaagtgctgggattacaggcatgagccactgtgcctggccgcataaggattctttatgtgatttttcagtagaggctcttgccttttactttaaacattctttgagggttgttttttttttccgctttttatttatatagaggtcaaccagaatcaagatgtctgggactgaggaagcaattcttggaggacgtgacagccatcctgctgctggcggcggctcagtgttatgctttggacaggtaactgtggttccttcatgccgggaaagaatgaggtgaagtgagtaaagttagggcaaggcagtttgtagagcatcgtagtacatgtgtgagcagtacctagtacgtttacctagtacgtgtgtgagcagtacctagtacgtttacctagtacgtgtgtgagcagtacctagtacgttgacgcggtgcgtgcgggggcagtacctagtacgtttacatagtacatgtgtgagctatttgttattggtttttcctttagatgcattttttgggagtcttgtgaactctggagggcattttggaatgttagctatcaaaagactgatagtactggggattagatttagattttaaattttttgtggggggggatagataacatatttgtatgacatcaaattcaaaatgaaactgtgaaaatctccctatttcctattgcccctgtgtgcatgccacccagttctatttcttttttttttcgagactgagtcttgctttgtcacccaggctgcagtgcagtggtgcgatctcagctcactgcaacttccaccctctggattcaagcaattctcctgcctcagcctcccaagtagctgggataacaggcatgcaccaccatggccagctaatttttatatttttagtagagatggggtttaaccatgttggccaggctggtctcgaactcctgacctcaggtgatccgcctgcctcggcctcccaaagtgtttggattacaggcgtgagccaccacgcccgggcttaatttttttgtatttttagtagagatgtggtttcaccatgttggccagggtagtcttgaactcctgacctcgtgatctgcctgcctcggcctcctaaatgctggaattacaggcatgagccaccgcgcctggctccagttgtctttcttggaggcatggaaagttactgggggtcctattccttgtagggacattgtgtgcacagaaaagagtttcttgctttgtccacccaaactccatctttgtctttagcagagagttgtgagtattcatctcatctgagcagggcaagggggacaaaacccaaatcagcaagcagtagtgtgtttctgtttgtgcaggatgggaaattgttgtattggagaaggcgtcaatctctggaaaggacaaatggaagcaaggcttcctacccccgtgctctttccgtacttgcttcctgtgctgacgtcatttacagatctggaggcagaacattttagcttcctaagcttcagaaacatttataaggatggtagcagcagctaaggcagcagttctcaaaatgcagttctcaaaaaccctggggtttctgaagatctttcagagtccagaaggtcaaaattatcttcataataatactatttgcctctttcacactcattgtctcatgagtgaatggtagagttttcagagagtgcatgatatgtggtgatgtcactgctatgatgcctaatggcatgcatgccttaaaagtttctcagttttgattcctaataggatacatagaacccacataaacaaaggttctggggggtctttttaagagtataaagtctccataaaggatggagactcaatgatgtgaggaatggtggaagtgtgaatttaattttcttttttggggttgcagtgccagtacacagcagaagagtaccaggccatccagaaggccctgaggcagaggctgggcccagaatacataagtagccgcatggctggcggaggccagaaggtaggagaattcatgtgcctggaaagcaggcatccataccgcagactccgatggtcttgccagttccctctctgggtcctcagggattcggaagtctgctgttaactgttcctggaggtctcccagtgcccctgggaggggatgggttccagacttcattctcatccgaaggggcctgggcatggtcttgacactcgcataaccgccgtcttaagatttttacatcatctttttttttttttatttttaaagacagggtcttgctctgtcacctaggctggagtccgaccagtggtgtcatctcagctcactgcagcctccacctcccaggctcaagcgatcctcctgcctcagcttcctgactagctgggactacaggcacacgccaccacacctggttaattttttaatgttctgtagagacgacatctcgccatgttgcccaggctgatctcgaactgctgggctcaagtgatcctcccacctcggcctcccaaagtgctgggattacaggtgtgggccaccatgcccagcctttacaccattaaaaaaaaaatgttccttttgccatttgctttttttttttaattaaacactttttaaagaacttatgattgacacataataattgcatatcatttgcttctaattttaacttctgtgtatatttttggtcttccataaaatatgtcaaacagatttgtactttttgcaaactgaattttagcaactgctgggtgagttcctcctcccaacagaccattcgttctcgcgggctccatctagaagatttttgaaataaattcattgagaattttcttgaaaaaaaaattttttttaacagactggttctcactctgtcacttaggctggagtgcagtggcacgatcctagcttactgcagccttgagctcctgggctcaagtgatcctcccacctcagcctcccgagaagaatgtttaaggacagtttatcgaaaaaagtagatgaggaataaattatgtcaattttgattcacatttaagtgtggtaaggaattaacacagcttttccttaaaaacatttgtttttctaggtgtgctacattgagggtcatcgggtaattaatctggccaatgagatgtttggttacaatggctgggcacactccatcacgcagcagaatgtgggtgagtatgctctccagcagtggggacttctgcactgtccagctcctgctgaaagtctgctgtgggtgaggaggtaaggtaggtggactcagctgccagcaggaggaatggttgtggcccagcggtcagtgtcctcttcaacttgctctctttcccactcctagattttgttgacctcaacaatggcaagttctacgtgggagtctgtgcatttgtgagggtccagctgaaggtgaggggatggagtagacctgctgcccggaaggatcagtgggtggtaggagaaggtgagcaggtagggaagtaggtagctggacggggacccaggctccagagttgtgtctcagccagcgttccctagagtggtggaattcaaatactcttgctcatgtgctccctaaaagaatggaaaaactgttctcttgcacatgttcaagctgacacctaaaagttttcaccatatataaaaattgttgcaaaggatgtattttttggcatatggtaaaatctgacattttaaaatacaataattttaccatcactgataagtgtttggaaactcaactttaggcaaagcaggtccttttgttataacattgatgaaaacaaaaatatgttttgttaataagttgtttcacttcaagtcacagttatttaaggtgttaagtgagcacttaccgtaaatctgttgaatcttgttaaatattccagtggactctaaatactatagaggataagatctatcatttatttgaagaaatacaatgaacaagcttttttttaatcattagaaattttacattgttctttctttatctgaactcatatttctattctatttccccactggttttaatcctaatacatatttatggttgaaagtttggctaggcggggtggctcattcgtgtaaccccagcactttgggaggcccaggtggaaggactgcttgagcccagggatttgagaccagcctgggcaacatagcgaaagcccgtctctactaaaaatacaaaaaattagctgggcatggtggtgtatgcttgtagtcctagctactcaagaggctgaggtgggaggatcacctgagcccaggaagtcgaggctgtggtgagctgtgattgcgccactgaactcctgggtggaaaaaaagaaaagttttatcggtagccttactgtgcttctctgcctttgcctgtgtataaaaataaaaatttttggtaaattttcagtgcacttaaggctctaaatattaaaatatttcttttggatttagttatattatagctactgttaacacacaattgaccagacaattgtgtttatggtgaagagaaaacataaatacagcaaaattttgatacttagaaaaattaaagatatgaaatcttgccacaaaaataaaaaatttaaaatataaaatttatggaaaatgtatatcttaatgagatggatggtgctgttttttcttttcagttagtttatatatccatatatccataactgaatattacttacttcttttttttttttgagatggagttttgctcttgttgcccaggctggagggcaatggttcaatctcagctcaccgcaacctccacctcctgggttcaagcgattctcctgcctcagcctcccaagtagctgggattacaggcatgcgccaccccgcccgcctaattttttgtgtgtgttttcagtagagacgcggtttctccatgttggtcaggctggtctggaactcacaacctcaggtgatccacccgccttggcctccaaaagtgctgggattacaggcgtgagccaccgcacccggcctacttatttcttgaatgaacaattcagcattaattctattctgacttatttttctaaatagtactaaaaaatcttgtatctatgagtgagtagctgagaatggaaagaattgtgttatagtgtcactcatttatttgagtgctttctgagttattttttaaaaatcacagagcgctgtcatcaaacattgtatttaattctcaatcagcgaatgatgtgctcaggtccaccttctcttttggtgagaggcaggagctggacgccacctgatttacaaagggtttgctctcccgtccttacagaccattagatccagtgttcaaatcatccctttgtttcatatcccagaggtttttttttttccaagacgtagtctcactctatcacccaggctggagtgcagtggtgcaatctcggctcactgcaacctctgcctcccaggttcaagtgattctcctgcctcagtctcctgagtagctgggattacaggtgcccaccaccacacccggctaatttttgtatttttagtagagatagggtttcaccatgttgaccaggctggtcttgaactcctgacctcaagtgatccacctcccttgacctcccaaagggctgggattacagcgtgagccaccacgcccggcccggccatcccagaggttttttttaccttagggtgatgcacactgataggatttggggtgagtttctaatgtgccctttgtgtgttgggaagttgggaagggaggatcgtcttgacaccttgaccgcaggcacatgtccaggcagcccaggtctaggaagcagcactcgcgatggattctcacccagccttctgcccgtgcccctgtagcaaggccgccaggtgggagagtccggctttgaaccctgctgcttgaggaacaggggagttgtggcacgcctgccgctctcgtgtttgagttcaaactccttttctgcccccaggatggttcatatcatgaagatgttggttatggtgttagtgagggcctcaagtccaaggctttatctttggagaaggcaaggaaggaggcggtgacagacgggctgaagcgagccctcaggtgagcgcggggctgggagtctaacctgcgtcatttcagctcttgcttcagagcagatttcgattttttttggaagaggtaacacatccacatggttcaaaaatccaagcagcgtggaaggtaattctcacccctgccctggttcctgtctgccgttttcccactttcgttagtattttttcaatgtttctgtttcaggcttcccttgctgggagtaagtggtagaatcctgtactctctcttctccgtgcactcagtcatgtgtgccggaggccttcccactcctactgcgagtgcacagacagcaccctcctctccgtgctcctcagcagtcctccgctacgcacaggtagcatagttaacgtagttacacagtcacgcagatgtccgtgttagtccatttatgttgctatacaggaataccagaggctgggtaatttataaataaaggaggtttgattggcttatgattctgtggactgtactggaagcctggtgccagcatccacttctgctgaggcctcaggaagcttctaatcatggcagaaggtgaagagggaacgtggagagagagggagcaagagagagaaggaaggagtcccaggcttatttatttattttattgttgtttttcattttttgagacagggtcttgctctgttgcacaggctggggtgcagtggtgccgtcatcgctcagtgcagccttgaactcctgggctgaagtgatcttcccgcctcagcctcccgagtagctgggatcacaggcacataacaccacccccagttaattaaaaaaaaatttttttttttttggagagacagggtctccctttgttgcctaggctggtctcaaactcctgggctcaagtcatcctcctgccttgtgcctcccaaagtgccgggatcacaggcatgagccatcatgcccagcccccacactcaaaaccaccagatctctcatgagctgagtgagaactcactcaacaccaaggggatggcactaagctgtttatgaggaatccagccccaggatccagtacctcccaccaggccgcaccccccggcattggaggtcacgtttcaacatgaaatttggaggggataaacatccaaaccatatccgtgtctttgagaattgaagtgaattgaaccagaaaaacctatgagttctgtgggggagtccgtagatcccaagttaagaactctggtcatgggaggttgtgcccttgagcccccggtccccaagtgtgtgttgcctactcctgctgggaaattggagcagcctttggggggaaaaaaaagaaaaactctctgcagtttgttctccatgtcaggaggtggctggtgggttttgtgaatggcgccgtaatcttttcatactcatcttctctgtgagggcagggacttgtgtcttgtcctcactgcagtattctcagaaactaacacagtgcaggaacatgctagatgcttaccagacatcaatggggaatgcatgttagggtccacttcctctgctgctcctgagaagcaacctgtacaaaagttgtaattctattctctgatattcatgtgtaacaattcttaaccctgtttcacctttttttctcttgcccttaggagttttgggaatgcacttggaaactgtattctggacaaagactacctgagatcactaaataagcttccacgccaggtatatcagacatggatgagtggagtgaagataatgcggcaaactcttgtgtgtcatgggttgagtatttggaggatgcaaggagaaaaagtgaggactcagctctttagagggtcgggaatgttgatttcagatttcgaatgttagagacagcaggaactaatcccaacattttccttttttctaaagtacatcatgtgggccggggaccgtggctcacgcctggaatcccagcactttgggaggtggaggcaggtggatcacaaggtcaggagatcgagaccatcctggctaacacggtgaaaccctgtctctactaaaaatacaaaaaattagccgggcgaggtggtgggcgcctgtagtcccagctactcgggaggctgaggcaggagaatggcgtgaacccgggaggcagagcttgcagtgagccgagatggcaccactgcactccaacctgggcgacagagccagactccgtctccaaaaaaaaaaaaaaaaaaaatcacaccatttgacaagaatgtgaggtctagagaatttgtgtacgtgtaggtagtgaactgtggttgggggtagtctgtgaagcctcaaagcaagcacacagccctctgcagcaccactgtccttcccagacactcccagcctcgctgttgagccttctttcttttccttagttctggtgtcattacatgtctgatgtcattacaatgtcatttacatgtccattatttctgtcaatacctataacgtgatctgagcctttgcctttggagaatggggtctgtggtggggcagccctggagtcacactgccttgccatgagtggcttctggagtgttcctcctgcctcatctgctctccgaggtccctgccatgtcgctccccagggcagcattcccatcctgtgcctgagggattcttgtcctcatggagccccacaaggtgtgtgtcactgggcatctgtaaaaactcctttaaaaaaatcatttttaaacattattggattcagtttgctaatattttgttagacttttttttttgagacggagtctcgctctgtcgcccaggctgaagtgcagtggtgtgatcttggctcactgcaacctctgcctcctgggttccagcgatgctcctgcctcagcctcctgagtagctgggattacaggtgtgtaccaccacgcctggctaatttttgtatttttttagtagagacggggtttcaccatcttggtcaggctggtctcgaattcctgacctcatgattcgcctgcctcggcctcccaaagtgctgagattacaggcgtgagcccccgcgcccggcctttgttaggcatttttgcatctatgtttatgagagatattagtcaagttttctttttctttttttttttttgagatagtctcactctgtcgcccaggctggagtgcagtagtgtgatctcagctcactgcaacctctgcctcccgggttcatgccattctcctgcctcagcctcccaagtcgctgggactacaggtgccagccaccaccatgcccagctaatttttttatttttagtagatggggtttcgtcctgttggccaggctggtcttgaactcctgacctcaagtaatccgcctgcctcggcctccgaaagttttgggatgacaggcgtgagccaccgcacccggccttttctttttttaaattgtagtaaaacacatcacattttaactatttttagtgtgtggtcgagtagtgttaagtgtattcccattgttgtgaaattgatctgcagaactaagaccctgcacccgtaaaacaagaactccgcatttccccctttcccagacccttgtaactacttccactttctttcctttttttttttttttaatttattttatgaaagatgaggtcttgctctgtcagccaggctggaatgcaggagtgccatcataattcactgcatccttgcactcctgggcccaagggatcctcctggatcctcctgcctcagcctctcaggtggctgggactacaggtatgtgccagtgcacctagctaatttattttttaaacaattattactattttttttgtagagacagaatttctcagggctggtcatgaactgctgggctcatgtgatcctcctgcctcggcctcccaaagcgctgggattgcagcgtgggccactgtacctggagccagctaattaactttttttgggggcttttttttttaagaggtgagttcttgctatgttgctgaggctggtcttgatctttttttcttttttaaaaaattaggttaggcgctgtggctcctgcctataatcctagcactttgggaggccgaggtggttagatcacttgagcctaggagtttgagaccaccctggccaacatggtgaaaccctgtctctactaaaaaatacaaaaatcagctgggcatggtggtcagcctgcctgtaatcccggtggtcagcctgcctgtaatcccagctcttctggaggctgaggcatgagaatcgcttgaacctgggaggtggaggctgcagtgagccaagattgcactactgcactccagcctgggagacagagtgagattctgtctcaaaataataataataaaatataaaaataaaatacttttttgtgtgtggtcatggagttttgctattgcccaggctagtctcaaactcctggctacaagcgatcctcccactcagcctccttaagtgctgagattataggtatatgtgtctactttctgtttctgtgaatttgtctactctggatacctcatataaatggaatcacataatttttgctttttgtgactggcttatttcacttagctagcattaatgcctttaagattcatccatgtagtagtgtgtatcagaattcccttctttttgtggctgaatattctgttgtatatatagaccacattttgtttatgcattcatttggtgatggggatttgggttgctttcaacctcttggctattgtgaataatgctgctatgaacgagggtgtgtaactctctttgagatcttgctttcaattcttttagacatattctgaaggggattgctgggtcatggtaatcctatttttaatttttcgaggagctgccacactgattttcatacagttgccccattttaccattccaccaacagggcacatgagttcagatttttctaaatcctaaccagcacttgttattttctgagtttttggttttttttttttttttttttttaagccaacctaatgggcgtgatattttattggggttatgatttgcatacccctgatgattagtgatgttgaccatattttcttttttgagacagaatctcactctgttacccaggctggagtgcagtggcacaatcttggttcactgcaacctctgcctctgggttcaaacaattctcctgtctcagcctcccaagtagctgggactataggcgcctgccaccatgccgggctaatttttgtatttttagtagagatggggtttcaccatgttggtcaggctggtctcgaactcctgacctcaggtgatccgcccgccttggcctcccaaagtgatgggattacaggtgtgagcccccgcacccagccaaccatattttcatatgcttgttggccatctgtttatcgtctttggagagatgtctattcaagtcctttgtcattttattttgttttattattttaatttaatttcttttattcatctcatctcatctcatctcatgacaagatctcgccctgtcacccaggctggaatgcagtggtctgatcatggcttggctccctggagcctcgacatcctgggcttgagtgatcctcccacgcaggctggagggcagtcgtgtgatctcggctcactgcagcctctatatcccagactcaaatgatcctcctgccttagcctcccaagtagctgggactacaggcatttgccaccatgccaggctaatttttttattttttgtacagaatacaaaaaattttaccgtgttgcccaggctggtctcaaactcctggcctcaagtgatccacctgccttggcctcccaaaatgctgggataacaggcgtgagaaacccatatggcccaactcctacttttattgagctttttcgtattgtttttgtattctctctttcacttatgtttgctgtcatctttttagaatttcctttcttctagctttgggtgtaactttttttttctagttctttgaggtatagcgtagatttgagatcttttttttttaactatgtgtgtaacttccctcttacgacttctttccctgcaccccagaagtttggtaggttgtgttgtagtatcatttgtctctgggaattcttctaagttggcttgttacatttcctttgactttaagagtgtggtgtttaatttctactgatttgtggattttccagttttctttttgctgttgatttctagtttcattccattgtgattgaaaagatactttatatgatttcaatcttgaatttgttaggacttgttttgtggcctaacatgtagtctgtcttggagaatgttccatgtgtacttgagaagaatgtattttctgctattggtgggtggaatgttatgtatatgactgttaggtccagttggcctatagtattgttcaaatactctatcgccttattcatcttttgtttggttgttttatctattattgaaagttgagtagtgaagtctcctactattattgtgttgcttttatttcaccttacaatcctctcaaagtttgcttcatatatttaggacctctggtgtttggtgcataaatatttataattgttatatcttcttggtgaattgacattcttttttttttttttgagacggagtctcactctgtcgcccaggctggagtgcagtggcggtgcgatctcagctcactgcaggctctgcctcctgggttcacaccattctcctgcctcagcctcctgagtagctgggactacaggcgcccgccacctacgcccggctaattttttgtatttttagtagagacggggtttcaccatgttagccaggatggtctcgatatcctgacctcgtgatctgcccacctcggcctcccaaaatgctgggattataggtgtgagccactgcacctggctgacattcttatcattatataatactctcgtctcctataacaattttttttttttttttgagacggagtcttgctctgccgcccaggctagagtgcagtggtgcgatcttggctcactgcatcctttgcctcctgggttcaagcagttctcctgcctcagcctcctgagtagctggaactacaggtgcgtgctaccatgcccggctaattttttttttttttgagacagagtttttgctcttgttgcccaggctggggtgcaattgtgtgatctcggctcactgccatctctgcctcccaggttcaggcaattcttctacctcagcctcccaactagctaggactacaggtgtgtgccaccacacccagctaattttttgtattttgtagagagggggtttcaccatgttggtcaggctgatcttggactcttaacctcagatgatccgcccacctcggcctcccaaggtgttgggattacaggcgtgagccaccacgctgagcccagatttttttttttttttttagacagagtcttgctctgtcgcccaggctggagtgcagtggcgctatcttggctcactgcaacctccgcctcccgggttcaagcgattctcgtgcctcagcctcctgagtagctgggactacaggcgcccaccaccacacccaactaatgtttcgtattttttagtagagcggggttttgctgtgttggccaggctggtctcaaactcctgggctcaagtgatcaatccacctgccttggcctcccaaagttctgggattacaggtgtgagccactgagcctggccccaaatttctctttttttgttgttgagacggaatttcactcttgtcaccgaggctggagtgcaatgttgtgatcactgcaacctctgcctcgtgggttcaagcgattctccagcctcagcctcccaagtaactgggattacaggcgcccgccaccatgcccggctaatttttatacttttagtagaaatggggtttcgccatgttggccagggtgatctcaaactcctgacctcaagtgatccacctgcctcagcctcccaaagtgttgggattacaggcatgagccaccatttcctaagtgagcacagctgttcacctcccagatagagaatcagacctttaccagcagcccagaagccccattttgccctcttccagtcactgccttgctttccttttttcaaaagtaactactatcctgtcttctattctgacttccatggattattttttcctgtttttgaactttatatatgtaaagttcacaaatggaattgtactgtaagtggaattgtacagttcatattttaagaaaattgaccgaagtatgaaaaagaacatatagacaggttagacgagtgcacgtatcatccatgctcagcttgatgaattttccaaccaaacacatccacacagccaacatctgaatcaagacactgccagtaccgagaaggcccagctgtgttccttgcagtcactgccatcccctgccctccttcccactctgagcaaaccgcttttaacaacacagattggccgggtgtggtggctcactcctgtaatcccaccacttgagaggccaaggaagaaggattgcttgagcccaagagttggagaccagccaggacaacatagtgggaccctgtctgtacgaaataaaaataaaaataaaaataaaaattagctgggcctggtggtggcgcctgtagtcccagctgcttgggaggctgggctgggagaatcatttgagcctaggaggcccaggctgcagtgagctgtgattacgccactgcactccagcctgggccacagagcgagaccctctctcaaaaaacaaaacaaaaaacaaagaaagccaccaatttgtttttattgttatgtacttttttggaatcctacagtttgaactctttgtatcttacttgaattcagcatggttgtgagattcattcatggtacgagcagcagtttcattgctgtataattttcttttgcatgagtatgtggcaatttatttttctagtcttttcttagtagacattttggtttttgtagcttgtggctgtttcgattagagatgctgttagcattcttttgctgtacagttgcactcatttttgttgggaattattgggggagaagataggtacgtgtttagttttagtaggttcttcccgttttcctgtatggttgtattaattcacaccccacgtggcattgcgtaagttccaattgttctgtatctttgacagcacttggtatcgccagtctttcatatttttcaaagctcgtttcttttttttgagacacagtcttgctctgtcgcccaggctggagtgcggtggtgcgatctccgcccactgcaacctctgtctcccaggtttaagtgattctccctgcctcagcctcccgagtagctgggattgttggtgtgtgccaccatgcccagctaatttttttttttttttttttgtatttttagtagagacaggctgttactcaggagttccttcgattttttttttttgtatttttgtatttttgccattttggccaggctggtcttgaacccctggactcaagtgatctgcttcggcttgccaaagtgctgggattacaggcatgagtcaacgtgcctggccaaagctcatttctttttaaactactcatttatctttcaatgtagacatgaaatctgcactataattttcattttcaggtcaaaatgtaatcatcttaatccctcatattcaaacaattattccatcagcatcagttttatgaattgagagatgttttcccaagtaaaaatgttctggatttctgtaggaatccgtgtggaaatgaaaccatttgccctgtgccacgcagcacaggactgtcccttctcatgttgatgagatgcagagcagccccgttctggaagattccttgcagccttggctggcagccggcgtccgtgcctcccaagggttcttccctctgtcgtttgaagggttcttcgtgatgccacagcgtgcccgaggctccctcagtgacgagcgcgatttgcaggggtggccctggcagaaagggttgggaaggtacagacctccacagagactgtgtgtgctcatttccgtggaaaaaggacaaggaggcagcaaagacagacccagcagcccaggaaagattcaaatgcgattttacagaacatctgccctaagtcaaaaccaaagaaggattcctttttatcaaaacttcactaacacagaacatgaaattgtttggctcctcctgctcatggagttacaggacctagaaggcgtgatggatggaggatgtcaaatgcgattttccaggaatcgcaatctgtgagtcagggagaagcagcggagggcaagagccagttgaaggaatttgtttttcttctttccttctagttgcctcttgaagtggatttaactaaagcgaagagacaagatcttgaaccgtctgtggaggaggcaagatacaacagctgccgaccgaacatggccctgggacacccacagctgcagcaggtgacctccccttccagacccagccatgctgtgataccggcggaccaggactgcagctcccggtatgcggcctaagtcccctcctttcctctgcggcccctcctgtgtcacggggctgcctccactcaggcctccagagccagccagccgtgcgtgtcctcccagcagccgcggctgttgctcaggagcccgtcctcgccgccgccctctcatgcagaagcctgagctcatccgccgtggagagcgaggccacgcaccagcggaagctccggcagaagcagctgcagcagcagttccgggagcggatggagaagcagcaggttcgagtctccacgccgtcagctgagaagagtgagggtgagcgaggggtgggagcagggccctgggaggcgtctgcaggaggaagtgtagccgcagggtcttctgattctctgcggtaaccctgggccggctccaaaccaggcctcgctgggacttctctcaagctacacgcaggagagatgagcccaggaaattcagatatttaaatctgctgtacattttcccgtttctaaagacaatgatttcttttttcccccgtggaactaagtgggccttgataaaatcttctagaattagaaatttcagggtaaagaacttttttttgcttcgaatgctttggccatctctacattagaaagccttggccgggcacggtggctcatgtccgtaatcccagcactttgggaggccaaggtgggcggatcacgtgaggtcaggagtttgagaccagcctggccatcatggcgaaaccccgtctctattaaaaatacataaaaattagccaggtgtggtggtgcatgcctgtggtcccccctactcgggaggctgaggcagaattgcttgaatccagaaggcagaggttgcagtgaaccaagatcgtgccactgcactccagcctgggcaacagagtgagaccctgtctcaaaacaaaaacaaaacaaaaaaaaaacaagccttgtgtttctgagatatcttcgaatacaaggcaaaattgggattgagaataacgggaacttttggcagattatttatcaactttagtttatttcagagtccagattgagtgggaatagtgatacagatgccttctttctttcttctctgtctccccacctgttctctcctgcccatccagcggtaggtagtccttactcagagagtggaaacagagaaagggcttgtctcagacccatcgagcttttgcccagtttttccctacaaattgtgaagcagattcacagaggacttgcttcatggttggttcattcatatgcccctcagcaccgacaggctgaaattaacataaaaaccaaaacagaaccacttcctgtcctgtggatatccttactgttgagttattgcaggtgtttagcttcttaaccattgcagaagctcccgggtagattgtggaggaagctgccctccaggcctttcctgccccttggcagacaacccgagccattgttattttaatccatttcacacatcagattttggctgaagattttgtttgttggtttgttttcagacagggtcttgctctgtcacccagcctggagtgcagtggcgggatcagggttcactgcagctttgaccttcctgagctcaagtgatcctccttcctcagcctcctgagtggctgggactacaagtgcatgctaccacacccgctgatattttattttttgtagaggtggcgtctcgaattcctggtttcaagcgatcctcccaccttggcctcccaaagtgctggggttacaggtgtgagccactgtgcctggtcagattttagtttaagattttgtttgagcaagggttatggctgttaacaagcgagccagacactggattagatggcctgtgagaaaccttttacttttgctgtgaaaggagaaagaaacttgtttttcccactggtgagaagaattcaaaccacagacagatctgtaggtaggactgggactcgggaagctgaagttctttttactggcagaagcagcgcagccctaagcggtgttgtgcttcggagagtgttccctctaacaagaggggagtggacccacgctctgaaatcccatgcagtgatgtgatgatgacttgtcctttctctcctctgtgaaccgtagcagcgcctccggcccctcctgtgacgcacagcactcctgtaactgtctcagaaccactcctggagaaagacttccttgcaggagtgactcaagaattaatcagtaaataccttgaaatgcttgtaagctactgtgctgtatgtttctagtagccacagaataccttttaggcgacataaaaatcctcattttcgtgtggttttgttgagggggttctggctgatagcatatgtccagttcctctttggtcctaaccaaagggaagtgtacttttagggggaggggagagaaattccaaaaactttcagaaggtactgaagacatggaatttctgagggccagtttttccagtgctttctgtgagaatacttcattatttgctgatgacgcacttttccttgacctctgtagagactcttgaagacaactctgaaaagtgggctgtgactcccgatgcaggggatggtgtggtcaagccctcgtctagagcagacccagcccagacctctgacacattagccttgaacaaccagatggtgacccagaacaggactccacacagcgtttgccaccagaaaccacaagcaaaatctggatcttgggacctccaaacttatagcgctgaccaacgcacaacaggt

SEQ ID NO: 15766 - DNA, 33236 bp, Homo sapiens; identical to SEQ ID NO: 1245

SEQ ID NO: 15767 - DNA, 30512 bp, Homo sapiens
gccgctcgcaggcgccgcacggagttgcgtcccggggacttggggccgcagggaggtgagcgcggggcgacgagcggggcaggactcacggccgcccagccgcaggcgccggaagggtcccgaggttgtgcccgagcctgccctggagcggtggtgcgcggccaggaagggtgcccagtgcccggtgcccgccctgcggagcgcctgggtcccacgtgggctcggctggaggcccgggctggctcagacggcgccggcggggccgctggacccggtctgctggcccctagggctcggctcggacaggacgcctaaggggtccctgggcgacggggcgccagatgtaggggcaagacgattgggcagagatttaaacctccggaggaagagaggagactgcgcagggcagtcccgcctgcgtcccagaagtgcctgcagttcagacccttctctcccctccactttctcccgggtgagcaccgggcggaccggggccgaagtttgttggttgagccagccaaggtggaaacaggtgcgggggtggggatgagggactcacacagcagggctggaccggagctcagaaattggacccaggagtcctgacttctggatggaggggctggggaaggttggccctgggcttgccttttacctgtttggcccctcggatgttcccccagggcattgggatagagacggataagttccctagggtacagaccccgccccactcccacgccagggcgcaaaggaagcctaggttttggccctgccccattccatgaaagattaacggagggggctctagggttggagctactgagagggtggcagcgggtgtgtctgaggagcagaaggcggtggggagctgaccccacttggggagaggctgctgttgcctgggcggctggcatcaggcccccagtgtgtgccatttgctggtaatataatgagaccagcatctgccttattcgaccctcactgtccgtagggcaggcagtggaaagggaggcgtgttttagagctgtggttctcaaccaggggcgactttgcctgccatgggatatttggcaatgttggagtcattttgggtgtcacacacttgggaggggaagtgagtgttgttgttactggcaggtagtgggtagaggccagggacgctaccagacatcttcagggcacggaacagcccacataacgaggaattatccagcccaaggtgttgggctgtgctgaggctgagaaaccctgcgcagcagctggtccatcaggttccttctcaatgatgctccctcactggggaaactacctcagttttccagagtggttaggggaggaacttggaataaacctgaatgagatgaggggtaaggcagtgtgagggcacttattcccctcacaagagtcttcctttggtgccatgagacaccgcctttcccaatctccactggccctgcaggaagctggtctaggtgctgtgggggagaggttgggaacagaggacccccttgcagcccaggcctggggtgcttaaccccagggcaatctcccaggaaggctgggctgaggcagcccttgagctcaaatatccctgggctgggagggtgggcagagggcgagctctcttcccatagattttcccaaagctggattgctgaagctggcatggttgcctgataccatgtgacctgctggaattttcccttctgaactcacacctaactcctccaattatgtacaccttttgaaagtgacatccaaggagtatcagggctcctaattcctggggggtccccaggctgcttttgtcctgcaataaagagggcaccctgggttagctgacgagccctggagtgggcccagctgctgatggggtggaggcacccctgcccatggtgttagctgagcagaggtgagagatgggagacatcaaagcacaggccaggtggccccccagtagggatgactcagagttgtttgtattgggctggaggaatgtacttccagttttctggcaacaaggaggggtggctggcacggtgggagaggatcggatgaagcagccacgtccatgcccaggagctggggccacctcgctgccctccctccctgttttcttgcagtagccattatacccatcctgttcacttctggacccagccttcttgcctgggaaccctggtggaggtttcgagcttgggttctttttgttggtgttggtggcttttgttttttttgttttgttttgtttttgtttttgtttttttggtctcttgactgtaaaaggctgaagtgaaactcccaccttttcatttgcacaaaaaacaaaagtggcctccattgctgtgagcctctcaagggacagggctgagcacccaggcttgtacaaagttgttcaggaagtcggcagtggagctcgggtgtgaacccagttgcccaccctcaggccccacccaagagccccacgaacaaaccctcagtgactcctacctgtctgtacctggtgtaaccacacacacacacagacacacacaaacagacacacagagacacacacaaacacacagacacacacagactcacacacacacacacacacacacacacacacacactctctttctctccagcccaggagggggacttttgttcctataagaggaggaataaatcacactacaaatgctttgggtgacgcacttggggcccgagtcctgctctggggtcagtggtgctgtttttcctgtggcctcagctctggatactgtggtggcctctccaccaaggtttctgtccttgctgtgtaaactctgccccagacaaggtgacagatgacagcagaagtcaaggagctgtgcacgcctgcccgtgagtgtgcgagtggcatggctcagctggctggtgcttccctttgggcctggcccccgcctgccgctggcacagcacagggaagacgtgtgccctcctggctgcctctccccctccacactctcctcagatctctgtgcctcgcactctggagcaggcctcggcgctgccccatctgccccaggggatttccagagtgagctcaggcatctgcaccggctgtggaagcgctggctgtcggaagcggctcccagtttcctatccagctgagccaggctgggggaggagtggcggggacgtctgcgcctgcccaagtacaggctgacctcggcggtggtggtggctaggcagggacagctctcagggcacgggcggcttcacagggaaaccaagcctgcccggaacgtcgttttgcctcccaggagacctaggatgggtgtaaggaaaaacacatcttccgggaagtacaaagcgccaccgtgtccacggcccctccttcagcaaatgtatccgggcgcccagctgggagttgtttgtggtccaaaagctactggaaggcagttccagccccagtgcccggctcctgcaggaaagtggtttcagccaagtgggcagtgcaggaggtgggccagagacactgtttggagtgtgaggggaaccttgtgaccagcagaaaaggatggaggaggattccaaacttcaggagctgggccaaggtccaggggctgctgggcacagtcgtccatgtgtgtgctcagtaggatgagttcacttaattagtctgtgcctcagtttccccagctgcacagtgggctcactaacagtaatctacctggagggttgtgtgaggtgaggactcccgtggtaaaggtgtgcagcctgcagtgcagtgcccggccatggcaggagcagtgcggggagccatcgtgataatggtgttagggtggcttcaggtaggggcgtggctgccggtccatggcacagacttgggagatggccgaggccctgcctcgtgggctgtcaaggactagatgggaacacgcatatggagcagtggcactgttgttattgttattctgtaggagtggctgtgtctggggtagggggacctcagtgccttgctggccaagggaagtgagggtgggtttccatctgggcatgaactgctgacctctgcccaggggttttcctggcctgccagtgtgtgtgtgtcactgacagtggggtggggggcagctcatggagttggtgcccctcagctgtgctttccctggcgtaggttcctggggctgggagcagggtaaagctgcctcaagtcttggttttctcctctgcctcccccgtgtggccgccaaccctgtgccagcaggtggtgcagggatggcttcctgccccggtctctggcaagaaacccttttccctctcccagtgggtctccccaggttgtcagctccatttagtcataagaagatctggggccaggcgcggtggctcacgcctgtaatcccagcactttgggaggctgaagcaggcagtcacaaggtcaggagatcgggaccatcctggctaatacggtgaaaccccgtctctactaaaaatacaaaaaaattagccaggtgtggtggcatgcacctgtagtcccagctactcaggaggctgaggcaggagaatcgcttgaacccagaaggcagagcttacagtgagccgagatcaccctactgcactccagcctgggcagcagagcgagactccgtctcaaaaaataaaagaaaaaaaaaagagatctggaagaggagggttgaggatctgctgtggggtttggagtgggaacaggactttgaaccctggcctaagccccttttgaccttgccagcccgtgaggatgatgacagccgcctctcacccttagcctcaactaaatgagatcatgtctgtaaaagtcctttgcaagctgagcagtgctgcccaggcagttaggtgctgtcccttcttcatgaatcaaaggcctttgcatgcaggactcactccagcaccccaaacactcagagtcctcacccgttctttttctcctgcccctcaccagttccagggtggcaagaggctgcagagtgtggaggttaagagcgcgggaccctggctggggttgtagccccaccacctccctaactgtgggaccttggacaggtgacttcatctctctgagcctcagtttccccacctgtcgaatagagatctgtcccctgtggggctcgtggctcagatagagactaagtgagcgatggtggcagagctcagccaggaataaaagaaacttccaactgggcgttgggtgtgtgccaggcactgtacattcatatctgctgtcatcttccctggctccctccgtggtggggcatcaacccatctcacagcagaggaggcaggctctgcagcacccacttgcccaaagtctcccagcaggtaggtggcccaggcaggtttgagtcccatctctggccccttattcctcctcattcctcagcaagagagctccacgctgccccgaagcaaggtgtgggccataagcacgtggctttgcaggcctgcttgggacaagcaacctggtgtccccgtgtcctgaaaccctggcagtcactggggctagggccagcctcttccctgggaagcagggagccccagggcaacgttctgggaaatcaggtttattagttccttaatgaccgtttacaagctcagaagtgtctgcctggcattttccctccctgctgaggggctccatgcagccggaggcagaactgggcctccagaagcgctctgagtgtgtcgaggtgagggcccagggatgccgtcggctccctgggctctgcatgctcacacccagccagtccaggcctatttctggctgggtggcactgggcaaggtgcttacctctctgtacaataggtgagaccttgtacctcagctgagctgttcctggggtgagccctcgttcatggtgacaaagtcacatagatcttagaccctgggaggatactagcatcttatgcatacacaaactgaggctcagagatgttaagtggcttgcccaagatcgcacagtggttagagatgggcctgtgaccctgtcttctgccatcgggacagattttcactgtctggaggcaggtggaaaccgggtgggctcctactttgtaagcacaggacagtgccctgtctgtgtacatgggacagtcacaaacggaaatggcctggtcacaccttagtgtcaaggagcctccagcaggagtgaaacggacctctcacacagaccccaggctgcatctcatcctgccccaaccgctgggcttgtgctggaccaccactgcttccaaggacccgtgaaaacccggctgccgggatgcagagaggcagactttcatgaacgtttgcagcaaagggcagttcccaccgagcctgtgttgctgtggcactgtgtggtgcacaccccaccccggaaaccctccagtgtcctggtgtctgaccccaaatggacagggccttttggcccccaggggccacttctgactcctccccttcacaacgatgctgagggagcaggagaactggggcccggctgctgtgcgtgcccccttcccttcattgccccaaagcctgcagtccagccccaggctcgggagctgctgcctcttccctgggatgtggaaggcacctgcatccccgcccagctgctgccacttgcctgcctccatcagcagctttgttttattttgtctgtgtgttttttgagatggagtcttgctctgtcgcccaggctggagtgcagtggcgtgatctcggctcacttcaacctccgcctcccaggttcaagcgattcttctgcctcagcctcctcagtagctgggattacaggcacccgccaccatgcctggctaatttttgtatttttagtagagatggggtttcaccatgttggccaggctagtctagaactcctgacctcaggtgatctgcccacctcagcctcccaaagtgctgggattacaggtgtgagccactgtgcccagcctccaccagcagcttttgaaatccagaaatttccaggggagggcactgtggtgggtggggcccagcgctgtgtccagctcgaggcctggctgcactgccacctcctttggtgcccacccctgtgtcttgccagcagctgctgcacattgggcttcggggatgcaggactccagcacccccagctcagcctgcttcctggaccaggaaccccagccgaggagggggcatttgtatctctgccatccctgctggcaactggtcctgagaaagcccagatggttggtgcagagggggcgtcaggggctgcaccaccctaagaacatgacatgtcaccccccagccccccgcaacacacacacacaggttcacacctcacacccctgatcttggcggctccctggagcacagcacccgcttcccgtgtctgtggttggcttatgacgccccagccactctaaccgggttaaggggagcccagagcctggggccggataggaaaaagcccagagaagtcaggggatggtcagtcccctgaagctgcccctgggggttcttgatcttctgaactgagttcgaggcaagccctggaggggcgaggaggagaaagaaacagctctctgggccaggacccgctgttcgtgggatgtctggggagctgtgtgaacccacaggccgttttgtttctctccatcagcagctgtgggctgaagcgtgtaccggcggagtgggttgagatcgtgtctgcgcccacttgccaccagctccggcctctggggaggtggtgctgagagggagggagagtggctcctgtttggctcctggagacagacagctgggtgtcccaccctcagagtccccagccccctctcccctctgctaactctgccggtggagctcacgccgcagctcatgccaaccctgcccttctgttttgcctctcatgactctccccaaattctgcccccaggcccccagccagccttcttgccactttcctgccctttactcttgccccttctacctcttgccagggcagcgtcactggctacgtgaggcccagcttggggatgcatggggaggtgtaagaacagctgtgccatgagctgtccttccgggcctctggggctggagaaaccccggggtcagcagtaccacgggttttgctggggattgcacagtgggtgaggctcagcttcctctttgcagctttctaaaaatgccctggttcccagcagggccacaggcagggaaaatgagtttcagtttctgtggcaagggagctggggagagaagcagtttccttgtccccagccctcaccctagcatcctgtgattcagccgcgaagacgtggccccaagcctcccaccgccctccttctgtcctgactgcccactcccagggacaccaggtgacgcctcgcccacccgcggctccggagccaggctggaagcagcttcccgcccagggggtggtttccccacatcctgtcttcagatggcttgagccccctaaacttcctggtcatatccagtggataataatggtctccctctttcctgtctggaggggagggggctgcttacttcttatccaagggcctgtcccgtcccacccctgtgtccccatttctggccacacgcaggctcagcccttgcatcaagcctctgcctgtttccctctgggctgcacctgtcacgctctccctgccctgccccataaagcccatagagcccagggcttgtggggactgcacccttcattagcaagactcagagcttctagaaacccacttgtgtgggggtggggagtgcagggagattggtggcaccaggtggagagagggaactgcacctgggggagttgggaggggcagtgggctgggcccgcgtggaggagtgtggcttgtacagtccgcatggcggggggacccttgtaccctgcctggactggctggtagagctgttggggacctccctgggggtggccttgcttacccagctgtgcggaacaggcttggttgggagtgcctggcctcaccctttgtggggaaaccagattctctgggcagcagtggtaaatggtgtctgagtctgtgtttcgttggatgtgtctgaggtccgctgctgccagctgggttatgctgtctccaaagctatctgcagtgggggaggccctgagcctgggcaggggagggtacagaggcctcaacccatgggacctgggggtgatctgaactctgcacttcactttttttcaggatttcccccgccccaccctaaaggaggaggaaatagagtctgtcccaccctaagccccagtccctctccccaggtctctttggcatctcccagctgggctggggctgaaggcccttctctggggttggccacagtgaggccaggatctggctgggcaggtggcagtgttccgcctgtgggctgggtgcggaggcgggcctgggggtcttagagagagagcggcggatgtgactgcgggccaggaggaagcctggtcccaggatgtcaccatttcccctgcagtgagcaagcatctctagggctcggagataagtgctgggtggggtagctccagctctccagcgcttttttctgtctggttcctgccatctggacttgagccatgaggaaggccagagtgggtctgacagtccccactcctttccccgctgagccccaaggaaggggctgggcctttgcacccccaccccaacttctgcacgagttggaggcagttgatctcaatggtggaaagtggctggtgcaaagtcatgcttccatactccatgtttaggcttcatgggtgtcaaagctgggccgtgaccttgtcccattccctcagagaagggaactgaggccagagggtggagctgctctcaggccgctgcccaggcctcttgtgctctgcggttcagatggcactcccgatgccaggctcctgcccaggaagacatgcccacccgccctggccctgtctctgctgtctggtgtcaggccacctctcttcgggacccccccccaactgattgccctggggctgaccaggctctcctctccctcagtgttgggttttgggagcctctctcatcaggaggttggcacagatgccagccatgcagcggatcctgggcaggggtctcagctgggatggcctggccttgggacagggaggctggctgggcagaaccctagaaccaaaagcggtgcctgtggtgggctagggagctaggtggggagtctagtggggagtctagtggggaggtccactagacactcgttctggcacagcatgcagcgtcctccatcctggccctgctgtgggtacggagccagcagggcaggagctctcagtggagccctccaaagagggctgcttcctggaccagctgcaggatgagggagaccccttctgtccagggctgacataggctgaccaccgccagccccaccctctcactagcttcccattcagttagccattgatgagggctcactgggtgcaggatcctgggctgcccggggttgggtaggggactcctacatgtaggtaaatccgcgagatgctggagagagcaggcaataaagtggttgattctctctggaggtgacattttactttcctagtagggcttggccaggcaggcaaggtggagcctggtgtgccaggcgcagcgcttcagatgagaggaggtgagagcttggggatggcacagggaagtgttttgtctggtgagggtgtggcagggagggcaggcctgaagggacctccagggaggtgtgatcagatctgggttccagaaagatcctacctgcttggcgaccttaactgagctggagtctggaggccccacccttgcacccagctgcttccactgcttgcctcccatcccccagtgccagttccccagggcagtgccctccccatgccctcttggtgtaccctggtcccaaaggaggccaagctatgaacttttcttgcagaggtcccaggtgaggctgttgtcctggagctgtccccagagcaggcttaggatgaggggacctagccacagcttcaaccgagtggggtcccggtgtggctgccagggctccttggcaccaacccagcccagtgggttgatctctgaggacctcgtcatactcagccgggcagtctgccctggggggtggggtcaggactccccagcacttcgggatggaaggaggcgaagccagcgctgctggactagccttaaagaagcgggagacatcctagctccgcctcaagatttctcctctgcacccagcattctgctccccaaatgtcccaaatatgcagggggtcaaggaacattgctcagtggaatcaatggggagcgtgggctactccccagcctctggtttgccccatagcagccccttgggcaccgctggggacccccaggcctctgaggagcttggtttggaaagcgctggaatgctggaccaagttccctctctggctccctgagagggggtcttctagccccagtcttagggcaagaggagcccgtcccctaggagcctccaggccctggagccagacatcgggcgtcctagctacaccctttcctggctatgtgagcttgggcaagttaccaaacccctctgagcctccattcaccatctacagaatggaagagacgctaatgtcaccctggaaggtgttttgaagggtaatgtgtgtaaagggccaaacaaggccccgcacagttaaggacttaaatcctgcccggccccgggagggcttccggcatcttggggttcccctcaaaggatggcctgggcaggacttcttaaaaacaaacaggcggctgggcgcggtggctcacgcctgtaatcccagcactttgggaggccgaggcaggcggatcacgaggtcaggggatcgagaccatcctggctaacatggtgaaaccccgtctctactaaaagtataaaaaattagccgggtgtggtggcgggcgtctgtagtcccagctcctccggaggctgaggcaggagaatggcgtgaacccgggaggcggtgcttgaagggagctgagatcatgccactgcactccagcctgggctacagagcgagactccatctcaaaaaaaaaaaaaaaacaggaatgcccctgggtttcgtgctttaaaatggttgattttatgttgtgtgacttttaagttcaataaattaccaatcaaagcaacaaaacacttccagatcatttgaactttgccttaagtatcagaaggcagttagtaattcctggactttgaatgttaaatatgtggggttcttttgttttgttttgttttgtttcgagacggagtcttgctctgtcacccaggctggagtgcagtggcgcgatctcggctcactgcaacctccatctcccgggttcaagtaactctcctgcctcagcctcccgagtagctgggattacaggcccaccacacccagctaattattttgttgtttttggttttggttttggttgtgagacagagtctcacactgtcatctgggctggagtacaatggcgcgatcttggctcactgcaacctccgcctcccatgtttaagtgattctcctgcctcagcctcctgagtagctgggattacaggcgcccgccaccacacccggctacttttttgtatttttagtagagatggggtttcactatgttggccagactggtctcgaactcctgacctcgtgatccaccctcctcagcctcccaaagtgctgggattacaggcgtgagccactgcacccagccccggctaatttttgtattcttagtagagacagggtttcaccatgttggccaggctggtctcgaactcttgacctcatgattcccccaccttggcctcccaaagtgctgggattacaggtgtgagcgcctgcaccctgcccaaaaatatgtggttttgtttgttttttgaggcagagtctccctctgtcgcccaggctggagtgtaatggcacaatctcggctcactgcaacctccgcctcccaggttcaagcaattctcctgcctcaacctcccgagtagctgggactaaaggtgtgcaccaccatacccagctaacttttgtatttttagtagagatgggtttttaccatgttggccaggccgatctcgaactcctgacctcaggtgatccacctgcctcagcctcccaaaatgctgggattacaggtgtgagctactgcccctggccgaaagttaaatgtttctgttctgttcaagtaatattgagaaaaataacaggggccatcttgactctaatgttctgctccaatcaggttcccagaccagaggactgttgttaggtgattggctgtgaacaccctgaggccagtgcccctcgctgcttggcactcggagatgcctgattagcacctttaatcccttaccagtgaggcaggtggaattggccccattttacagatggggagactgaggtgaggaaggttaaagcactcagtggtgggcatgccccctggagccggccctcctttcttccagctgtgagtacccaggaagctgcaccgtgtggcctggagctgtctatctgtccttccagccacctgtctgtccagccacccttccacagactgaggcttgacaccggagcatctgtacagagcaaggagaagacaagaacatgctctaaagcccttcacagcaagacccaggaagccgcgggcaaactcagactcgaaggtaggaagctgggcggccgggtggctggacccagggcgctggctgctgtgcccacgtccagatacctcctgcggggcccacgctctctgtctgaacagcggtggacagtgaatgaagaaagtcaattcagggagcgagagggaggaataagggcagggaagggacgggcgcggtggctcacgcctgtaatcccagcattttgggaggccgaggtgagtggatcacctgaggtcaggagttcgagactggcctggccaacatggcaaaaccccatctctactaaaaatacaaaaaatttagctgggcgtggtggtgcgcgcctgtagtcccagctacttgggaggctgaggcaggagaatcgctcgaacctgggaggcagaggttgcagtgagccaagatcatgccactgcactccagcctgggctgcagagtgagactacatctcaaaaaaaaaaaaaatttgccaggcatgctggctcacgcctgtaatccaagcactttgggaggccaaggcgggtggaggccaggagtttgagaccagcctgaccaacatggagaaacccagtctctactaaaaaatacaaaattagctgggcatggcggtgcatgcctgtaatcccaactactcgggaggctgaggcaggagaattgcttgaacccaggaggcggaggctgcagtgagctcagatcgtgccactgcactccagcctgggcaacaagaatgaaactcagtctcaaaaaaaaaaaaaaaaaaaaaaaggcaggaagcgaggtgggaccggcactgctcaaggtggggcaggagggcacttgaactgcaaccaggaggctgagaagagccagcccctcctctgtgtgatggtctgggacagagtgactggctcggacagaggcccaacattatggagcacctgcttcattgagagagaattcacacaccagtcgattcacccatttaaagtgtaccatcagtgtttttatttatttatttatattttgagacagggtctcactctgttacccaggctggagtacagtggcgcgatcacggttcactgcagcctcgaccttcctagctcaagccatccttctgcctcagcctcctgagtagctgggactatatgcacgcaccaccatatctggctaattttttaatttttttatacagatgggatctcactatgttgctcaggctggtcttgaactcctgggctcaagtgatcttcctgcctcagtctctcaaattgctgggattacaggcatgaaccaccgctcccaaccttcagtgattttgatatattcacagaggctgggcacagtggctcacacctgtaatctcagcactttctgagaggccgaagcaaacttgaggtaaggagttcgagactagcctggccaacatggtgaaaccccatctctactaaagatacaaacattacccaggcatggtggcttgcgcctgtagtcccagctactcgggagactgaggcaggagaatcgcttgaacctgggaagtggaggttggcagtgagccaaaatcgcaccactgcgctctagcctgggtgacagagcaagactctgtctcaaaaactatatgtgtgtgtgtgtgtgtgtgtgtgtgtgtgtgtgtgtgtacatatatatacatattcacagaattgtgccaccatcaccacagtttcagattgctttcatcaccccctaaagaaagcctgcaccctttagctgtcaccccctgcccagtccccaccttcccagtcctaagaaccactaccctgcttctgtctatagatttccctcttctattccgagctttcatatgaatggactcatgcagaggtggccatcgtgactggctcctgtccctggacacaatgttctcaaagctcgtccacgttgtagctttgttaggacttccttccttttgtggctgaaggatgctccattgtgtggctcaaccacattttatatttgtgccttcatctgctgacgggcgcttgtgctgttttcctgctccggctctgcagagccgtgctgccgggcacttcctgtccaggtttctgtgtggacacagtgcttcagtgtgtgaagccatctgctcattttttgttgttgtttgagacggagtctcactctgtcgcccaggctggaggcctggagtgcagtggcgagatctcggctcactgtaaccacaccccccgtcctgggttcaagtgattctcctgcctcagtctcccgaatagctgggactacagttgcccaccaccacacccagctcttttttttttttttttttttttgagacagagttttgctgttgttgcccaggctggagtgcaatggcgagatttcggctcaccgctaactccaccttccaggttcaagcgattctcctgcctcagcctcccgagtagctgggattacagggatgcaccaccatgcctggctaatgttttttgtatttttagtagagataggctttctccatgttggtcaggctggtctcgaactcccgacctcaggtgatccgcccgcctcggcctcccaaaatgctgggattacaggcatgagccaccgcgcccagcctaatttttgtatttttagtagagatggggtttcaccatgttggccaggctggtcttgaactcctggccttaggtgatccgcccacctcagcctcccaaaatgctgagattacaggcgtgagccactgtgcccggtgacatcatccactcatttgctcctccagacgcttctctggggaggaaccgttactctcccccttgtgcaggtcaggacttgggtgatgagttgtcaggtgactaacccgacagcaaatgcaagaccattggcccagtatgcgctgccggctccattgcttttgatcatgaaccccacccccagcagagcttggccagtttgagacaatgaggggcccaggaaagctgggtcaggggtaagcaagggcacaggaagagacgaagagaggtcctggaagtcccagtgagacgtttggactttgggtgagaacaggaaatcctgggagagagttgagcagggaagcaacaggtgtgatctatgcttttgggaggtgaccccagctgcggtgcggagaatgatcagtctcagggggcttgaggcagcaggtagaggaattgagagagtggagtgagcctccaggtgaggagatggtggaggtgaggtggagatggtggaggtgaggtagagatggaggaggaggacaggttcagatggctgctgtctcgccgacccgtgcatgccacgcctcagcccacacacgcccttggctgaagggctcccagggagatgggtatggagtccctggcttcgtacaaggagaggaaaaacaaaacttgcccaggaaccttgggatgtgaaggagaggaaacagctgggggggtttatttttatttttatttttatttttgagacgaagtttcgctcttgttgcccaggctggagtgcaatggtgcaatctcggctcactgcaacctctgcctcccgggttcaagcaattctcctacctcagcctcccgagtagctgagattacaggcatgcgccaccacacccagctaattttttgtatttttagtagagacggggtttctccatgttggtcatgctggtctcgaactcccgacctcaggtgatctgcccaccttggcctcccaaagtgctgggagtacaggcatgagccaccgcgcccggccacagctgggggttttaacaagaagacggtcatggggcagagcaagagacgaaacgaagagaatgaaacaggcagagggtgttaattctggtggagtcagaggggaactggggactggtggcacacgcacaggaaagccccagatggggtactgggcaacagccactgaaatttgggatgtacttactcttcaacccagccattctgcttccagaacttggtcttgtaatagttaaacaagcacacgcggtgtatgcaagggtgttagttgcaacatcagacccatgtctcaaattccggaaacatcctaaataaccagcagtctggacttaagtaaatcttggtgcattccacttatgaaatctttgcattcatcaaaaaagacaagaggcctagggccgggtgtggtggctgaaacctgtaatcccagcactttgggaggccgaggcaggtggatcacctgaggtcaggagttcgagaccagcctgaccaacatggagaaaccccatctctactaaaaatacaaaattagctgggcgtggtggcgcatgcccgtaatccgagcttcttgggaggctgaggcaggagaatcacttgaacctgggaggtggaggttgcggtgagccgagatcgcgccactgcactccaatctgggtgacagaatgagaccccatcacaaaaaaaaagaaaaaagaaaaaaagtaggtctgtccgtatgtgttgacagggaaagatgtctacaatgcaggtaaaatgatagagtgtgggctgggcttggtggctcacgcccataaccccggctacttgggaggctgaggcaagagaattgcttgaacctgggaggtggagggtgcaatgagattggctcacagcaatctcttcctctcgggttcaagtgattctcctgcctcagcctcccgagtagctggaactacaggaatgaggcactatgcctggctaatttttgtattttagtagagatggtgtttcactgtgttggccaggctagtctcgaactcctgaccttaagtgatccatccaccttggtctcccaaagtgttgggattgtacgtgtaagccaccacacacagctgtgtgattttttttttttttcaatgagcatatgccacttttattgttaaacagtgttctcactatgggggagaaaagtgccagacaggtggcagtttcagttatcttttttttttgagacattttctcactctgtcgcccaggctggagtgcagtggcatgatcttggctcactgcaacctctgcctcctgggttcaagcaattctcgtgcctcagcctcccaagtagctgggattataggcatgcgccaccacacctggctaattttgtatttttagtagagacagggttttaccatgttggccaggctggtctcaaactcctgacctcaggtgatccacctacctcggcctcccaaagtgctgggattacaggcatgagccacgcacccagccagttttagttatctttgaaaaatgaactggggctgggcacagtgagcttgcacctgtaatcccagcacttgggaggccaaggcaggcagatggcttaagcccaggagttccagaccagcctggctaacatggagagacccccacctctacagaaaaaagacaagaaaaataaactgggtggccttgggggacagggaccagcacagtaggtttctcatctctcggcccacctcggcctccccaagtgctggtattacaggtgtgagccaccgtccctggcctgcatcttcatgctcttttcagggtttggttcttgcctcaagcggagagatcagaaattgaatgaggtagtaagttgaggacctcccagacccatatggtccgggatgcaaatgatggtcagaaatagacctcactccaaccactgggcctgaggttcagcctggttcaggctgggtttagtccccagggatggtttgtttttggttttgtgtgtgtgtgtgtgtgtgtgtgtgtgtgtgtgtgtgtgtgtgtgtgtgttttcagacagagtcttgctctgtcgccaggctggagtgcagtggcgcgatctcggcttactataaccgctgcctcctgggttcaagccatcctgcctcagcctcccgagtagctgggattacaggcacgtgccaccacgcctagctaattttttgtatttttagtagagacggggtttcaccatgttggccaggatggtctcgatctcctgacctcgtgatccccccacctcggcctcccaaagtgctgggattacaggcgtgagccaccgcgcccagccgcccagagatgtttgaaccaactttaggcaagttggttcttggtctgggctgcgtgccctggcgtcagggtcctgacactgcgccaccccgcaccgcccaccgctgctctcccggtctccattccagccctcccgcctcctgcccacaatggcctctgctgacaagaatggcgggagcgtgtcctctgtgtccagcagccgcctgcagagccggaagccacccaacctctccatcaccatcccgccacccgagaaagagacccaggcccctggcgagcaggacagcatgctgcctgaggtaagggggctggcctgggggctcactgttctgccgtaggtaacagatgtacccacgtgacactttctggtcagtttcacttcccagaggggctccttcctgagccacagctgctgtctgtgcagcccttgactcgggccctaccccctccttcctgggcccgaaatatcacagggagtaaagccaggaaccgggctcactctcatcgtggtcaggggcacacaggaagggccagccccaagaaagtgcttgctggtaaccctggggccctggctgttctcatttcaccccctaggcctggactctcagtctctcttctgagggctgggggctttctttgacatgggtgagcaggggacagtgtctccctggcatcagcagcccgcctaggcagtgtccgcttcctttgggaggacgagaacagatcagtgtttctgacagtctggtctagtgccccataaagagctcattgaaaaccggcttgtggcagcgtgggcttcctgcacagtctggagtataaagggaagcgatgttaacgccccccgttcacccgagagctctgcagaagacacagcagcaggcaggagcgtcatggtgcagaggggagggactggatgaggagttaggaaaacacacgctggccttgacggagaaaagttagacaatggcgattttaaattcagaatgaggctgggcgaggtcgcctcatgcctgtaatctcatcactttgggaggctgaggcagccagatcacttgagcccaggagttcgagaccagactagacaacatagcaagactctgtctctgcaaaaaaaattaaaaaagagctgggtgtggtggcacatgcctgtaatcccagctacttaggacactgaggtagaaggcttgcttgagcctgggaggtcgaggctccagtgagctatgatggtgccactgccctccaacctgggcaacagagcaagactctgtcccaaaaaatatatatataggccgggcatggtagctcatgcctgtaatcccagcactttgggaggccgaggcggccagatcacttgaggtcaggcaggagttcgagaccagcctggccaacatggtgaaaccccgtctctactaaaaatacaaaaattagccgggtgtggtggcacatgcctatagtcccagctactcaggaggctgaggcagaagaatcgcttgaacctgggaggcggaggtgtcagtgagtcgagaccacaccactgcactccagcctggacaatacagtgagattccatctccaaaaaaaaaaaaaaaaaaaaaaaaaaaatatatatatatatatatatacatatacaaacacacacacacacacacacacacacacacacacattatatatatatatttccaaatgaaagcaaattggggcataaatcagggttgaagtttgttctcagggttttcagaataggaggctaaagaaaagccagcccaggacctgggctgcacacaccaccgcctgccctccctccttcctccccaagaggaagaacccagcctacttgaagagcgtcagcctccaggagccacgcagccgatggcaggagagttcagagaagcgccctggcttccgccgccaggcctcactgtcccagagcatccgcaagtgagcccccctacacccaagcccagcaccccccacccagcaacctgtggattctcggggcctggacatgattgggcctggtccctgcgtcccctctctggaaggaggaggccggcattaatgagcaatgtctccctgtggcctattatcatggtatagatggggaaatgggtatgtgctttgcggaatatcacggtgtggaggctggggggcttcgaggagctgggtggatcagtgtgggggtgcctggggccctagcctggctcctcacgctcccgtcatcccctgcttctgctcatctggtcactgggctccagccaggggcctcacaggcagatccgccccccacctccctgtaggcacgcgggcacacacgtgccatcaccccttccacacactcaggtgcacaggcgtagacaagcgtatgcccacctgtcccttgtctgcttccgcaggggcgcagcccagtggtttggagtcagcggcgactgggaggggcagcggcagcagtggcagcgccgcagcctgcaccactgcagcatgcgctacggccgcctgaaggcctcgtgccagcgtgacctggagctccccagccaggaggcaccgtccttccagggcactgagtccccaaagccctgcaagatgcccaaggtgggatccatggggaaaggaggcaggggtggggaccctaatggctctgcttaccgcccccctcccttccagattgtggatccgctggcccggggccgggccttccgccacccggaggagatggacaggccccacgccccgcacccaccgctgacccccggagtcctgtccctcacctccttcaccagtgtccgttctggctactcccacctgccacgccgcaagagaatgtctgtggcccacatgagcttgcaagctgccgctgccctcctcaaggtgcggggctccctcctgcagggcccccacctctgcccggcctcccttccttgcccctcccttccactcctcatagtagcatcccctaaagctcacctgggcatctgcctacggtgccaaggacagtggatgtgctgggatccctgggcaaagagggaccccgaagcccagcacccaggcgtccatccttctgtcttaaatctcgtgtgaccccctgccaagttttggaacctggtctctgcactgactcttaagctggggaagtgggaagtgagatgcatacttgctcctcatccacccgggttttccaagtccctgttacgtgctgggcaccgcgtgcagagccatcgccatcctggctgagctcgcagcccagggtgagggtcaccattcagggtggtcagtttaggagagcggctgttatcagggaagacattgagttaagcccagaagacacaaggagacgttcactagggaaggaagggaacagcattctcagcagagggaatggcctatgcaagggccaggagcccagaggaagtacagtgctttgagggggcagcaggcggtttgatgtggttttagtgaagggtggttataggagctgtggcaggagatggggtcagaaaggtgggcagggacctggtattccgtgccaagaaacagggacagggagacatggcccaagcctcgggagtgagggtatagaatgtgggttgctttgagtgttagggtaccagcagcccaaggcagaggggcagcagggaccaagggaaaggtgactccaaactgtgccaagagtggtgtgccaacggaagctggtgtctcatttcctggccttccagtctcaggagctcctcttgcccgttcagcttgcagaatctccacgctttgggcaggatccctcctcccaaggcgctgcctgcaggcggatgggcttgatgattccttcggtgttggggctgggggcctaggtggccaggctgtggtcctgatggctgtgcctctgcccgtgcacaggggcgctcggtgctggatgccaccggacagcggtgccgggtggtcaagcgcagctttgccttcccgagcttcctggaggaggatgtggtcgatggggcagacacgtttgactcctccttttttagtaaggcaagcatggggtgtgggacagcaggagttgggtggggtggcctgggagctgggtgaggtgaccttggcattgatcatattcaggaacccctgagggacccagaggcccactgctgggatgtggcatggtcctatgtggagctgctgggcccccatctttctgttgggtagggtgaagacctgcggtggggcacagtgccacccgggaaagtcaccattggggctgacgggcatgtggcttcccaattcattgtgaagagcccgtctgttcagctgtgtcctgcccttgaattgaggttccggggggcagtgtttgggacagactccttacactgtattttcttgtcccccaccccaggaagaaatgagctccatgcctgatgatgtctttgagtcccccccactctctgccagctacttccgagggatcccacactcagcctcccctgtctcccccgatggggtgcaaatccctctgtgagtgctggggcagagtccctcctccaggccagccaccagcctgggggcatccccagacctcaccctggcccccaagccccttctgagcaccctggtggggtctgggagtattttggtgggggattcaggctgaaagccaccatccccaccaggaaggagtatggccgagccccagtccccgggccccggcgcggcaagcgcatcgcctccaaggtgaagcactttgcctttgatcggaagaagcggcactacggcctcggcgtggtgggcaactggctgaaccgcagctaccgccgcagcatcagcagcactgtgcagcggcagctggagagcttcgacagccaccggtgaggtgtcgccctggagcccccaggagagcctggaaggttccaaattcctctgggccctcctgaagcgcccccttactcattcagcaagtgtttcatgagcatcttctgcggatcaggagtgtagtgacaagctcgaaggcgcaccctgtcccaagggttgtgcacatgacctgggaagggccaggggtgcttgctgcctctcttccaccccatgctttctgagcctggtccccagccttgctcccagacagcagtcagtcaacaaatgttcattgagtgtcactgcctgcaggccctaaaatggaacccccagagggtggagcagggagggcagggtcggtcagaggacagttagaagctggggccagggctgggcgccgtggctcacacttgtaattatagcactttgggaggctgagtcagaaggattgcttgagcctaggagtttgagaccagcctgggcaacatagtgagaccctacctctactttaaaagaagaagctggggctgggagggaggggactctgggagaggctatgcagagcccttggggaagaacagggcatctgatttgcagcagcccaataaacactgggcccaaattagaaaataacaagcaggcagggcgcggtggctcacgcctgtaattccagcactttctgaggccgaggcaggcggatcacctgaggtcaggagttcaagaccagcctggccaacatggtgaaaccccatctctactaaaaatacaaaaaattagccgggcgtggtggtgcatgcctgtaatcccagctactcgggaggcttgaggcaggagaatcacttgaacctgggaggcagaggttgcagtgagccaggatcgcaccattgtactccagcctgggcaacaagagcgaaattccatctcaaaaaaaaaagaaagaaaagaaaaagaaaataacaagcaatggccaggcccggtggctcacacctgtaatcccagcacttcgggaggcctaggtgggcagatcacctgaggtcaggagttcgagaccagcctggccaacacagtgaaaactggtctctactaaaaagacaaacaaaattaggcaggtatggtgggtgcttgtaatcccagctacgagggaggctgaggcaggagaatcgcttgaacctgggggcgaaggttgcagtgagctgagatcgcacaactgcattccagcctaggtgacagagcgagactctgtctcaaaaaaaaaaaaagaaaagaaaagaacaagcaatgataggtgtggtgggtgtcccggaggaggatagagagggagagtgaacagctggtggggaggggtgcagtcaggacaaactgtgatgtcatgtgcaaaggccctggggctggaagggcaaagtacatcccaggaaatgcaggcaaagaggccagagaggtggtcggtcaggcaaagctttgcagccagcaagagggggtgattctggaatttgtcccaaggccagtggaaagctatcaaaaggttttaagctaggagagagatgcttggaggctcgtcttaaaagttcctctggtttgagatgagttgacggggcagaacagggagcccaggcgagccatgtgaccaggccagggtggccctgtggccgggactgggggttgggataggagctcggctcagctgacccgaggtgtctctgcacaggccctacttcacctactggctgaccttcgtccatgtcatcatcacgctgctggtgatttgcacgtatggcatcgcacccgtgggctttgcccagcacgtcaccacccagctggtgagtcgggtcaggctccatgctgggggtcccagcctctcctaggaggcctcagtgtcgtgggtacctaatccctcccaccgcaacaatctggccccagcagggtggtgctcaccatagcctggccccttcctggaggctctatcctggggacagctgccccagctccccatgcccagggcccacactgttctgacgccctcctctgtgctacctccacgataggtgctgcggaacaaaggtgtgtacgagagcgtgaagtacatccagcaggagaacttctgggttggccccagctcggtgagggcccaggctgggggacatcatctgagccaggagtccctgtgccctgtcactcccagctgggcaggtgggctcctcacccacccgcaggcccctcatcaggggagactctgcggggcagaggtggagtgatggacccctcccaggtctggggctcaaactcactctctcccctccctttcccttccccagattgacctgatccacctgggggccaagttctcaccctgcatccggaaggacgggcagatcgagcagctggtgctgcgcgagcgagacctggagcgggactcaggctgctgtgtccagaatgaccactccggatgcatccagacccagcggaaggactgctcggtgggggcaggccctccctcctacccctgccagaccctggtcccggactagctccacttgccctgtccttcaagggcagtgaccacgttccctcctccccgccccacctttcccagacccccatagatgagactgagccctggggagatgggaaaagcctctgtccttgcccactccagtgggggtgacctggccccgacatgacccaccagccttcttctgccctccaggagactttggccacttttgtcaagtggcaggatgacactgggccccccatggacaagtctgatctgggccagaagcggacttcgggggctgtctgccaccaggaccccaggtagggcctggagcctctgctgggcctcagggtcaggcatagccatgccatctgagccacccacagggacgtgggtaggtggacgtggcacgctgggtgtgccacagcccaatctgaaccctgtctccaggacctgcgaggagccagcctccagcggtgcccacatctggcccgatgacatcactaagtggccggtgagtgtccctggcggggagtggtctgggaaggtcagggatgggggacctgcctgctgcacagcccacttccctgccggtgccccctcctggcagatctgcacagagcaggccaggagcaaccacacaggcttcctgcacatggactgcgagatcaagggccgcccctgctgcatcggcaccaagggcaggtgagcgacctgggccctggcctcagccatcccactgcccccccgagctgcggcttcctgtgggccctctgctcctccaccgtcaccacccacagccgctgggccgatgccctccaataactgtcctttgctcccctgctctggggctacccatggtgcgagctggaggaaggaagcttgctccagagtcgaaggttctggatgcggcatcccccttcctgccagcgatgcctcctgtagccaggtgctgggctctgggcaaaggtgggcagtggttattcggcgccctgatgtcccctcttgcctcaccacccccttagctgtgagatcaccacccgggaatactgtgagttcatgcacggctatttccatgaggaagcaacactctgctcccaggtgaggcgaggcaggcctggagtagtggaggagaggacgctgggcatggcagcctgctggggccggggctcacgcactccctcccatgtcggagcctcagactcagcctgcttctggggcgctgagcaccatatgcccactcccaggtgcactgcttggacaaggtgtgtgggctgctgcccttcctcaaccctgaggtcccagatcagttctacaggctctggctgtctctcttcctacatgctgggtaagaggctcctcactgcccccgaacccgacccctgtgatggccacccagccggacccctggggaaaggttcctgggccagggcatggccggcccaacctgccgaagcctactgctcctgaagtgcctggctgaaggccgctgcctggtgtgtccctcccccagcgtggtgcactgcctcgtgtctgtggtctttcaaatgaccatcctgagggacctggagaagctggccggctggcaccgtatcgccatcatcttcatcctcagtggcatcacaggcaacctcgccagtgccatctttctcccataccgggcagaggtaaggatgtggaggatgggaccccttccgcacatagggggccagccctgctgctcctattccacccacctgggatctgccagagggacacggtgcccctcctgtactgggctccacagcggagggacagctaatctgggggcttactggctggtctcttaatcccagtgagagggaacagtgatgctcttgagtcaccctgtccctccaccgcctcatttatcttcctaaccgtgcccactgcctgacagtatgctaggtatctgcaggtcgagcggtaggaaatggcctccgtgcgccgtcggcagtctgatcagttccacctgactgatctagtttgttcagtgtccgtcctctccccaccgtgtgcggcctggaacaggcttgtctgtcttgcttattgctacggacccacaccaggcacgtacacagtaggcgctcagtgtttgctgaaagaatgggcggagcaggcccagctttggtccagcagctccagccgaccccctgcccctcagcctcaggggtccccatgcctgccagggaggagctgatcgatgggatgacccagggtgcaggcccggcccaggccacccacctgatgcctgaagccacgtctcccctgccccgccccaggtgggcccggccggctcacagttcggcctcctcgcctgcctcttcgtggagctcttccagagctggccgctgctggagaggccctggaaggccttcctcaacctctcggccatcgtgctcttcctgttcatctgtggcctcctgccctggatcgacaacatcgcccacatcttcggcttcctcagtggcctgctgctggccttcgccttcctgccctacatcaccttcggcaccagcgacaagtaccgcaagcgggcactcatcctggtgtcactgctggcctttgccggcctcttcgccgccctcgtgctgtggctgtacatctaccccattaactggccctggatcgagcacctcacctgcttccccttcaccagccgcttctgcgagaagtatgagctggaccaggtgctgcactgaccgctgggccacacggctgcccctcagccctgctggaacagggtctgcctgcgagggctgccctctgcagagcgctctctgtgtgccagagagccagagacccaagacagggcccgggctctggacctgggtgcccccctgccaggcgaggctgactccgcgtgagatggttggttaaggcggggtttttctggggcgtgaggcctgtgagatcctgacccaagctcaggcacacccaaggcacctgcctctctgagtcttgggtctcagttcctaatatcccgctccttgctgagaccatctcctggggcagggtccttttcttcccaggtcctcagcgctgcctctgctggtgccttctcccccactactactggagcgtgcccttgctggggacgtggctgtgccctcagttgcccccagggctgggtgcccaccatgccccttcctctttctcctcctacctctgccctgtgagcccatccataaggctctcagatgggacattgtgggaaaggctttggccatggtctgggggcagagaacaaggggggagacacaagtagacctcaggtagaacgacactgggcggagccaccccagggcctgctcccagggagtgctcgaggcgcatcaggcccgttttttaccagtttatatcacggtcttcatttttaaaagtaacgctaactttgtacggacgatgtctcatggattaaataatattctttatggca

SEQ ID NO: 15768 - DNA, 30722 bp, Homo sapiens
acttggcctgaggatgagggcgctggaagaaggggatgggagattgggtgctttttcttgatggggaggggcgacttgaagacggcaatcaagacctagatgacgtgtttggtctggggtggagtgaggacgccaagagggaaaggacggcgccctgaagagaccagctcaggcgaaaacagggctctgcccaggcggggacccagctgggtggagggcggaggcaggaacccaggaagccgactgagcaaagactgcgtccaggccccgcccccatgagcccggccacgccccctggagcccagccccgcctcccggccgcccgcgcgcaggtagggaagaggcggagcgccgccgccccgcccccgaggagccaccgcccagccgctcgcaggcgccgcacggagttgcgtcccggggacttggggccgcagggaggtgagcgcggggcgacgagcggggcaggactcacggccgcccagccgcaggcgccggaagggtcccgaggttgtgcccgagcctgccctggagcggtggtgcgcggccaggaagggtgcccagtgcccggtgcccgccctgcggagcgcctgggtcccacgtgggctcggctggaggcccgggctggctcagacggcgccggcggggccgctggacccggtctgctggcccctagggctcggctcggacaggacgcctaaggggtccctgggcgacggggcgccagatgtaggggcaagacgattgggcagagatttaaacctccggaggaagagaggagactgcgcagggcagtcccgcctgcgtcccagaagtgcctgcagttcagacccttctctcccctccactttctcccgggtgagcaccgggcggaccggggccgaagtttgttggttgagccagccaaggtggaaacaggtgcgggggtggggatgagggactcacacagcagggctggaccggagctcagaaattggacccaggagtcctgacttctggatggaggggctggggaaggttggccctgggcttgccttttacctgtttggcccctcggatgttcccccagggcattgggatagagacggataagttccctagggtacagaccccgccccactcccacgccagggcgcaaaggaagcctaggttttggccctgccccattccatgaaagattaacggagggggctctagggttggagctactgagagggtggcagcgggtgtgtctgaggagcagaaggcggtggggagctgaccccacttggggagaggctgctgttgcctgggcggctggcatcaggcccccagtgtgtgccatttgctggtaatataatgagaccagcatctgccttattcgaccctcactgtccgtagggcaggcagtggaaagggaggcgtgttttagagctgtggttctcaaccaggggcgactttgcctgccatgggatatttggcaatgttggagtcattttgggtgtcacacacttgggaggggaagtgagtgttgttgttactggcaggtagtgggtagaggccagggacgctaccagacatcttcagggcacggaacagcccacataacgaggaattatccagcccaaggtgttgggctgtgctgaggctgagaaaccctgcgcagcagctggtccatcaggttccttctcaatgatgctccctcactggggaaactacctcagttttccagagtggttaggggaggaacttggaataaacctgaatgagatgaggggtaaggcagtgtgagggcacttattcccctcacaagagtcttcctttggtgccatgagacaccgcctttcccaatctccactggccctgcaggaagctggtctaggtgctgtgggggagaggttgggaacagaggacccccttgcagcccaggcctggggtgcttaaccccagggcaatctcccaggaaggctgggctgaggcagcccttgagctcaaatatccctgggctgggagggtgggcagagggcgagctctcttcccatagattttcccaaagctggattgctgaagctggcatggttgcctgataccatgtgacctgctggaattttcccttctgaactcacacctaactcctccaattatgtacaccttttgaaagtgacatccaaggagtatcagggctcctaattcctggggggtccccaggctgcttttgtcctgcaataaagagggcaccctgggttagctgacgagccctggagtgggcccagctgctgatggggtggaggcacccctgcccatggtgttagctgagcagaggtgagagatgggagacatcaaagcacaggccaggtggccccccagtagggatgactcagagttgtttgtattgggctggaggaatgtacttccagttttctggcaacaaggaggggtggctggcacggtgggagaggatcggatgaagcagccacgtccatgcccaggagctggggccacctcgctgccctccctccctgttttcttgcagtagccattatacccatcctgttcacttctggacccagccttcttgcctgggaaccctggtggaggtttcgagcttgggttctttttgttggtgttggtggcttttgttttttttgttttgttttgtttttgtttttgtttttttggtctcttgactgtaaaaggctgaagtgaaactcccaccttttcatttgcacaaaaaacaaaagtggcctccattgctgtgagcctctcaagggacagggctgagcacccaggcttgtacaaagttgttcaggaagtcggcagtggagctcgggtgtgaacccagttgcccaccctcaggccccacccaagagccccacgaacaaaccctcagtgactcctacctgtctgtacctggtgtaaccacacacacacacagacacacacaaacagacacacagagacacacacaaacacacagacacacacagactcacacacacacacacacacacacacacacacacactctctttctctccagcccaggagggggacttttgttcctataagaggaggaataaatcacactacaaatgctttgggtgacgcacttggggcccgagtcctgctctggggtcagtggtgctgtttttcctgtggcctcagctctggatactgtggtggcctctccaccaaggtttctgtccttgctgtgtaaactctgccccagacaaggtgacagatgacagcagaagtcaaggagctgtgcacgcctgcccgtgagtgtgcgagtggcatggctcagctggctggtgcttccctttgggcctggcccccgcctgccgctggcacagcacagggaagacgtgtgccctcctggctgcctctccccctccacactctcctcagatctctgtgcctcgcactctggagcaggcctcggcgctgccccatctgccccaggggatttccagagtgagctcaggcatctgcaccggctgtggaagcgctggctgtcggaagcggctcccagtttcctatccagctgagccaggctgggggaggagtggcggggacgtctgcgcctgcccaagtacaggctgacctcggcggtggtggtggctaggcagggacagctctcagggcacgggcggcttcacagggaaaccaagcctgcccggaacgtcgttttgcctcccaggagacctaggatgggtgtaaggaaaaacacatcttccgggaagtacaaagcgccaccgtgtccacggcccctccttcagcaaatgtatccgggcgcccagctgggagttgtttgtggtccaaaagctactggaaggcagttccagccccagtgcccggctcctgcaggaaagtggtttcagccaagtgggcagtgcaggaggtgggccagagacactgtttggagtgtgaggggaaccttgtgaccagcagaaaaggatggaggaggattccaaacttcaggagctgggccaaggtccaggggctgctgggcacagtcgtccatgtgtgtgctcagtaggatgagttcacttaattagtctgtgcctcagtttccccagctgcacagtgggctcactaacagtaatctacctggagggttgtgtgaggtgaggactcccgtggtaaaggtgtgcagcctgcagtgcagtgcccggccatggcaggagcagtgcggggagccatcgtgataatggtgttagggtggcttcaggtaggggcgtggctgccggtccatggcacagacttgggagatggccgaggccctgcctcgtgggctgtcaaggactagatgggaacacgcatatggagcagtggcactgttgttattgttattctgtaggagtggctgtgtctggggtagggggacctcagtgccttgctggccaagggaagtgagggtgggtttccatctgggcatgaactgctgacctctgcccaggggttttcctggcctgccagtgtgtgtgtgtcactgacagtggggtggggggcagctcatggagttggtgcccctcagctgtgctttccctggcgtaggttcctggggctgggagcagggtaaagctgcctcaagtcttggttttctcctctgcctcccccgtgtggccgccaaccctgtgccagcaggtggtgcagggatggcttcctgccccggtctctggcaagaaacccttttccctctcccagtgggtctccccaggttgtcagctccatttagtcataagaagatctggggccaggcgcggtggctcacgcctgtaatcccagcactttgggaggctgaagcaggcagtcacaaggtcaggagatcgggaccatcctggctaatacggtgaaaccccgtctctactaaaaatacaaaaaaattagccaggtgtggtggcatgcacctgtagtcccagctactcaggaggctgaggcaggagaatcgcttgaacccagaaggcagagcttacagtgagccgagatcaccctactgcactccagcctgggcagcagagcgagactccgtctcaaaaaataaaagaaaaaaaaaagagatctggaagaggagggttgaggatctgctgtggggtttggagtgggaacaggactttgaaccctggcctaagccccttttgaccttgccagcccgtgaggatgatgacagccgcctctcacccttagcctcaactaaatgagatcatgtctgtaaaagtcctttgcaagctgagcagtgctgcccaggcagttaggtgctgtcccttcttcatgaatcaaaggcctttgcatgcaggactcactccagcaccccaaacactcagagtcctcacccgttctttttctcctgcccctcaccagttccagggtggcaagaggctgcagagtgtggaggttaagagcgcgggaccctggctggggttgtagccccaccacctccctaactgtgggaccttggacaggtgacttcatctctctgagcctcagtttccccacctgtcgaatagagatctgtcccctgtggggctcgtggctcagatagagactaagtgagcgatggtggcagagctcagccaggaataaaagaaacttccaactgggcgttgggtgtgtgccaggcactgtacattcatatctgctgtcatcttccctggctccctccgtggtggggcatcaacccatctcacagcagaggaggcaggctctgcagcacccacttgcccaaagtctcccagcaggtaggtggcccaggcaggtttgagtcccatctctggccccttattcctcctcattcctcagcaagagagctccacgctgccccgaagcaaggtgtgggccataagcacgtggctttgcaggcctgcttgggacaagcaacctggtgtccccgtgtcctgaaaccctggcagtcactggggctagggccagcctcttccctgggaagcagggagccccagggcaacgttctgggaaatcaggtttattagttccttaatgaccgtttacaagctcagaagtgtctgcctggcattttccctccctgctgaggggctccatgcagccggaggcagaactgggcctccagaagcgctctgagtgtgtcgaggtgagggcccagggatgccgtcggctccctgggctctgcatgctcacacccagccagtccaggcctatttctggctgggtggcactgggcaaggtgcttacctctctgtacaataggtgagaccttgtacctcagctgagctgttcctggggtgagccctcgttcatggtgacaaagtcacatagatcttagaccctgggaggatactagcatcttatgcatacacaaactgaggctcagagatgttaagtggcttgcccaagatcgcacagtggttagagatgggcctgtgaccctgtcttctgccatcgggacagattttcactgtctggaggcaggtggaaaccgggtgggctcctactttgtaagcacaggacagtgccctgtctgtgtacatgggacagtcacaaacggaaatggcctggtcacaccttagtgtcaaggagcctccagcaggagtgaaacggacctctcacacagaccccaggctgcatctcatcctgccccaaccgctgggcttgtgctggaccaccactgcttccaaggacccgtgaaaacccggctgccgggatgcagagaggcagactttcatgaacgtttgcagcaaagggcagttcccaccgagcctgtgttgctgtggcactgtgtggtgcacaccccaccccggaaaccctccagtgtcctggtgtctgaccccaaatggacagggccttttggcccccaggggccacttctgactcctccccttcacaacgatgctgagggagcaggagaactggggcccggctgctgtgcgtgcccccttcccttcattgccccaaagcctgcagtccagccccaggctcgggagctgctgcctcttccctgggatgtggaaggcacctgcatccccgcccagctgctgccacttgcctgcctccatcagcagctttgttttattttgtctgtgtgttttttgagatggagtcttgctctgtcgcccaggctggagtgcagtggcgtgatctcggctcacttcaacctccgcctcccaggttcaagcgattcttctgcctcagcctcctcagtagctgggattacaggcacccgccaccatgcctggctaatttttgtatttttagtagagatggggtttcaccatgttggccaggctagtctagaactcctgacctcaggtgatctgcccacctcagcctcccaaagtgctgggattacaggtgtgagccactgtgcccagcctccaccagcagcttttgaaatccagaaatttccaggggagggcactgtggtgggtggggcccagcgctgtgtccagctcgaggcctggctgcactgccacctcctttggtgcccacccctgtgtcttgccagcagctgctgcacattgggcttcggggatgcaggactccagcacccccagctcagcctgcttcctggaccaggaaccccagccgaggagggggcatttgtatctctgccatccctgctggcaactggtcctgagaaagcccagatggttggtgcagagggggcgtcaggggctgcaccaccctaagaacatgacatgtcaccccccagccccccgcaacacacacacacaggttcacacctcacacccctgatcttggcggctccctggagcacagcacccgcttcccgtgtctgtggttggcttatgacgccccagccactctaaccgggttaaggggagcccagagcctggggccggataggaaaaagcccagagaagtcaggggatggtcagtcccctgaagctgcccctgggggttcttgatcttctgaactgagttcgaggcaagccctggaggggcgaggaggagaaagaaacagctctctgggccaggacccgctgttcgtgggatgtctggggagctgtgtgaacccacaggccgttttgtttctctccatcagcagctgtgggctgaagcgtgtaccggcggagtgggttgagatcgtgtctgcgcccacttgccaccagctccggcctctggggaggtggtgctgagagggagggagagtggctcctgtttggctcctggagacagacagctgggtgtcccaccctcagagtccccagccccctctcccctctgctaactctgccggtggagctcacgccgcagctcatgccaaccctgcccttctgttttgcctctcatgactctccccaaattctgcccccaggcccccagccagccttcttgccactttcctgccctttactcttgccccttctacctcttgccagggcagcgtcactggctacgtgaggcccagcttggggatgcatggggaggtgtaagaacagctgtgccatgagctgtccttccgggcctctggggctggagaaaccccggggtcagcagtaccacgggttttgctggggattgcacagtgggtgaggctcagcttcctctttgcagctttctaaaaatgccctggttcccagcagggccacaggcagggaaaatgagtttcagtttctgtggcaagggagctggggagagaagcagtttccttgtccccagccctcaccctagcatcctgtgattcagccgcgaagacgtggccccaagcctcccaccgccctccttctgtcctgactgcccactcccagggacaccaggtgacgcctcgcccacccgcggctccggagccaggctggaagcagcttcccgcccagggggtggtttccccacatcctgtcttcagatggcttgagccccctaaacttcctggtcatatccagtggataataatggtctccctctttcctgtctggaggggagggggctgcttacttcttatccaagggcctgtcccgtcccacccctgtgtccccatttctggccacacgcaggctcagcccttgcatcaagcctctgcctgtttccctctgggctgcacctgtcacgctctccctgccctgccccataaagcccatagagcccagggcttgtggggactgcacccttcattagcaagactcagagcttctagaaacccacttgtgtgggggtggggagtgcagggagattggtggcaccaggtggagagagggaactgcacctgggggagttgggaggggcagtgggctgggcccgcgtggaggagtgtggcttgtacagtccgcatggcggggggacccttgtaccctgcctggactggctggtagagctgttggggacctccctgggggtggccttgcttacccagctgtgcggaacaggcttggttgggagtgcctggcctcaccctttgtggggaaaccagattctctgggcagcagtggtaaatggtgtctgagtctgtgtttcgttggatgtgtctgaggtccgctgctgccagctgggttatgctgtctccaaagctatctgcagtgggggaggccctgagcctgggcaggggagggtacagaggcctcaacccatgggacctgggggtgatctgaactctgcacttcactttttttcaggatttcccccgccccaccctaaaggaggaggaaatagagtctgtcccaccctaagccccagtccctctccccaggtctctttggcatctcccagctgggctggggctgaaggcccttctctggggttggccacagtgaggccaggatctggctgggcaggtggcagtgttccgcctgtgggctgggtgcggaggcgggcctgggggtcttagagagagagcggcggatgtgactgcgggccaggaggaagcctggtcccaggatgtcaccatttcccctgcagtgagcaagcatctctagggctcggagataagtgctgggtggggtagctccagctctccagcgcttttttctgtctggttcctgccatctggacttgagccatgaggaaggccagagtgggtctgacagtccccactcctttccccgctgagccccaaggaaggggctgggcctttgcacccccaccccaacttctgcacgagttggaggcagttgatctcaatggtggaaagtggctggtgcaaagtcatgcttccatactccatgtttaggcttcatgggtgtcaaagctgggccgtgaccttgtcccattccctcagagaagggaactgaggccagagggtggagctgctctcaggccgctgcccaggcctcttgtgctctgcggttcagatggcactcccgatgccaggctcctgcccaggaagacatgcccacccgccctggccctgtctctgctgtctggtgtcaggccacctctcttcgggacccccccccaactgattgccctggggctgaccaggctctcctctccctcagtgttgggttttgggagcctctctcatcaggaggttggcacagatgccagccatgcagcggatcctgggcaggggtctcagctgggatggcctggccttgggacagggaggctggctgggcagaaccctagaaccaaaagcggtgcctgtggtgggctagggagctaggtggggagtctagtggggagtctagtggggaggtccactagacactcgttctggcacagcatgcagcgtcctccatcctggccctgctgtgggtacggagccagcagggcaggagctctcagtggagccctccaaagagggctgcttcctggaccagctgcaggatgagggagaccccttctgtccagggctgacataggctgaccaccgccagccccaccctctcactagcttcccattcagttagccattgatgagggctcactgggtgcaggatcctgggctgcccggggttgggtaggggactcctacatgtaggtaaatccgcgagatgctggagagagcaggcaataaagtggttgattctctctggaggtgacattttactttcctagtagggcttggccaggcaggcaaggtggagcctggtgtgccaggcgcagcgcttcagatgagaggaggtgagagcttggggatggcacagggaagtgttttgtctggtgagggtgtggcagggagggcaggcctgaagggacctccagggaggtgtgatcagatctgggttccagaaagatcctacctgcttggcgaccttaactgagctggagtctggaggccccacccttgcacccagctgcttccactgcttgcctcccatcccccagtgccagttccccagggcagtgccctccccatgccctcttggtgtaccctggtcccaaaggaggccaagctatgaacttttcttgcagaggtcccaggtgaggctgttgtcctggagctgtccccagagcaggcttaggatgaggggacctagccacagcttcaaccgagtggggtcccggtgtggctgccagggctccttggcaccaacccagcccagtgggttgatctctgaggacctcgtcatactcagccgggcagtctgccctggggggtggggtcaggactccccagcacttcgggatggaaggaggcgaagccagcgctgctggactagccttaaagaagcgggagacatcctagctccgcctcaagatttctcctctgcacccagcattctgctccccaaatgtcccaaatatgcagggggtcaaggaacattgctcagtggaatcaatggggagcgtgggctactccccagcctctggtttgccccatagcagccccttgggcaccgctggggacccccaggcctctgaggagcttggtttggaaagcgctggaatgctggaccaagttccctctctggctccctgagagggggtcttctagccccagtcttagggcaagaggagcccgtcccctaggagcctccaggccctggagccagacatcgggcgtcctagctacaccctttcctggctatgtgagcttgggcaagttaccaaacccctctgagcctccattcaccatctacagaatggaagagacgctaatgtcaccctggaaggtgttttgaagggtaatgtgtgtaaagggccaaacaaggccccgcacagttaaggacttaaatcctgcccggccccgggagggcttccggcatcttggggttcccctcaaaggatggcctgggcaggacttcttaaaaacaaacaggcggctgggcgcggtggctcacgcctgtaatcccagcactttgggaggccgaggcaggcggatcacgaggtcaggggatcgagaccatcctggctaacatggtgaaaccccgtctctactaaaagtataaaaaattagccgggtgtggtggcgggcgtctgtagtcccagctcctccggaggctgaggcaggagaatggcgtgaacccgggaggcggtgcttgaagggagctgagatcatgccactgcactccagcctgggctacagagcgagactccatctcaaaaaaaaaaaaaaaacaggaatgcccctgggtttcgtgctttaaaatggttgattttatgttgtgtgacttttaagttcaataaattaccaatcaaagcaacaaaacacttccagatcatttgaactttgccttaagtatcagaaggcagttagtaattcctggactttgaatgttaaatatgtggggttcttttgttttgttttgttttgtttcgagacggagtcttgctctgtcacccaggctggagtgcagtggcgcgatctcggctcactgcaacctccatctcccgggttcaagtaactctcctgcctcagcctcccgagtagctgggattacaggcccaccacacccagctaattattttgttgtttttggttttggttttggttgtgagacagagtctcacactgtcatctgggctggagtacaatggcgcgatcttggctcactgcaacctccgcctcccatgtttaagtgattctcctgcctcagcctcctgagtagctgggattacaggcgcccgccaccacacccggctacttttttgtatttttagtagagatggggtttcactatgttggccagactggtctcgaactcctgacctcgtgatccaccctcctcagcctcccaaagtgctgggattacaggcgtgagccactgcacccagccccggctaatttttgtattcttagtagagacagggtttcaccatgttggccaggctggtctcgaactcttgacctcatgattcccccaccttggcctcccaaagtgctgggattacaggtgtgagcgcctgcaccctgcccaaaaatatgtggttttgtttgttttttgaggcagagtctccctctgtcgcccaggctggagtgtaatggcacaatctcggctcactgcaacctccgcctcccaggttcaagcaattctcctgcctcaacctcccgagtagctgggactaaaggtgtgcaccaccatacccagctaacttttgtatttttagtagagatgggtttttaccatgttggccaggccgatctcgaactcctgacctcaggtgatccacctgcctcagcctcccaaaatgctgggattacaggtgtgagctactgcccctggccgaaagttaaatgtttctgttctgttcaagtaatattgagaaaaataacaggggccatcttgactctaatgttctgctccaatcaggttcccagaccagaggactgttgttaggtgattggctgtgaacaccctgaggccagtgcccctcgctgcttggcactcggagatgcctgattagcacctttaatcccttaccagtgaggcaggtggaattggccccattttacagatggggagactgaggtgaggaaggttaaagcactcagtggtgggcatgccccctggagccggccctcctttcttccagctgtgagtacccaggaagctgcaccgtgtggcctggagctgtctatctgtccttccagccacctgtctgtccagccacccttccacagactgaggcttgacaccggagcatctgtacagagcaaggagaagacaagaacatgctctaaagcccttcacagcaagacccaggaagccgcgggcaaactcagactcgaaggtaggaagctgggcggccgggtggctggacccagggcgctggctgctgtgcccacgtccagatacctcctgcggggcccacgctctctgtctgaacagcggtggacagtgaatgaagaaagtcaattcagggagcgagagggaggaataagggcagggaagggacgggcgcggtggctcacgcctgtaatcccagcattttgggaggccgaggtgagtggatcacctgaggtcaggagttcgagactggcctggccaacatggcaaaaccccatctctactaaaaatacaaaaaatttagctgggcgtggtggtgcgcgcctgtagtcccagctacttgggaggctgaggcaggagaatcgctcgaacctgggaggcagaggttgcagtgagccaagatcatgccactgcactccagcctgggctgcagagtgagactacatctcaaaaaaaaaaaaaatttgccaggcatgctggctcacgcctgtaatccaagcactttgggaggccaaggcgggtggaggccaggagtttgagaccagcctgaccaacatggagaaacccagtctctactaaaaaatacaaaattagctgggcatggcggtgcatgcctgtaatcccaactactcgggaggctgaggcaggagaattgcttgaacccaggaggcggaggctgcagtgagctcagatcgtgccactgcactccagcctgggcaacaagaatgaaactcagtctcaaaaaaaaaaaaaaaaaaaaaaaggcaggaagcgaggtgggaccggcactgctcaaggtggggcaggagggcacttgaactgcaaccaggaggctgagaagagccagcccctcctctgtgtgatggtctgggacagagtgactggctcggacagaggcccaacattatggagcacctgcttcattgagagagaattcacacaccagtcgattcacccatttaaagtgtaccatcagtgtttttatttatttatttatattttgagacagggtctcactctgttacccaggctggagtacagtggcgcgatcacggttcactgcagcctcgaccttcctagctcaagccatccttctgcctcagcctcctgagtagctgggactatatgcacgcaccaccatatctggctaattttttaatttttttatacagatgggatctcactatgttgctcaggctggtcttgaactcctgggctcaagtgatcttcctgcctcagtctctcaaattgctgggattacaggcatgaaccaccgctcccaaccttcagtgattttgatatattcacagaggctgggcacagtggctcacacctgtaatctcagcactttctgagaggccgaagcaaacttgaggtaaggagttcgagactagcctggccaacatggtgaaaccccatctctactaaagatacaaacattacccaggcatggtggcttgcgcctgtagtcccagctactcgggagactgaggcaggagaatcgcttgaacctgggaagtggaggttggcagtgagccaaaatcgcaccactgcgctctagcctgggtgacagagcaagactctgtctcaaaaactatatgtgtgtgtgtgtgtgtgtgtgtgtgtgtgtgtgtgtgtacatatatatacatattcacagaattgtgccaccatcaccacagtttcagattgctttcatcaccccctaaagaaagcctgcaccctttagctgtcaccccctgcccagtccccaccttcccagtcctaagaaccactaccctgcttctgtctatagatttccctcttctattccgagctttcatatgaatggactcatgcagaggtggccatcgtgactggctcctgtccctggacacaatgttctcaaagctcgtccacgttgtagctttgttaggacttccttccttttgtggctgaaggatgctccattgtgtggctcaaccacattttatatttgtgccttcatctgctgacgggcgcttgtgctgttttcctgctccggctctgcagagccgtgctgccgggcacttcctgtccaggtttctgtgtggacacagtgcttcagtgtgtgaagccatctgctcattttttgttgttgtttgagacggagtctcactctgtcgcccaggctggaggcctggagtgcagtggcgagatctcggctcactgtaaccacaccccccgtcctgggttcaagtgattctcctgcctcagtctcccgaatagctgggactacagttgcccaccaccacacccagctcttttttttttttttttttttttgagacagagttttgctgttgttgcccaggctggagtgcaatggcgagatttcggctcaccgctaactccaccttccaggttcaagcgattctcctgcctcagcctcccgagtagctgggattacagggatgcaccaccatgcctggctaatgttttttgtatttttagtagagataggctttctccatgttggtcaggctggtctcgaactcccgacctcaggtgatccgcccgcctcggcctcccaaaatgctgggattacaggcatgagccaccgcgcccagcctaatttttgtatttttagtagagatggggtttcaccatgttggccaggctggtcttgaactcctggccttaggtgatccgcccacctcagcctcccaaaatgctgagattacaggcgtgagccactgtgcccggtgacatcatccactcatttgctcctccagacgcttctctggggaggaaccgttactctcccccttgtgcaggtcaggacttgggtgatgagttgtcaggtgactaacccgacagcaaatgcaagaccattggcccagtatgcgctgccggctccattgcttttgatcatgaaccccacccccagcagagcttggccagtttgagacaatgaggggcccaggaaagctgggtcaggggtaagcaagggcacaggaagagacgaagagaggtcctggaagtcccagtgagacgtttggactttgggtgagaacaggaaatcctgggagagagttgagcagggaagcaacaggtgtgatctatgcttttgggaggtgaccccagctgcggtgcggagaatgatcagtctcagggggcttgaggcagcaggtagaggaattgagagagtggagtgagcctccaggtgaggagatggtggaggtgaggtggagatggtggaggtgaggtagagatggaggaggaggacaggttcagatggctgctgtctcgccgacccgtgcatgccacgcctcagcccacacacgcccttggctgaagggctcccagggagatgggtatggagtccctggcttcgtacaaggagaggaaaaacaaaacttgcccaggaaccttgggatgtgaaggagaggaaacagctgggggggtttatttttatttttatttttatttttgagacgaagtttcgctcttgttgcccaggctggagtgcaatggtgcaatctcggctcactgcaacctctgcctcccgggttcaagcaattctcctacctcagcctcccgagtagctgagattacaggcatgcgccaccacacccagctaattttttgtatttttagtagagacggggtttctccatgttggtcatgctggtctcgaactcccgacctcaggtgatctgcccaccttggcctcccaaagtgctgggagtacaggcatgagccaccgcgcccggccacagctgggggttttaacaagaagacggtcatggggcagagcaagagacgaaacgaagagaatgaaacaggcagagggtgttaattctggtggagtcagaggggaactggggactggtggcacacgcacaggaaagccccagatggggtactgggcaacagccactgaaatttgggatgtacttactcttcaacccagccattctgcttccagaacttggtcttgtaatagttaaacaagcacacgcggtgtatgcaagggtgttagttgcaacatcagacccatgtctcaaattccggaaacatcctaaataaccagcagtctggacttaagtaaatcttggtgcattccacttatgaaatctttgcattcatcaaaaaagacaagaggcctagggccgggtgtggtggctgaaacctgtaatcccagcactttgggaggccgaggcaggtggatcacctgaggtcaggagttcgagaccagcctgaccaacatggagaaaccccatctctactaaaaatacaaaattagctgggcgtggtggcgcatgcccgtaatccgagcttcttgggaggctgaggcaggagaatcacttgaacctgggaggtggaggttgcggtgagccgagatcgcgccactgcactccaatctgggtgacagaatgagaccccatcacaaaaaaaaagaaaaaagaaaaaaagtaggtctgtccgtatgtgttgacagggaaagatgtctacaatgcaggtaaaatgatagagtgtgggctgggcttggtggctcacgcccataaccccggctacttgggaggctgaggcaagagaattgcttgaacctgggaggtggagggtgcaatgagattggctcacagcaatctcttcctctcgggttcaagtgattctcctgcctcagcctcccgagtagctggaactacaggaatgaggcactatgcctggctaatttttgtattttagtagagatggtgtttcactgtgttggccaggctagtctcgaactcctgaccttaagtgatccatccaccttggtctcccaaagtgttgggattgtacgtgtaagccaccacacacagctgtgtgattttttttttttttcaatgagcatatgccacttttattgttaaacagtgttctcactatgggggagaaaagtgccagacaggtggcagtttcagttatcttttttttttgagacattttctcactctgtcgcccaggctggagtgcagtggcatgatcttggctcactgcaacctctgcctcctgggttcaagcaattctcgtgcctcagcctcccaagtagctgggattataggcatgcgccaccacacctggctaattttgtatttttagtagagacagggttttaccatgttggccaggctggtctcaaactcctgacctcaggtgatccacctacctcggcctcccaaagtgctgggattacaggcatgagccacgcacccagccagttttagttatctttgaaaaatgaactggggctgggcacagtgagcttgcacctgtaatcccagcacttgggaggccaaggcaggcagatggcttaagcccaggagttccagaccagcctggctaacatggagagacccccacctctacagaaaaaagacaagaaaaataaactgggtggccttgggggacagggaccagcacagtaggtttctcatctctcggcccacctcggcctccccaagtgctggtattacaggtgtgagccaccgtccctggcctgcatcttcatgctcttttcagggtttggttcttgcctcaagcggagagatcagaaattgaatgaggtagtaagttgaggacctcccagacccatatggtccgggatgcaaatgatggtcagaaatagacctcactccaaccactgggcctgaggttcagcctggttcaggctgggtttagtccccagggatggtttgtttttggttttgtgtgtgtgtgtgtgtgtgtgtgtgtgtgtgtgtgtgtgtgtgtgtgtgttttcagacagagtcttgctctgtcgccaggctggagtgcagtggcgcgatctcggcttactataaccgctgcctcctgggttcaagccatcctgcctcagcctcccgagtagctgggattacaggcacgtgccaccacgcctagctaattttttgtatttttagtagagacggggtttcaccatgttggccaggatggtctcgatctcctgacctcgtgatccccccacctcggcctcccaaagtgctgggattacaggcgtgagccaccgcgcccagccgcccagagatgtttgaaccaactttaggcaagttggttcttggtctgggctgcgtgccctggcgtcagggtcctgacactgcgccaccccgcaccgcccaccgctgctctcccggtctccattccagccctcccgcctcctgcccacaatggcctctgctgacaagaatggcgggagcgtgtcctctgtgtccagcagccgcctgcagagccggaagccacccaacctctccatcaccatcccgccacccgagaaagagacccaggcccctggcgagcaggacagcatgctgcctgaggtaagggggctggcctgggggctcactgttctgccgtaggtaacagatgtacccacgtgacactttctggtcagtttcacttcccagaggggctccttcctgagccacagctgctgtctgtgcagcccttgactcgggccctaccccctccttcctgggcccgaaatatcacagggagtaaagccaggaaccgggctcactctcatcgtggtcaggggcacacaggaagggccagccccaagaaagtgcttgctggtaaccctggggccctggctgttctcatttcaccccctaggcctggactctcagtctctcttctgagggctgggggctttctttgacatgggtgagcaggggacagtgtctccctggcatcagcagcccgcctaggcagtgtccgcttcctttgggaggacgagaacagatcagtgtttctgacagtctggtctagtgccccataaagagctcattgaaaaccggcttgtggcagcgtgggcttcctgcacagtctggagtataaagggaagcgatgttaacgccccccgttcacccgagagctctgcagaagacacagcagcaggcaggagcgtcatggtgcagaggggagggactggatgaggagttaggaaaacacacgctggccttgacggagaaaagttagacaatggcgattttaaattcagaatgaggctgggcgaggtcgcctcatgcctgtaatctcatcactttgggaggctgaggcagccagatcacttgagcccaggagttcgagaccagactagacaacatagcaagactctgtctctgcaaaaaaaattaaaaaagagctgggtgtggtggcacatgcctgtaatcccagctacttaggacactgaggtagaaggcttgcttgagcctgggaggtcgaggctccagtgagctatgatggtgccactgccctccaacctgggcaacagagcaagactctgtcccaaaaaatatatatataggccgggcatggtagctcatgcctgtaatcccagcactttgggaggccgaggcggccagatcacttgaggtcaggcaggagttcgagaccagcctggccaacatggtgaaaccccgtctctactaaaaatacaaaaattagccgggtgtggtggcacatgcctatagtcccagctactcaggaggctgaggcagaagaatcgcttgaacctgggaggcggaggtgtcagtgagtcgagaccacaccactgcactccagcctggacaatacagtgagattccatctccaaaaaaaaaaaaaaaaaaaaaaaaaaaatatatatatatatatatatacatatacaaacacacacacacacacacacacacacacacacacattatatatatatatttccaaatgaaagcaaattggggcataaatcagggttgaagtttgttctcagggttttcagaataggaggctaaagaaaagccagcccaggacctgggctgcacacaccaccgcctgccctccctccttcctccccaagaggaagaacccagcctacttgaagagcgtcagcctccaggagccacgcagccgatggcaggagagttcagagaagcgccctggcttccgccgccaggcctcactgtcccagagcatccgcaagtgagcccccctacacccaagcccagcaccccccacccagcaacctgtggattctcggggcctggacatgattgggcctggtccctgcgtcccctctctggaaggaggaggccggcattaatgagcaatgtctccctgtggcctattatcatggtatagatggggaaatgggtatgtgctttgcggaatatcacggtgtggaggctggggggcttcgaggagctgggtggatcagtgtgggggtgcctggggccctagcctggctcctcacgctcccgtcatcccctgcttctgctcatctggtcactgggctccagccaggggcctcacaggcagatccgccccccacctccctgtaggcacgcgggcacacacgtgccatcaccccttccacacactcaggtgcacaggcgtagacaagcgtatgcccacctgtcccttgtctgcttccgcaggggcgcagcccagtggtttggagtcagcggcgactgggaggggcagcggcagcagtggcagcgccgcagcctgcaccactgcagcatgcgctacggccgcctgaaggcctcgtgccagcgtgacctggagctccccagccaggaggcaccgtccttccagggcactgagtccccaaagccctgcaagatgcccaaggtgggatccatggggaaaggaggcaggggtggggaccctaatggctctgcttaccgcccccctcccttccagattgtggatccgctggcccggggccgggccttccgccacccggaggagatggacaggccccacgccccgcacccaccgctgacccccggagtcctgtccctcacctccttcaccagtgtccgttctggctactcccacctgccacgccgcaagagaatgtctgtggcccacatgagcttgcaagctgccgctgccctcctcaaggtgcggggctccctcctgcagggcccccacctctgcccggcctcccttccttgcccctcccttccactcctcatagtagcatcccctaaagctcacctgggcatctgcctacggtgccaaggacagtggatgtgctgggatccctgggcaaagagggaccccgaagcccagcacccaggcgtccatccttctgtcttaaatctcgtgtgaccccctgccaagttttggaacctggtctctgcactgactcttaagctggggaagtgggaagtgagatgcatacttgctcctcatccacccgggttttccaagtccctgttacgtgctgggcaccgcgtgcagagccatcgccatcctggctgagctcgcagcccagggtgagggtcaccattcagggtggtcagtttaggagagcggctgttatcagggaagacattgagttaagcccagaagacacaaggagacgttcactagggaaggaagggaacagcattctcagcagagggaatggcctatgcaagggccaggagcccagaggaagtacagtgctttgagggggcagcaggcggtttgatgtggttttagtgaagggtggttataggagctgtggcaggagatggggtcagaaaggtgggcagggacctggtattccgtgccaagaaacagggacagggagacatggcccaagcctcgggagtgagggtatagaatgtgggttgctttgagtgttagggtaccagcagcccaaggcagaggggcagcagggaccaagggaaaggtgactccaaactgtgccaagagtggtgtgccaacggaagctggtgtctcatttcctggccttccagtctcaggagctcctcttgcccgttcagcttgcagaatctccacgctttgggcaggatccctcctcccaaggcgctgcctgcaggcggatgggcttgatgattccttcggtgttggggctgggggcctaggtggccaggctgtggtcctgatggctgtgcctctgcccgtgcacaggggcgctcggtgctggatgccaccggacagcggtgccgggtggtcaagcgcagctttgccttcccgagcttcctggaggaggatgtggtcgatggggcagacacgtttgactcctccttttttagtaaggcaagcatggggtgtgggacagcaggagttgggtggggtggcctgggagctgggtgaggtgaccttggcattgatcatattcaggaacccctgagggacccagaggcccactgctgggatgtggcatggtcctatgtggagctgctgggcccccatctttctgttgggtagggtgaagacctgcggtggggcacagtgccacccgggaaagtcaccattggggctgacgggcatgtggcttcccaattcattgtgaagagcccgtctgttcagctgtgtcctgcccttgaattgaggttccggggggcagtgtttgggacagactccttacactgtattttcttgtcccccaccccaggaagaaatgagctccatgcctgatgatgtctttgagtcccccccactctctgccagctacttccgagggatcccacactcagcctcccctgtctcccccgatggggtgcaaatccctctgtgagtgctggggcagagtccctcctccaggccagccaccagcctgggggcatccccagacctcaccctggcccccaagccccttctgagcaccctggtggggtctgggagtattttggtgggggattcaggctgaaagccaccatccccaccaggaaggagtatggccgagccccagtccccgggccccggcgcggcaagcgcatcgcctccaaggtgaagcactttgcctttgatcggaagaagcggcactacggcctcggcgtggtgggcaactggctgaaccgcagctaccgccgcagcatcagcagcactgtgcagcggcagctggagagcttcgacagccaccggtgaggtgtcgccctggagcccccaggagagcctggaaggttccaaattcctctgggccctcctgaagcgcccccttactcattcagcaagtgtttcatgagcatcttctgcggatcaggagtgtagtgacaagctcgaaggcgcaccctgtcccaagggttgtgcacatgacctgggaagggccaggggtgcttgctgcctctcttccaccccatgctttctgagcctggtccccagccttgctcccagacagcagtcagtcaacaaatgttcattgagtgtcactgcctgcaggccctaaaatggaacccccagagggtggagcagggagggcagggtcggtcagaggacagttagaagctggggccagggctgggcgccgtggctcacacttgtaattatagcactttgggaggctgagtcagaaggattgcttgagcctaggagtttgagaccagcctgggcaacatagtgagaccctacctctactttaaaagaagaagctggggctgggagggaggggactctgggagaggctatgcagagcccttggggaagaacagggcatctgatttgcagcagcccaataaacactgggcccaaattagaaaataacaagcaggcagggcgcggtggctcacgcctgtaattccagcactttctgaggccgaggcaggcggatcacctgaggtcaggagttcaagaccagcctggccaacatggtgaaaccccatctctactaaaaatacaaaaaattagccgggcgtggtggtgcatgcctgtaatcccagctactcgggaggcttgaggcaggagaatcacttgaacctgggaggcagaggttgcagtgagccaggatcgcaccattgtactccagcctgggcaacaagagcgaaattccatctcaaaaaaaaaagaaagaaaagaaaaagaaaataacaagcaatggccaggcccggtggctcacacctgtaatcccagcacttcgggaggcctaggtgggcagatcacctgaggtcaggagttcgagaccagcctggccaacacagtgaaaactggtctctactaaaaagacaaacaaaattaggcaggtatggtgggtgcttgtaatcccagctacgagggaggctgaggcaggagaatcgcttgaacctgggggcgaaggttgcagtgagctgagatcgcacaactgcattccagcctaggtgacagagcgagactctgtctcaaaaaaaaaaaaagaaaagaaaagaacaagcaatgataggtgtggtgggtgtcccggaggaggatagagagggagagtgaacagctggtggggaggggtgcagtcaggacaaactgtgatgtcatgtgcaaaggccctggggctggaagggcaaagtacatcccaggaaatgcaggcaaagaggccagagaggtggtcggtcaggcaaagctttgcagccagcaagagggggtgattctggaatttgtcccaaggccagtggaaagctatcaaaaggttttaagctaggagagagatgcttggaggctcgtcttaaaagttcctctggtttgagatgagttgacggggcagaacagggagcccaggcgagccatgtgaccaggccagggtggccctgtggccgggactgggggttgggataggagctcggctcagctgacccgaggtgtctctgcacaggccctacttcacctactggctgaccttcgtccatgtcatcatcacgctgctggtgatttgcacgtatggcatcgcacccgtgggctttgcccagcacgtcaccacccagctggtgagtcgggtcaggctccatgctgggggtcccagcctctcctaggaggcctcagtgtcgtgggtacctaatccctcccaccgcaacaatctggccccagcagggtggtgctcaccatagcctggccccttcctggaggctctatcctggggacagctgccccagctccccatgcccagggcccacactgttctgacgccctcctctgtgctacctccacgataggtgctgcggaacaaaggtgtgtacgagagcgtgaagtacatccagcaggagaacttctgggttggccccagctcggtgagggcccaggctgggggacatcatctgagccaggagtccctgtgccctgtcactcccagctgggcaggtgggctcctcacccacccgcaggcccctcatcaggggagactctgcggggcagaggtggagtgatggacccctcccaggtctggggctcaaactcactctctcccctccctttcccttccccagattgacctgatccacctgggggccaagttctcaccctgcatccggaaggacgggcagatcgagcagctggtgctgcgcgagcgagacctggagcgggactcaggctgctgtgtccagaatgaccactccggatgcatccagacccagcggaaggactgctcggtgggggcaggccctccctcctacccctgccagaccctggtcccggactagctccacttgccctgtccttcaagggcagtgaccacgttccctcctccccgccccacctttcccagacccccatagatgagactgagccctggggagatgggaaaagcctctgtccttgcccactccagtgggggtgacctggccccgacatgacccaccagccttcttctgccctccaggagactttggccacttttgtcaagtggcaggatgacactgggccccccatggacaagtctgatctgggccagaagcggacttcgggggctgtctgccaccaggaccccaggtagggcctggagcctctgctgggcctcagggtcaggcatagccatgccatctgagccacccacagggacgtgggtaggtggacgtggcacgctgggtgtgccacagcccaatctgaaccctgtctccaggacctgcgaggagccagcctccagcggtgcccacatctggcccgatgacatcactaagtggccggtgagtgtccctggcggggagtggtctgggaaggtcagggatgggggacctgcctgctgcacagcccacttccctgccggtgccccctcctggcagatctgcacagagcaggccaggagcaaccacacaggcttcctgcacatggactgcgagatcaagggccgcccctgctgcatcggcaccaagggcaggtgagcgacctgggccctggcctcagccatcccactgcccccccgagctgcggcttcctgtgggccctctgctcctccaccgtcaccacccacagccgctgggccgatgccctccaataactgtcctttgctcccctgctctggggctacccatggtgcgagctggaggaaggaagcttgctccagagtcgaaggttctggatgcggcatcccccttcctgccagcgatgcctcctgtagccaggtgctgggctctgggcaaaggtgggcagtggttattcggcgccctgatgtcccctcttgcctcaccacccccttagctgtgagatcaccacccgggaatactgtgagttcatgcacggctatttccatgaggaagcaacactctgctcccaggtgaggcgaggcaggcctggagtagtggaggagaggacgctgggcatggcagcctgctggggccggggctcacgcactccctcccatgtcggagcctcagactcagcctgcttctggggcgctgagcaccatatgcccactcccaggtgcactgcttggacaaggtgtgtgggctgctgcccttcctcaaccctgaggtcccagatcagttctacaggctctggctgtctctcttcctacatgctgggtaagaggctcctcactgcccccgaacccgacccctgtgatggccacccagccggacccctggggaaaggttcctgggccagggcatggccggcccaacctgccgaagcctactgctcctgaagtgcctggctgaaggccgctgcctggtgtgtccctcccccagcgtggtgcactgcctcgtgtctgtggtctttcaaatgaccatcctgagggacctggagaagctggccggctggcaccgtatcgccatcatcttcatcctcagtggcatcacaggcaacctcgccagtgccatctttctcccataccgggcagaggtaaggatgtggaggatgggaccccttccgcacatagggggccagccctgctgctcctattccacccacctgggatctgccagagggacacggtgcccctcctgtactgggctccacagcggagggacagctaatctgggggcttactggctggtctcttaatcccagtgagagggaacagtgatgctcttgagtcaccctgtccctccaccgcctcatttatcttcctaaccgtgcccactgcctgacagtatgctaggtatctgcaggtcgagcggtaggaaatggcctccgtgcgccgtcggcagtctgatcagttccacctgactgatctagtttgttcagtgtccgtcctctccccaccgtgtgcggcctggaacaggcttgtctgtcttgcttattgctacggacccacaccaggcacgtacacagtaggcgctcagtgtttgctgaaagaatgggcggagcaggcccagctttggtccagcagctccagccgaccccctgcccctcagcctcaggggtccccatgcctgccagggaggagctgatcgatgggatgacccagggtgcaggcccggcccaggccacccacctgatgcctgaagccacgtctcccctgccccgccccaggtgggcccggccggctcacagttcggcctcctcgcctgcctcttcgtggagctcttccagagctggccgctgctggagaggccctggaaggccttcctcaacctctcggccatcgtgctcttcctgttcatctgtggcctcctgccctggatcgacaacatcgcccacatcttcggcttcctcagtggcctgctgctggccttcgccttcctgccctacatcaccttcggcaccagcgacaagtaccgcaagcgggcactcatcctggtgtcactgctggcctttgccggcctcttcgccgccctcgtgctgtggctgtacatctaccccattaactggccctggatcgagcacctcacctgcttccccttcaccagccgcttctgcgagaagtatgagctggaccaggtgctgcactgaccgctgggccacacggctgcccctcagccctgctggaacagggtctgcctgcgagggctgccctctgcagagcgctctctgtgtgccagagagccagagacccaagacagggcccgggctctggacctgggtgcccccctgccaggcgaggctgactccgcgtgagatggttggttaaggcggggtttttctggggcgtgaggcctgtgagatcctgacccaagctcaggcacacccaaggcacctgcctctctgagtcttgggtctcagttcctaatatcccgctccttgctgagaccatctcctggggcagggtccttttcttcccaggtcctcagcgctgcctctgctggtgccttctcccccactactactggagcgtgcccttgctggggacgtggctgtgccctcagttgcccccagggctgggtgcccaccatgccccttcctctttctcctcctacctctgccctgtgagcccatccataaggctctcagatgggacattgtgggaaaggctttggccatggtctgggggcagagaacaaggggggagacacaagt

SEQ ID NO: 15769 - DNA, 39772 bp, Homo sapiens
atcaactttaaagatattttaaacttgatgaagacttctgaatctatcagaaaacaggttagaatgtctgtcttcaagtcttgattctgaaaagtagcccctgagcctgtttcattttggctgtgtttttattactgtgcagctgacaccccttggaaaggtatacatacatacctttactcatcctctgattctgaatctagcaatgaatgaatggtttttgtgttggattctggaatgctttcaattcttgtgtggttactctgaactcaggacgtgaaggatgaagtgttgtgcagctactgtttcccctttccttttgctggagctttggggtaacctgggaaattcagtatttaagtgtccgagatggcattaagtgtaaaaacctgaattcatggcagctccaaaaaagagaaagctcaactcactttgttcatttgtaacgtctagcagcacagtgcatcaggtttcttaggaagaagctgataggtcagagatgtccctaggctatttctttgggccatccttagacttggaagcaattttcctaaataccgtatctatttttctttagatttttttttctacttccttccaggaaagaatttgaagtagattttcaacattcaacatagtttcaaatgagataataaatactttcacatattagagcaaatagttgacatgaacagagaaatgttatgaagtacctgaaatgaataatctagttgaacattttgttttgagaagcgcagtaattaaaagaggaactcctcctgggatttagtgtttgttgtttattgttgtgggagagggcagagtaaaaacataaaaatatcttcagagaaataactttttccagcactgaaattaaggagttagttatttcatggattctgttataggagacattatgtaacatgatagacaatgacttcagttggagtttggcaagagcaagtcgcatgctgtctttctgaaagcacagggaaataatagaaaatcagatgtttctggctgggcggtggctcacagctgtaatcccaacactttgggaggcccaggcaggcgattacttgaggtcaggagttcgagaccagcctagccaatatggtgaaaccctgtctctacaaatatacaaaaattagccaggcgtagtggtgcacacctgtaatcccagcggctcgggaggctgaggcaggagaatctcttgaactcgggaggtggaggttgcagtgagctgagatcatgccactgcactccagcctgggtgacagagtgagactctgtctcaaaaaaagagaagaaaatcatgtttctaaagtggtctgagataatgtaattttggaacatcattttttgaagattttacttttcatagagaaagcagtcttggcatgactaggtaatatgtccccaggaccaaagactgactttcctctgcccgaaattgagggccactccatttttatacggccatcatagtggtaaaccctttataccactttataccatcaaaatggtaaaccctttataccattcttgactgagacaaggaaaagactctgctttgtgtcagaaagcatgtggactttattttgttcccatagttgcacccagctcatcttttcagctctgcagaacagcgtgcatctggagttggctgaatgaggtttcagtcaccctgtctgttggaattaaatctttacctggtctcattttcagagatcataatctgagatactcaacccacatccctttggcttacaattcctaaaagcaatagtggatccagtggcttatgcctataatttcagtgctttgggaggctgacacagaaagaccacttgaggccaggagttgaagaccagcctggcaacatagcaagactcccatttctaaaagacttggaaaaaaaaaaaaaaaaaagccgggcttgctggtgcgcagctgtagtcctagctactcaagaggctgaggtgggaggatcgcttgagctccagggttccaggctgcagtgagtcgtgactgcacctcgctccgtccagcctgggcgacagagtgaggccctgtcactaaacaaacaagaaaacaataatagcagtgcttcttgttaatgtccagtctttgaagagaacagcagaggatgggaacggcaggtctgagtggcatggagcccgacaccagggagaatgttttcaggctaatagcactgtgttacagaatcactggtggactgttaaccatttttttgaaaaatgaaatagaatagaaaataacagaatacattgctcatgataaacgtaaatactggtttgtgaagcttttgtggcaattggtgtgtaagcatatatgtgtatatgtactatgtttaatgatttataggttgtagtcagaaaaacttacaggataaagcgtgatcttggtaacgtaaaatgtatctgtgtttttatagctttaatctccaatcagtatgttacaggagaaaaggcatttttccttagtatgatctatctactcacagtacttctgacatcaaatatatggggacctcttcctcctcctaccagccagttctccaattctccagacactaacaaggtgtcctgcaattcagttcaattccagcactagccagagttagtgcagacgccagttagttaagctcagccccacaagactgccctcccagttgacacctgtgcttctgaccaaccagctctatgacaaccatcccctcttcaggtttgattatttgctagaatggcccacagaactcagggaatcattttatttatgtttactgggttttttatataaagtatgcaaatgaacaaccagatgtagaggtgcacagagtgaagtcaagaagggcctggaacttaggagcttctgttcctcatagaactgggctgtgccaccctcctggcacatggatgcattgatcaacccaggagttctccagaccccatcatctgggtgtttttaatggaggtttcattgtgtaagccatgattaatgattaactcaatctccagcccctctccgtccaccagaagttaagggtgaggctgaaagttctaagcttctaatcaaagtttggtctttctggtaaccaccccccatcctgaagctgtccaggacccactgagagtcacctcattaaaacaaaagatgttcccatcactcgtgaaattccaagggatttttagaagctctgtgttagtaactgaaggcaaagagcaaatactacaaccaaaaatgcccctgtcacttagaaaattacaggggtttttaggagtctgtactgggaaccaaggacaaagaccaaatgtaaatgtattatatcactatagaagcaacattgctgtaacacactaattttcttcagtaatacagtgtaaatgaaagtataatttttaaaaaaatgttctgatcagagcatgcgatgctcctaaaacaagaatcatatgtagatttctagccccatctgctggaacatgtcttctttggccagaaaaacaaaacatactaaaatacagtggtttggggtttttgctttttgggttttttaaaacattttgaagtagaaaagccctgaatatcataactattatcggttggtttgacacatctatttaacaggaaggtgtagatccccatcctgaaacccaaaatatgctttacatatatatgtagctaatgcttaataaggattcactgtaaaaatccagaaaaggatgtataaaaatgaaagctgctcagaaaacaacagcatctttaataaagaaaaaaaagcagacaagacattccatgattctctttccttttaccaaataggctaaaataaaaaaagcaaagaaaacaaaaccaaaacaaagtgtctaaaacgtcaagttcatctattaatagaagaaacccacaactaagactcagagctaagaagtttaaggagaatacagaaagtagtgtagcaaaccatataagctgagtgacattggatagaactttgagccaaactaaatgggagatcccaagagaaggaaaggggacagttgacagtctggaaaacctacaacaaagatccttaggatggccaagtgaaaacagattgtgtttaaagatttattcataatttatttggagcttagaatatattttctcataaaaatagtgattgacttgtcctgtccttgagagttgaaaatagtacacattctcaatttgccgttagtgtcggaatattcacataatttgggataccagattgcccaaaactcagttctgaatatattgagccttttatttttatctccaagtggcggtttttaaaactgaccttttaccttgatttaaaataatagtgcctggctgggcatggtggctcacgcctgtaatcccagcacttgaggccgaggtgggcagattaccagaggtcaggagtttgagaccagcctggccaacatgaagaaacaccgtctctactaaaaatacaaaaattagccaggtgtggtggtgcatgcctgtaatcctagctactcgggaggttgaggcgggataatcacttgaatccagggggtagaggttgcagtgagctgagatcgcaccactgccctcacgcctgggcgacagaggaagactccgtctcaaaaaataataaataggccgggtgcggtcactgatgcctgtaatcccagcactgtgggaggccgaggcgggaggatcagatgaggtcgggagtttgaggccagcctgaccaacatggagaaaccccgtctctactaaaaatacaaaaattagctgggcgtggtggcgcatgcctgtgatcccagcaactcgagaggctgcggcaggagaatcgcttgaaccggggaggcagaggttgtgatgagccaagattgcaccattgcactccagcctgggcaacaagagtgaaactgtctcaaaaatataataataataaagtaaaaaacagaataaaataataatgcctgccaccgccattaacagaccttgtactctaatgccaagctgtatatgggacagttgccagcatgtcttcactggcactataaaatatagccaagaagataggctctgagagtaagaagtctgtgttggttaggagtaattttgtcctggctctctggtataaagctctcaaatgtaaatccgggtgggataatggactcagctctgtctgcaacatgccactgtgcagagaagcactctcatgcataagctttttatgctgtaaactatagtagctgaaattaaatgccactttttcagaggtgaattaatggagagcctggtgaaattcaaagctttttgatgtataaaacttgataaatggaactattccatcaataggcgaagtataacaacctgtctacatagatagtatgtaatttctgcacaggtctctgtttagttaatacatcactgtatatcaatctagaatcttgctccaataaaggaacataaagttgtgttttggttttgtttttgtttgaaacggagtcttgctgtgtcgcccagagtgcagtggtgcaattttggctcactgcaacctcggcctcctggattcaagggattctcctgccttggcctcccaagtagctgggattacaggtgtgtgccaccacgcctggctaatttttgtatttttaatagagccagggtttcaccacgttgaccaggctcgtctcgaactcctgacctcaagtgatccatccgcctcagcctcccaaagttctgggattacagacgtgagtcattgggccttgccaaggtttttgggttttttttggaaaaaaaaaaaaaagtagtacacattcttagtgcagatgggcttggccagtaccacatgatggtgaagcagacgtgagacaacagggagaggcagggacagtgtgggctggagaccctgggcccccctactctatcctagtccattattatagccagatcttccactcggtcagatgatgatggaaatctggattttgtgtgaaatctctcagtttattgttgacaagtcaatttgaattttagaaacgtgatgtaggtcaactcttgagttggatggttctccgagctgccagtttacaactccgattctagcaaaagagacagcctctgccattttcagtacagctacaggaagatccttcagtggactagcttgtgacctgcttatctcctttttgtgcctcttgctcttcccacttcagcccaaactaagcacatgagctgtagccatcacagaagtaattctgacatccaacctaatgtactgtgatttcacctagcaagcttgagtgaatttgccaggtcttgcagagtggagcctacccgatgtctcgcctgatgccccttgctaggattcctttctttcagctggccgaatctttacacacatcgtacatcagctagttttaactccatgaagccttaaaaagaactagtgctcacaggtctaaaccttaagcacgtgcctgttccctgtactctggtaactcctgatacatttttatttgtatatccccgtgttcctactttcatatgtgactatgggaattagctaatttggaaggaattagcagttatctgctcataattagggtactacatccatttatccccacattccccagtaatttcagcttgtctgactttttttctaattggattagtctcattttgtttatgagtagatactttattgattttggatttttcagtttgcatggatcctcaggttctctgttattcctctacctttaaaccacgcatcagagctgtggaacagattgaggaagggcaaatggggtcaggccatttcatgagaaagagccaggagatacagaatggaggtgggaggaaggaatgaattaatatatacttctctagaatttcataccaggaatatacagaatgggaaagaattggggagctgagaggagtaaatcctaagaataaatgttgatttagtgactcataaacttgttttggccaactagaatctaacaactactgaacagttgtgttagccacagtcctgagcactttgtttattagcttatttaaactttacaacaaccccataaagtaggcattattgttattctgatactcttttaaaattgtaaccaacttctgtgcctaaaatcttaactcttatgccaatagctttcaaactttattgaccacatcttatagtgagaaatatatttaacattttacatacatagcgacctagagtagatacatagatacatgtaagtgacagaaaacttcataaaatagcatttcctgtgaataatgcactgtaatattttctatttagttttattaaaaaagctgttttgggccaactaaattggtatcagaactcactaatgtgttgtgacttacagtttgaaaaaacacagcattgagccatagtgcttaccatctgtattttatatagacacaagatgactttcctcatgtgtgcaaaggcaagatggggcatgagacaaagtacaaaccaaaccaagacacatgctcagatttacagacctttttgttaaatgttaaccagtgtaaaaatactgtaattcctttggggatttaaaggaatctgcctgtacaagagtagttacaaattaggaaatgacctcaaatactaatgttgctttgaaaaagagtcatggaaactcagggttggagagacttaaacattccatccagtcacccatgtgatgccttaatcatctctattttgcattcaatctgtgcttgagatactaccagttgagtgtggcttccctttcagaataatccattccatctttttgcctggcgggagggagcaagttcttttcaagattgagctgaaatttgcctcccagtaacttcattctcttcatcttcatcccatcccttgtatcacccttggagatgtttgaagaaaattctggagttctagctttgcagaatggagtccagtagggtgctcagcagccgtcacagatgcttcagcctcttggtaacccatgttatgctcatttccctggaacaggacctaatgcactgcacagcatttgcaacggcagatgagtatcatctgggaaatctgtctcaagatctggcctcccacggatatgttgaagtaacaagcttgcctagaggtacttcttcttgaacctggggccaagtatgttaaaatgtattggataattttcctatgatactatcttaagtatgtatttgtttgcaattcattttcttttgaaaggattgtatcataaaagtggatgttgaatctctttataaagatgacaaagttaagaattaaaatgtatttacagagaactcattaaaatcagtatgatttattaagattatttataggatcattattacttgaggtggtcagaggtcatactacttcatttctagcacattaagaagttattttagtttgtgtgtgtctgtgtgtgttttgtgttttttttttttttgttttttgggatggagtttcactcttgttgcccaggctggagtgcaatggcgcgatctcagctcactacaacttccgcctcccaggttcaagcgattttcctgcctcagcctccggagtagctaggattacaggcatgcgccaccacacctggctaatttttgtatttttagtagagatggtgtttctccatgttggtcaggctggcctcgaactcccaacctcatctaatcctcccgcctcggcctcccaaagtgctgggattacaggtttgagccaccacacccagcccgttattttagtcttatagaagaaccatgaagttgatagacatggggagagcctttaaaaaaaaaatttaccagctcaatctaatactttaaaacaattagttagccgggtgcagtagctcacgcctgtaattgcagcactttgggaggccgaggcgggcagatcacctgaggttgggagtttgagaccaacctgaccaacatagagaaacccctgtctctactaaaaatacaaataataataataataaaacgattagttagaagataaaaatgaaaaagaagaaaattaaaatgaacttaattgaggatttttatggtgaaatcaggaaggattcttgagaaatggcttgctttacattaattaaaaataatttaggccagccatggtggctcaggcctgtaatcccagcactttgggaggctgaggtgggtggatcatttgaggtcaggagttcgagaccagcctggccaacatggtgaaaccccatctctactaaaaatacaaaaattagccaggtatggtggcacgagcctgtagtcccagctacttgggagactgagacacaagaattgcttgaacctggagggtggaggttgcagtgagctgagatcatgccactgcactccaacctgggcgacagagtgagactctgtcttaaaaaataaataaataggccgggcgtgatgcctcatacctgtaatcctgcactctgggagactgagacaggcagatcacctgaggtcaggagtttcagaccagcctgtccaacatggtgaaaccccacctttactaaaaatacaaaaattagctgggcgtggtggtacgtgcctgtaatcccagctactcaggaggctgaggcaggacaatcacttgaacctgggaggtggaggttgcaatgagccaagatcgtgccactgcactccagcctgggtgacagagcgagactctgtctcaaaaataaataagttacttagaacattttgataaacttttacagtgaaactcaggatagctcaatacccagaacatttattaatttacctaagagtagcaaaaataggttgaaagccttcctataacagtggaaattcttaagactcaatcccatagaagatagttgaaatatcattgtgataatccaaacagaccgtttgtgtgattaggtgacaaaaacaagcatagttgacttagaaagacagagctatgtctagagccccttggtatgaaaatttgcctggaggtattgttggctgatgctgaaggctgccagctgtgtggtctgtgcttcacagaattgcaggcttcactgccctgggttgtttcagtcgattttattttgcttttggctgtgtaggcaaactctgtcctatgtaggatgtagtaattaacaatttagaaaaaaaaaaaaaatcacagttttggtctgtgtctgaattgcccatcacccagcctttaccagaaatttctgaagctttgaggatcctaattttatgttaattccgttaagacatacaaccttttgcaaattaatagtatattttttaattgatatattaacattggttgtaatttatattatggaatatatgcttatgataaatatcactatactaatatataaagcaacttcttatgatgaatattggtatattagtatatgttttaacaatacttaggccaggccccgtggctcatgcttgtaatgcactttgggaggccaaggcaggcagatggcttgagctgaggagttcacgaccagcctgggcaacatagtgagacctcatctctacaaaacataaacaaaaacttagccaggtgcggtggcacatgcctgtagtctaagctacttgggaggctgaggtgggtggggcgggggggggtcccttgagttcaggaggttgaggctgcattgagctgagatcatggcactgcgcttcagcctgggagacagagcaagaccctgtctcaaaaaaaacaaacaaacaaaaaaaaaactttttttttaaatagttgcaggtggctgcagtggtagcccctgtagtgattaaccttgaaatcacatatgttttgaagtggtcagtatctttatttctgtgtattttctattgccctactttttatactttaaaattcagcaggagtagtagtttgggaatgttaaaattgcattattaatgaaatggtatttataggaagagaatatattaatacttcttcaaattttatttttaattttgtagaaagaagtttaattcttgacacttagttgtatggaacctaagactttattaattatctggactagtgattattgaatcaaaatgggcatgaatgagctctaatattaatatcacaggttgttgaatgttttataaaagtaattgctgatctttttttggtggtcgtatttgcatttttatatattaaatcctttcagaggccttagtagaaagatggtgattgtgttacagagcactccatggtatataaagaaatgatcttaagtactttattacagtgtttataggtgactcttacaacttgtgttaccttgacatagcttttttgttcgtttattttaaatcacagatgcagcaaatattttggtgatgggtgtggaaaattctgcaaaagaaggtgatcctggaacaatattcttcttcaggtaagacaggaaagaaaccccattaggtgatgatgggtttgggtcaagtaattgtggtctttaaaggtgcaggcatacctttcttaacagtaaatgtgttcaaaatgtatttgtgatttaaatttatcatttaattcttatttaatctaggagagtttgtcacttttaggaattctctggtaaaccctcttataaagtaaagaatatttcaaacaagtgaatgatcttccccggggtgtctttctttgtaaattcggattttcatggactaaatttctggaaagcagccaatttcccattcatctttagtgccccttgtcagactcctgccccagggaaactcccgctacctccctgctgtctcttcttgccattttcttttttttctcccttcccctttggtagctctttaaagttttagcttacctctccagaggttttagactaggagactcacatacacacttattccttttatctaaaggccgactcaatactaaatactccacagtagctgcctgggaatgataacatgatagaaccgtgtgaaataatctcatttatcctcagcacaccgatgaaggtctattttgcacctgaggaaactgagggtcatagggattgagttacccatagtcatgagactaatacgtgacagaacagaaacacatggaccatctgtaggaatccaaagttgagtaaagttcttgtggtcataatccttatagttgatgataagtggaagttcttttttcctttcaatgcctaccttccttttgaccccatctttagagagaatcaagattccaacatttaattcaagtagagtaatagcatccctgttgttccgagtgaggaatttagatttgtgagggactctacatcagcactgtctagcagaaatacagtgcaagcctcggctgggcacggtggcttatgcctgtaatcccagcactttgggaggctgaggcaggcagatcacaaggtcaggagtttgagaccagcctggccaacatggtgaaaccctgtctctactaaaaatacaaaaaattagccaggcacatggtggagggtgcctgtaatcccagctactcaggaggctgaggcaggagattcacttgaatgcgggaggcgatggttgtggtcagctgagatcgtgccattgcactccagcctagtgacagagtgagactctgcctcaaagaaaaaaaaaaaaagaaagaaagaaatataatgcaagcctcatatgtaatgatacattttccagtaaccacattttaaatatttttaaaaagataaaattaattttgaacaacacaaatatgtttcttaacatattaacatgaaattaatttaacaatgtattttattcaacccagcatatctaaaatattatcatttcaacatgtaattaataatgatattttttcacttgtcatactaagtctttgaattttgctgtgtattgtacacttacagcgcatctcagtttgcaccaggcatgtttcaagcactcaatagccacatgtggcctctgagtaccacattgcacagcacagtgcattcctctggttggaggaatatgcagttcaccagacctctcttctgcctggaagggattctctgaactgatactgtggctgtggcttgaaatacctctcaaatccgtatcctgaaaccttatccctgcctattgtaacagcttattgtctccctgcctgcctgctcacccaccaccagtctgtttgtctattgtaagcagggtcattcttcagtggccatttctgaccactacactctcctgcctaaatttccacggactatgaacaaattctctatcactgcataaagttcccttctggattgtcccctgcttgcctctttatcctgcttgcccactgcttgaccacatctgcagccacgcagctactggctgtttattctgagatgctgctctgctccgtcccacctcctctctgagcctgtgtgtcccctctgctatgttgtctcctcttgttttctcatttggctgcctctgctagtcctttagcaaaggggtccctctggtgtacatctcatggtatactctgcatactcttgtagcactgatcacacactattgtaattggtggtctaagtgtcagtcccagtcttttctagattgaggataggaatgaaatcatacttatgtttctatcacaaatactaagcatggacccacacatatactaagtactttagaaatgtttcaagaataacgtggagccattaatatttttacctttcttttatttcctcctttccttcctccagtgcactgaccctgagctatagctcctgtttttatttactacctgaaacagcttcaacacgtcaaacttgagaaatcaaaacaaatgcattcgtagttttagaccctaaataatgttaaagccataatcggattcagagggcctcctgtggtgtcactgtagttctgttccaagcactgtgagcgtggggagcattattccatagaggcctttaaccatctgatgcttaaattaaccaccatctctttattccacaaaaatccaggcatagccctttattccttgcacatagtagagtctgcctaatgagagctaagacaaggtctcaaaaaatttccttattctgatttctgtggatcagaattgaaccaggtatgaaagagtctacatacgtgaagttatatagtattacaataatggctatttgtttggcaaaccatgtgagaaatcataaattttgaggaggtcaggttttatcaagaattttattttagctcttattgtaggaagttcacctaaggaccataatatcaaattagtaagtaccatcatattttgaaaaatcgcatcctgtatacattctagaagttacatggttttatatacgaccctaaagaatgtattccatctgtatcttagttgtttcttttatttttttaaatcagggaaggagctgctgtgttttggaatgtgaaagacaaaactgtaagtgtaaataaaaatgtgaaaatataaaaatttagttttgtgagaatgaattgttaattagcacatactgaaacattagaagggaaattaatagattatgcacaacttatttgctctgcattacatgatacttatcagtttcatcttccaaaatatattgtattttgggttaagatttcctgctttttcctttctctagacacacactaatttgtggagaatcagaaccatcctaactatactgcagacagaagtactgtagactttgcatgttgtactatacaaaatgtatgcagttaattggaagctggttgcattgagtgttcttttaagtcaagttgtctagaacttactactcatgggaaataattttttcaagatccaaatcaagatttgtttaatacaaccattttagaggcaaattggtaatctacattaaagctttatatttaacccagtaattttacacctagaaatttatccaaaggaaataatcataactattcgtgatgatttttgtacaaaaatgttcatcagagcaatatttataatggcaaaaattagaaattaccaaaatacacaataatagtttgttaaatcatccatatactacagatatactatagatccccttagaaatcatgtaaaaaaatatctatttctgggagattgcctatatatataatacagttacattaaaagagcagattatacggccaggcatggtggctcacgcctgtaatcccagcactttgggagaccaaggccggcaggtatcttgaggccaggagttcgagaccagcctggccaacatggtgaaccccatgtctactaaaaatacaaaaattagctgggcgtggtggtgcacacctgtaatcccagctactcgggtagctgaggcacaagaatcgcttaaaccttggaggcagaggttgcagtgagccaaggtcagaccattgcactccagcctgggagacagaggcatactcttgtcttcaaaaaaaaaaaaaagcgggttacaaaatataaccaatataatctcagaactggttaaaaaacatgctttatacaatcccaattttacgaaaaggaaacacacacagtaggtggtcgggaagggaacttagagaaaagaaaatataaatgaccaataaatttaagaaaatacaagttggctatttgaagttgcaaagatgtaaaaggctgataaaccccatttcttaagagtagtttcataaatgttgagattctacatttggaaaaactactttggagagcaggctagcaatattataagtgtgggccaggtgtggtaactcatacctgtaatcgtatcactttgggagtctggggtgggaggatcacttaagctcaggagttccagaccagcctgaacaacacagtgagatcccatctctacaaaaagtttttagaagttagccaggtgtggtagtgtgtacctgtagtcccagctacttgggaggctaaggcagggggatcgctcgaacccaggagtttgaggctgcaatgagctatgattgcatcactgcactccagcctgggtgacaaggtgagaccctgtctgttacatatatacatattgtgtaagtccacatatcttttgatctagcaattcctaaagaagtattcccacaaagccatgaagacctttgcacaagtgtggcacatcgcaacattgtaatggagagtagaaaaaattccccatggaggacacacctaggttggttaaataaattgcagttcgtctgtaaaggaaaatagtgttgaaaatgtcatgtgcataatatgatcctattttacataaaaagcagcataaatatgtacatatatacacataaaaagtctggaaggatatgcaccaagtttaatcatggttgcctctggggattaggatttcagtacagaagagagaaagagatgatcacctcccacacctgtgtggcttaattttttattagtatgttgggctttactttttattttttatttatttatttttttgagatagggtcttgctctgtcacaccggctgacattggctcactgcaaccgccacctcccaggctcaagccagcctctcaggtagctgggactacaggtgtacatcaccacacccagataatttttgtatttttttgtagagacaggattttgccacgttgcccaggctggtcttgaacttttgagctcaaggatccacccgcctctgcctcccaaaatgctgggattattaaagagatttaaagaatacaaattataatattactagtgattttccttgggttgtgggataatgataaccttgattttcttctccattctcatctgtgttttccaaatgtaaaaacaaatgaacatgtcatcctgattactttaatatcacaatggatttgatttgccttttccttaaaaacatgcaacagaaataatgcctgtaagtgtaatgaagactgttataagcattaaaatcataacatacttgaactgagggagtcagttatgatttcagattaatcttccttttcttctagatgaagcatgtgatgaaagttctagaaaaacatgaaattcagccctatgaaatcgcactggtacactgggaaaatgaagaacttaactacataaaaatagagtaagcaacttttcatcaaatttatgaaaggggcacttggaataaattaggtaaagcaatagaggagacaaattattatgcatatggaaactttttttttttttttgagacggagtctcactctgtcgcccaggatggagtgcagtggcacaatctcggctcactgcaacctctgcctcccgggttcaagcaattctcctgcctcagcctcctgagtaagtgggactacaggtgtgcaccaccacgcccagctaattttttgtatttttagtagagacagggtttcaccatgttggccaggatggtctggatctcgacctggtgatccgcccacctcagcctctcaaagtgctgggattacaggcgtgagccactggacctggcctggaaacttacttttaagaaaaaagtggccaggcgtggtagctcacacctgtaatcccagcactttgggaggctgaggcaggtggattacctgaggtcaggagttcaggaccagcctggccaacatggtgaaaccccatctctactaaaaaatacaaaaattagctggttatggtggcgggtgcttgtaatcccagctactcgggaggctgagacaggagaattgcttgaacctgggaggcggaggttgcagtgagccgagatcacgccattgcactccagccagggtgacaagagtgaaactccgtctcaaaaaaaaagaggaaaaagattactggtacaaatacaaagtctaaaccatataataaatattagaagataaacataattttttgaacttctcaggctatccacaagttaaaacaagtcagtagtatagccccaaaatggaaatgttaagtttctaatcagcctaatccaataaaatagtatgcatttatcaaatgaacctatcaaattattccagtaaatttttctcttaatccagttttttcctattgattttggggggtgggggtatgaaaaggaagtatagtgaggggtcaatctaagagacccacttgtagaagtgtgggtgctggaagaagtgggacctggtgtaccagtttcactaagataaatgggtaggcaacagactagctgattttcctgactcagccagagggaaaaaatgaagagatgttagggccgagacagaggcagtatgaacaagatggtagtgtctttttcctcatggagttacctgtctagtgaaatatgagtctttgcaggttcttaagaaaggtagtgttagccagatttggtggctcacacctgtaatctcagcactttgggaggccagggtgggaggatcaactgagtcaggagttcaagacagcttggccaacatggcgaaaccccatctctactaaaaatacaaaaattacccgggcatagtggcgagtgtctgtgatcccagctacttgggaggcggaggcggaggcagagaattgcttgaacctgggaggcagaggttgccatgacctgagatcgcaccactgcactccagcctgtgcaacagagtgagactctgtctcaaaaaaaaaaaaaaagcgttaaaagcagagctttgggaagacttggaagagagacagagactagctatagaaagaccagatggggataagagctgagtaatcagcgctcaccaccaatagggccagtcacggttttctaagtaagtgccttccatgtattatttcatttaatcctggggaaaaccctataattgcagctaactggctttccgatgagatttattgaatcctgtcttgccaaagggcacctgactgtgagtcagcctgagcccagtggtggctgcagtcagaggtaaggatataaacctgagagagacagcaaatgagcagcctgtagttttattatctttagtagttactcagcccttggcctgcagatacagctcctgtgaatcccctttctgtgttctattaggtttacattaaaatggcaaaaaccgcgattacttttgcaccaaccaaatacttccatatccaactactgctagacccttgtgtgtgtgtgtgtgtacgcttatccacacacacacacacacgttactgtacagtctgtgaggagtaaaatcctcagtgcttaggatcccagagtcagttattttgtttcgtcagaaagactgtcctggctgccacctacatggttattatgtgagttctgccatgattccagggatctgctcagctctgtggcatgggcccagtttactcataaagcatcttgtgaccaagcacagtggctcatgcctgtaatcccaacactttgagaggccaaggcgggcagatcacttgaggtcaggagttcaagaccagcctggccaacatggtgaagccctgtctgtactacaaatataaaaattagctggatgtggtggtgcactcctgtaatcccagctactcaggaggctgaggcaggagaatcgctggaacccaggaggcggaggttgcagtgagcgaagatcacgccactacactccagtctgggtgacagagcaagactccgtctcaaaaaaaaagacctcttgtgactgctgtctttgctttccttcctccatctgaggctgtcatagcagatgccgccctccatcaggccccttgtccccctccctttggccgtcacttcttgtctgacatcttttgtgaaggtttaccctgtcttttttccatttgcttgtgatgtttatattcacacattccgctcttcccctgtcccctgtctaggattctccacagtcacatactcatttttcacaacttccttgcctccctccccaaccccatcatgtcagtgtgattttagattacactccatatatagttttatatgcagcattttttcacatagaaatttactgtgaacgttctcctttttattaactatccttccaaaacacacttttaagtttttcttgtgtggagtgactattactgagccaacccctactgaacatttggtttatttcctaattttttactcttaaacactgaccttttttttttttttggagacagagtcttgctcagtctcccaggctggagtgcagtggcgtgatttcggcttactgcaagctccgcctcccgggttcactccattctcctgcctcagcctcccgagtagctgggactacaggcgcccgccaccacacccggctaattttattttgtgttttgagtagagacggggtttcaccatgttagccaggatggtctcaatctcctgacctcgtgatccacctgcctcggcctcccggagtgctggggttacaggcgtgagccaccgtgcccagccaacactgaccatttttttaaaagttttcagctgggcaaggtggctcgcacctgtagtcgcaccactttgggaggccgaggtgggtggatcatttgaggtcaggaattcaagaccagcctggccaacatggtgaaactctatctctattaaaaatacaaaaaaaattagctgggtgtggttacgcatgcctgtaatcccagctactagggaggctgaggcaggagaatcgcttgaacctaggagactgaggttgcagtgagctgagatcgcaccactgcactctagcctgggcggcagagtgagactgtctcaaaaaaaaaaaaaaaagttttcttgtatacaaatttttctttgcatcttagattatttccttaggataaactcctagaaagggaattacctggaccaaaggatatgagaacatttgtaacactcttgatacaaattgtcaaaatgacctccagaaagatgatatggtgtctttttcaaaggaaaagttaaagtgctttttaagatttagaaggtattatctttttgcttttcacaggggacagtcaaaacttcacaggggggaaatcaagttaaattcagagctggatttagatgatgccattctagagaagtttgctttctccaatgctctatgcctttctggtaagttactactgcttatgggatagggtactacagttgtcatttcactgagggaagtttaaatagtcacgattttggtatattttcagaatactcaacaaagccttagcattccttttcctttttttccctccatcagaaaaaatatctagtataaaagatagtactgtgctgaagttactcattccttattaattgtattaataaagcttaacctctccaaaagtattttttagatgatgattatattagcctttgtttttttctcttctctctatgcgattgttattcttagatagtctctaatccagacagagaagcccagccttgtgtgactgggcacaggtcccagtgtagaaaaacatactctagtgttccataggaatgggacccagagtcacagtggctataagtttgttctgaaagatccacatcccgaataaaactatacaagttctttaagaatttcttttgccagcagtctaccttaggtggctgctgcagcgtcctgtccatcccactctgaggggcttcggagatttctgaggtttactcttagtcctgaggagtgaaggggaggccaggaaagtcttagtcgcgccctatctgcagagctacccatggtatcaaggtgtaccctaccctcctcagtttccaagatgtaatactagaaaatcaagagttctactaaatgtagctttggtcttccaatagggcatggaaagcgattcagtttcctctatccactttaattctgtcctttatgataattaactattcttaaattatattttcaaggttttagtactttttcttaaactattactgaaatagtagtgaagatgctgtgcaattatgtattttatatacatgtgaatatgatgataaagaaatgttccattattaatttttttcccagtaaaactggcaatttgggaagcatcactggataaatttattgaatctattcagtcaattcctgaggtaattatatcaattttatgcttattcaaggattgatttttatatgtaaaaaatatgaatttcccaatataacaatatatagctatccatcagtatccatgggagatttgttccaagaccccactggataccagaatctaccagtgtccaaatccctgatataaaatggtatatatttgcatataacctatgcatatcctcatgtatactttcaaccatctctagattacctaaaatacctaatataatgtaaatactatgtaaatagttgttatactgtattatttaggaaataataacaagaaaaaacagtttgtacatgttcggtacagatgcaaccattcttttttctcaaaatactgtcaatttgcagttggttgaatctgcagttgcagaacttatagagggccgattgtttaggagtacaacaacattattacaaacaataagaaaactacagtaaacttaagaactcccagttacatataaaatgacaaattaagaaacttcatattgattactttttactttttaaaacttcaaattgtttcctctgttggtgcagtattttttttttaatattaatataattgaaatggggtctggccatgttgcccaggctggtcttgaactcctgggctcaagcgatcctcctgcctcggcctcccaaagttctagcattacaggccacgagccaccatgcccgtcagttgcagtatttttaatgtaactgaattaaagaaaaaagtgaaatgtttctctctgagaatggaaattatgaccacttttcctgatttaagaaagtgttttgctaaattatgagaaaaatagtggtatgaaaaatacatataaagttatattgaaatttcagtatacattaaaaatcatcatattgtaattaactgtgtctttattgtgaaagagtaatctaattatacttcggaaaggaggccctgcttttctactaagagattaggaatgtatatatcattgaaaatgctgatgagaagggaaatgaaaaaagagaatatacaatttctacctaataaaattatgaaatttcaaggtgagttaagacattaatctgggagacagccatcctaaaaaatatttacataggatccaaattatgccacttcagattttgccctgttgacctaatgcttattagaaagagagatacatggttttttggtttttccgattccctctcaactaggctttaaaagctgggaagaaagtgaaactatctcatgaagaagttatgcagaaaatcggtgaactctttgctctaaggtaaaagttttctctctaaataaaatatttcatatatttaacaatctcaagaaaacattcccatagttctgtggtgaagagcaaacatttacacgtttatgggaactgtagctgttttcatttcattgattataagcagggagaactcttacccattagaagtagttgggctgtgttaagactgtactgaaagaaatcacgcatgtgcaaaagagatcacgattcatctacattaaacccacattaaggagcacagtaggtgttctttgaaggtagaaagacatattcctgaatttggttaatgggaattctctgtaaaaatatatcactgcatcataatgctaaataggcttaattgctacagaaaagtttctttgaatctgagacaccaagatgccactggagagaaaaactgctgccagttaaactatgacaatactttttttatcagaggattaaaattttacacttactgaaatatcttttaatcttagctggatataaattatatcacattccctcttgggcatatatgaaaaggaaagcataagaaaataaattatttaaggcaaagacaagtaagtctcaagtgccacctgtcagacaccattaattttaagatgcctcgagatgttaaaatgggaataactatgtctaaaaactgatgaatcattttaaataagtatctggaaaggttttcagcttttattattcttgtagttgtcccaggatttacggaatgaaacatcccggatgttggtgtttttctcacaggcagcattgtccagtttatcccttctagcatgtggaatgagttaccagagctcactgcaaatgttcacctaagacttgtttttccatattctccttagatgctctgcctggagagaagtgatacagtgtttcattgtctgtgtatctctcatagctcaggacctatagttcagggtaccaacaaaacttaaaaacccatccatcaggagcatcctgcagcatatctgaagcctcaaattctctgagaagtagggtagagagattcttctctcctgttctcttggtcatgcaagcagaaattgatgtagtgaattataatatccaaactgaatagttaggactaaatatacgtaggtttgtgaatagtttctataaaggcttacttttactatcctgtttccttacctgtacaataaaaatgcttatttgttaatataaggaatgtgatacatctgtgaaaataaacatggcagataatattagattaaaaaactaaatctaaatttatatagggtatgatcccatttgtgtaagcaaataaaaatattcatgtttatctttatatgcatacacatgtacatgtgtttgcttgcacacacatgcatgtatgaatacagaaagatctggaagtacacagcaaagtgtctctacaggcctgtccttggggagaataaaggatttaagtagtgtggtagcataagagagcctaccatttttctgaatccttctctaggatattttccttttttttttaatcgtgaacaggtatgtatgtgttactttttttttttttttttttaaacagggtcttgcttgtcacccagactagagtgcagtggcatgatcatagctcaccaaagccttgatctcctgggctcagggattcctcctgcctcaccctcctgggtagctgggaccacaggagtgctccaccacacccagctaattttaaaaataatttgtagagacagggtctcaaacccttgctcaagcaatcctcctccctaggcctcccaaagtgctgggattacaggtgtgagccaccacatcagtttatgtgtactttcataacttagatttttatttagttaaacatctaagtgtaaggccaggcacggtggctcacacctgtaatgccagcactttgggaggctgagacaggtggattgcttgaggctgggagctcgagaccagcctggctaacatgatgaaaccccatctctaccaaaaatacaaaaattagccaggaatggtggtgtgcgcctgtaatcccagcttcttgggaggctgaggcatgagaattggttgaacccaggaggcgaaggttgcagtggagccaggatcatgccactgcactccagcctgggcgacagagcaagattctgtctcaaaaaagaaaaaggctgggcacggtggctcacatctgtaatcccaacactttgggaggccgaggccagtggatcatctgaggtcaggagttcaagaccagcctgaccaacatggagaaaccccatctttactaaaaatacaaaattagccgggcgtggtggcacatgcctgtaatcctagctactcgggaggctgaggcaggagaattgcttgaacccaagaggtggaggttgtggtgagccaagatcgcgccaatacactccagcctgggcaacaagaacaaaactctgtctcagaaaaaaaagtaagcacagacttcttatattaaaatgtagaaattaagagagagagtgtgtatgtttatgcttgcttgtctagtgtttgcataaacactggaaggatacagcggaaactagaagggattactgatagggaaagatacagataagaataagagttaagatttatcaatttttacctgtttatatcttgatctgctcaggaggctgaggcaggaagatcacttgagcccaggagtttgaggctgcggtaagctatgattgtgtcactgcaccccaaactgggtgacatatgaagacattatctctaaaaaaattttttaaataaaaaacaaaaaagtgtggacatattaaattttttttttatttgagatggggtctcactatgttgcctaggctggagtacagtgtcacagtcttggctcactgcagcctctgcctccgaggttcacatgatcctcccacctcagcctcccaagtagctgggactacaggcatacaccaccacacctggctagttcttgtattttttgtagagatagggtttcgctgtgctgtccaggttggtcttgaactcacagactcgagcaatctgcccgccttggccttccaaagtgctgggattacaggcatgaaccaccatgcctggccctaaaatttttaataaaaaaagtttaggctgggaatggtggctcacacctgtaatcccagcactttgggaggctgaggtaggcagatcacgtgaggtcaggagttcgagaccagcctggccaacttggtaaaaccctttactaaaaatacaaaaaattagccaggtgtgatggtaggcacctgtaatcccagctacttgggaggctgaggcaggagaattgcttaaatctgggaggcagaggttgcagtgagctgagatcatgccattgtactccagcctgggtgacaagagtgactctgtctcaaaaaaaaaaaaaaaattgaaaacaaaatgagtttttttctgtgtacttcataaataatgttggtattaaagattgaattaatttggttcagaagtttgaaactcatttgtaaattttatttacatgtttgttggcagtattttgcaaaggtcagcattaacaaatgttttcagccacatgcaatgccacatgcctgtagttccagctacatgggaggctgaggcaggagaacagcttgagcccaggagttcagtttgcagtgagttgtgatcacaccactgcactccatcccgggtaacatagcaagaccctctctcttaccaaaaaaaaaaaagttttcataaagcactatgtaaatattaaatacaatagaaacaatgatttttaattcaagataaataaaaagttataattttcctttttaaaggcaccgtataaacttgagttcagacttcctgattactcctgatttctactgggacagagaaaacctggaaggactttacgataaaacgtgtcaattccttagcattggccgaagagttaaggtacgtattttgcacttctaatgagagaaaaagacacgttgtcgcctataagttgaatatgtttaactgcttgcagagaaatatcttgtttgacttccattcaaatctctttatatttccccttcttgtcctctgtacagtcacttcaattttttgtgtcaaaggatcttctgatattagctctacagactagataaggttggtgaataagatgagagtttggaagcctaatggtccatcagtaagttcttgtcaagtttcaagcaagagttcatgactgcttctgatctgtcatggtgacagtgagaatagaaataaatttaagaaagaatcatgtaagacaaatcaagtgatgggtaataagaggccatggagaagaaagaataaaggatgactgatgtttgcctggaggtgacaagtagaaaggtggaaaaacaataatgagaggtcagagaggggaggtgacagactaaatctaagatatgctgagattagagtagcaacaagatatccaattagctccgtcatgcaggcatttagaagggcagaagcaaagtcgggaaaagagacgtgtattaagaaatcccagcactttgggaggctgaggcggatggatcacctgaggttgggagtttgagaccagcctggccaacatggcgaaaccctgtctctactaaaaatacaaaaattagccaggcatggtggcattctcctatagtccgagctactcgagaggctgaggcaggagaatcacttgaacccaggaggtggaggttgcagtgagccaaggtcgagccagtgcactccagcctggatgacagagtgagactccgtctcaaaaaaaaaaaaaaaaaaaaagctgtagtgatggaggtagaccacatggggaaagagcatagaaaacagaaaattgacattagtacaatgtgtgcacatagttctgtgacattttgccacatctatagatccatgcaaccacatgatcaagacacaaaactgtgccaggtgcggtggctcatgcctgtaaccccagcactttgtgaggctagaggtgggcagatcacttgaggtcaagagttcgagacctgcctggccaatatggtaaaacgctgtctctactaaaaatacaaaaattagctgggtgtggtggcgcgtgcctgtagtcccagctactcgggaggctgaggcagcagaatcgcttgaacccaggaagtggaggttgcagtgagctgaggtcatgccattgcactccagcctgggcgttgcagcgagactccatctcaaaaaaaacaaaacaaaaagacacaaaactgttttatcacttttcctcatgctaccctgtatagtcacactgccctccccctacccggactgtccctaacccctggcagtgagtaatctcttctccatctccataattttgtcattttgaggatgttatatagatagtcatacagtatgtgactttttttttttttttttttttgagacggagtcttgctctgttgcccaggctggagtgcagtggctcaatcttggctcattgcaagctctgcctcccgggttcacgccattctcctgcctcagcctcctgagtaggtgggactacaggcacccgccaccaagcccagctaatttttttttgtatttttagtagagatggggtttcactgtgtttagccaggatggtctcgatctgtatgtgactttttaactggcttttttcacagagcataatgccctcaacttggatccatccaaattgttgcttgtatcaaagttcctgtcttcctgtggttactgaaacaattttttggtatttcattttgatgttactttttaatatatctcgttgcatagatatttagtagttgctctggttattacatcttacgtatataacttattacaatctactgatttcaacatcttgcagattaaatgaagtatagaatctttatttccctaatggatgattggatgcagaaaaaaaaaaagaattcttatttcttttatattcctttacccttccgtatttataattttcttaactattcttctgcagacatagaaaacttcatcagataatgttataatttttgcttcaaccatcaaacataatttagaaaactaagaaaagcaaagtctgttgtatgtgcccatgtttttattctttctgttcttttctccttctgatcttctaagatttcttttactgtttttttttttcaagaactttatttagccattcttttaaggtaagtctagtgagacaaattctcttagtttgtcttcatctgagagtgtattaattttctcttcattcttgcaggatattttcctagaaataggattctaggtagacagttttctttctttcagcacctgaaaaatgccatgccacttccttctgacctccatggtttctgacggaaatctgccataattctatgacatctacattttatcttttattatcatttcacaaggtctttgaggctctgttcacttcttttccagtatattttgtctctgttaagattgggtaatgtcctttgtttcatcttctagttgattgattccttcctctgttacattcgttctgctgcccaacattgagtttatttcatttattatatttttcagttctaaaatttccatgtttttttatttgtatcttctgtttctttgcagagacttcctgctttttcgtttgtttcaaatgtgttcagaattgcttgttgaatcatttttatgatggttgctctaacatcatctaataatacctaacctcagatacctcttgatattagtgtctactgattgtcttttctgattccctccaactaattttaatacctccagtttccctcattgcctcaagtgttctggcttgatatacaaggtccttcctattgtttctgtttttcaatcatatttcctaccaatccccacattcaccttgtatcacatcaaaaataagtgattagcctgggaaacacaatgagacctcatttctactaaccttttttttaaaaaaattagccaggtataatggcatgtgcctgtagtctcagctaccctgggaggttgaggcaggaggattgctttagcccaggagtttgaggctgcagtgagccatgatcacgccactacatcccagtctaggtgacagagtgagaccctgtctcaaaaaaataaaaataaaaaatacatgatttataatttcaaaaacctaccatggcttattgaatgctatgttccactttagtgtctacatttttttcctctaagctagacaccgccccttgcaaaaccacatcaaagctatctgcagttgtcactgatcttggcaccacctattcctctgtaggtgtcttccagcacaggacagtagagatcatcaccactcggcaagaaaaccaagctatgttgcttttagctgacacagaaagattgattagtgatggtttaggaatcaaattcagtggactccatcaacacagttttagataacagaggtgtaattagacaccgatttgacagtccaactgtctggtcaaacatgaaaagcactggactttcctggttgtcgactgtgcacacaggctgaagatccagaggaggaaagggagggatactaaaagctttatacagttgaggtatttcctgtggttgtgttagctattgctgtgtaacaaattaccccaaaacttggtggactgaaacaccacttactggctgggcacggtggctcacgcctgttaccccagcactttggtaggccaaggcaggcaggtcacatgaggccaggagttcaagaccagcctggccaacatggtgaaaccccataaattagtcgggcatggtggcatgcacctgtagtcccaagtagctgactctggaggctgaggcatgagaatcacttgaacccaggaggcagaggttggactgagctgagactgcaccactgcactccagcctgggtgacagagtgagactgtctcaaaaaataaaaagaaaaaagaaacaccacttactatttaagtttttgtgggtcaggaatcagtgcagcttagctgggtcctctgattctgtgtttctcacaaggctgcagtcatctcagagattcacttcctagttcactcgtggttattggctggatttggttcctctcaggctattagattgaggcctcagttcctcataagctgatgtccagaagcttctccatagagcatctcacaacatggcagtgtgcttcatcagatgaacaagtaggggagtgatatggtttagatctgtatccctgcccaaatcttgtgtcgaatggtaatgcccgtgttggaggtgggtcctggtgggggggtgactggatcatcagggtagatttctcatgagtggtttggcaccatccccttggtgctgttcttgtgacagtgagttctcgtgaggttgtttaaaagtgtgtagcacctgcatctccccttgttcgctcttcttcgcttctgccatgtaaggtacctgctctcccttcaccttccactatgattgtaagtttctggaggcttccccagaagccaagcacatgccagcatcatgcttcctgtagaacagtgcagaaccatgagccaattaggcctcttttctttataaattaccccgtctcaggtatttctttatagcagtgagagactggactaatacagagagcaagagagactgtcaggaagagaatgctagtaaaacagaagtcacagtcttttgcaacctaatcacagaagtgatttttgctgtgctctctttgttaaaaacaagttagggccaggcacagtggctcatgcttataatcctagccctttgggaggctgagatgggagggtcacttgaggccaggagttcaagaccagcctggtcaacatagtgatacccccgcccatctctttaaaaaaaaaaaaaaattaaaaagcaagttatggccagtcgtggtggctcacacctgtaatcccagcacttcgggaggccgaggtgagtggatcacctgaggtcaggagttcaaggccagcgtggctaacatggtgaaaccctgtctctactaaaaatacaaaaattagctgggcatggtggtggacgcctgtaatcccagtcacttgggaggctgaggcaggaaaatcgcttgaacctaaggggggcagaggttgcagtgagccaagatcagcctggatgaaacagcaaaacttcgtctcaagaaaaaaaaaggcaagttattagactgagcctacgctcgagggtaggggatgacacaaaagtgaacaccaggaggtggggagtctttgggtggcatcttagaaatctgcctaccacattggttttgaaaaagatggagaaaattctggaaacctactttatgacccctgacctacacgatcctcatactaccagttactttaatggttgccagcttcaggccatcaaagttggtggaaccattactgatctcattgtgttctgaattgtcagcaagccaaatgccgctggtctcagcttagacgagaacgttaatgccaaatttaatgatctgatcttttacctgggtggcattttttatctgtccatcctcagtattcaagatggaattactgaagtcaagtctgcaactgaggatacccacctgagtgaagagtaccttgacaactaagtggtcagctgtttcatggctgagatcaactgcagttatagaaaggacacccgttgagaacaagcaggctgcccaagccccttctgcctctactgaatgtgctcttcattctggtatcgaggccaatttgagattgagtccctccatgaaggggttcacatctatacctctgtgcacatgagcagctggaagaatcaaaagccaccccagtccctggcaccctacacctgtggagaaagccataagcaatgtcacccagacatatcaccagtccttcacgggtggctctatttatatccccaagatttaaaatctcttatagggccgggcatggtggctcacacctgtaatcccagcactttgggaggccaaggtgggaggatcgcttgaggccaggagttcaagaccagcctggccaacatggtgaaacctgtctctactaaaaatacaaaaattagccgggcctggtggtgcatgcctgtgatcccaggtacttgaggggctgaggcactagaatcacttgaacttgggaggcaaaggttccgatgagctgagattgcaccactgcactccagcctgggtgacagagtgagacttatctccaaaaaaataattaataaataagataaagtctcctacaggaagaactagaactgaatttatttacaggcagtatgatcttgtatgtagaagacctggaagaatctacaaagaagctaccagaataagtgagtttatcaaggtctcaagatcaatgtataaaaacggttatctttcgttatactgcaaatacacaattggaaaatgaaattttaaaacttctgtttatagtagcacccaaaacttgaattactcaggtttgaattgagtgattcaactattccagaataatattaattaatcaattggagtaatctgagcaagtaattgttctttatttcattccccagtctcactgtgggacatcttttttggtgttaagtcttctgcatgagttatgaagcatacctaaaaggtctcaaactacctttctcagagttttttctcagcatcccgaaggcagttcagactcgttggattatgtcaaggttatttagaaggggttgagagttcaccctgccttaggctcagcatagtgctggcattatacataatacaaaagaaaagtaagaattggtcctgcccttcagccagctttacagtcttctaagaaaacagatggaacaggccgggtgcggtggctcatgcctgtaatcccagcattttgggaggccaaggagggcggatcacaaggtcaggagatccagaccatcctggctaacatggtgagaccccgtctctactaaaaatacaaaaaaattagctgggcgtggtggcgggcgtctgtagtcccagctactcgggaggctgaggcaggagaatggcgtgaacccgggagggagagcttgcagtgagcggagattgtgccactgcagtccagcctgggtgacagagcaagactccgcctcaaaaaaaaaaaaaaatggaacaaagagtagcggggttttttattccccctcaaaaagtagaagaaagggtcttgagaaaataggggtgagtaggcataagacatgctaaaaagttgagtacagaggtccagatgcagagagcagttacacagtgtcatgggacagaaactagttggcagtggatccctcgctccattttctcacgtcagtatcccctgaagtcctgtcgctgaggcttctgtccccatgccaccttctccgtgaacacttgtttgttgtcgtgacttctaatcccaccttctcctggggattttcaaatgtctctctcatcccagtctcttgtctgccttccagacttttccagttgcccctcaatctcacagatcttcctcatttacatatctcgtcgcatccttttaaaaattgtgtgtaccattttccactagaatgtaagccccatgagatcggagaccatgattattttcttgcctgttcttggcaaaggcctcacatacagtatgtccgcaagaaatatttgtagaattagtcaatgattaaaatttcaaaatgaaacttttgaaattcccccccaccccagaaaatggtaaaccttttcagttctctatttcagctcatgggaggaccttctagcctcacctatctagtcattcaaccagaaacttaaaagtcatctgggtgtcctttttctccttcaccttccatatccagtcaaacaatctttttagttccctctaagtatcatggattcattagcaaacatttattgaaagcctgtatgataggccctaggctggtgaaacaggggaataccatactgacccgtcttcaagcccccaactattaatgttcatccacacagcccctcatcttcctttcccacctggacttgtctgattccttcttgactctctcagtctccagactggaccttttcccagtctctctgcaccctttggctgcaagacagacacatgtctatttcaccattctgtctcctctgcccagcgtagtacagtaaatgttaaaacaagtacttccagactgaacaaaggcctccccattacctgcagaatgaagttcagatattctagcatgacatgctactttcctactgctgcttaacagaaatttgtcatcttactgttctgtaggtcagaagtctggcatggcctaaagttaagatgttgattcctctttggagactgcgagtggaatccatttcctcaccttttccagtgactggaggccacccatattccttgctcatggccccctcctccatctagcaaaggcctgtggaatcctcatattgtatcattctgaactcttctgccccgcatttccacttttaaggacccttgtgattacattgggcttacccagataatctaggattatctcatcttaaggtcagctaattaataactttaatttcttatacaatcttaattctcctttgccatattatattcacaggttccaagaattaggacataaatctctttggggtgggggacatggttctgcctataccatatgtagtacacagtacctctcacaatctggtactaacttctttttttctgagatggagttcaatgccgtggtcttggctcactgcaaccaccgactcctgggttcaagtgattctcctgcctcagcctcccaaatagctgggattacaggtgcctgccaccacacccagctaatttttctatttttagtagagacggggtttcgctatgttggccatgctggtcttaaactgacctcaagtgatccgcctgccttggcctcccaaaatgctgagattacagatgggagccaccgcccccagctgacttaccttcttaacctcacttccaagcactttcttctaggttgtccacaatctagctatgcttgtctgtatgctgtttcctatgcttgacatgctcccttcatcccccaataaccccaccagcatcccaccttttcttcatgtccactgccttttaaagcctaattcacatttcctacctctgtgaagcctctcctggttttttctttgctcccttaatctgcatgctcgacgcgtacatgcctctatacctaaataaatagaaagcatgctgtggtaatagtgacttttttttgtgtgtgtgacggagtctcgctctgtcgcccaggctggagtgcagtggcgcgatcttggctcactgcaagctccacctcccggctgggttcacactattctcctgcctcagcctcctgactggctgggacaacaggggccgccacaacacccggataatttttttgtatttttagtagagatggggttttaccctgttagccaggatggtcttgatctcctgacctcgtgatcctcctgccccagcctcccgaagtgttgtgattataggcaagagccactgcacccggccatagggactcttgcttgcacatttcagtgtgttgtcagatgcttggattgaggttcgaagctaagttgttagacttaataatagactttgggacgtttaggagagttgtggtaatataaactaaaggaataaattggatgatgatgaggtagtggaggaagaaaatgttgcctgttttttggcccaagttgaaagaaaatgcaagaggctgaatcagtagtctgaagagagaagcaagcttaaggatgaacattaaagaccaagatcaagcagccaatagaaacagacattaagaaagggcaagaggaaaggaaaacagggaggggaaaggaagagggaagaggcatgctctacacatctatacagattagaaactacagggtgaccataacgcctggaaataggggcaaatggtggagtgtggttcagtcagttagtcctgtggttctgtgagtaagacagtttttttttggagacaggatctcactttggcacccaggctggagtgcagtggcatgatcttggctcattgcagccttgaccacctgagctcaagcaatcctcccacctcatccctgccaagtagctagaactacaggcacacaccaccatgcctggctaatttttttgtagagacagggtttcactgtgttgcccaggctggtctccaactcctgagctcaagtgcgcctcctgcctcagcctcccaaaatgctaggattacaggcataagccaccgagcccagcctagtaaggcagtttaatgctatgtgcaaaaatcgtaacatggtgcagttaacgcattccaatcaacccctgaacacgtacctgtgattcatctcttaatgttcactgaccaaacctgtaacttcagcatacccatgagacaaactgttttaaaattttgctttcaggatttccagtagcaagtgatatataaagatattaggtaggtatttaacagttatcacatccaggcctggcacggtggctcacgcctgtaatcccagcactttgggaggccgaggcgggcggatcacaaggtcaggagatcgagaccatcctggctaacatcatctctactaaaaatacaaaaattagccgggcgtggtggcgggcacctgtagtcccagctatttgggaggctgaggcaggagaatggcgtgatcccaggaggcagagcttgcagtgagccgagatccgccattacactccggcctgggcgacagagggagactccatcccaaaaaacaacaacaacaacaaaaaaaaaagttgtcacatccaaattttgaattcagggactttattttctttgaacccccacagccagcttgtttggaggcatcggaatgcagaactgttgcagttcagttgaaagcaatgccatctagtggtgtgtgtacagcaggtcaaatgttaagcgtagattttctagtagaaagtaaattatctttaggtcttgctaaaaaacattatgtttcaagtttgcctcttttaactgctaaaaagggcagctactaaaaactaggactcaaaaacctatttttagttcttccatcaaaatcttacaaatagaagagcttcagtatgcaaagtatttcttgcagttaaatttgtacattacaaaatgtctctggacggattcacaagaaactgataatgttggtggctgcctttggggagaggactgaggagcaggatttttcactgtatagctatagaatttttatgtgtatgaccgtattaaattgtttaaatacatgttactgaaatttttcttacataggtcatgaatgaaaaacttcagcactgcatggaactaacagatctaatgcggaatcacctgaatgagaagagggcactccgcttggagtggatgattgtcatcctcattaccatagaggtaagatggaaatgctctgtactatgatcagttaccatcttttcacaaatacaggggctatgctaataagatagtttgagatagaaaattattagcagaaaagaggctgactttgttatcattactaactctatttggaagtttcaaattactatttgcaaatgcattaaaagtaattcttgaaaaggttccactttttaaaatttgagagtagacctcaaggttctgcttttaaagacagcatttggaaaaagttctagctgtaaatttataatgtacagctcaacatcaaatcaagcacccgtacctccaattcataggttgccacgtgagaaagggcaaacatttaccttacttcaggagcatttctcattaatcacaatcttggaagtcattttagtttgtacccataatttgcccgtcatgaaataattctcactttctattctaaggtaatgtttgagctgggacgagtatttttctgatcaagtgataaccaaagtgtcactgcaagagatattcaagttctacaatcaaaaattaaatgttcggcccggcgcggtgcctcatgcctgtaatcccagcactttcggaggccaagaagggtggcttgagatgagatcaggagctcaagacaagcctggccaacatggtgaaaccccatctctactaaaaataccaaaattagccaggtgtgttggcacacgcccgtcatctcagctactcaggaggctgaggcaggagaatctcttgaacttgggaggcggaggttgcagtgagctaagatcacaccactgcactccagccagggcaacagtgagactcagtctcaaaaataaacaataaaataaataaataaatgttca

SEQ ID NO: 15770 - DNA, 47365 bp, Homo sapiens
aggagatgggttggctgcagtagtgagaggctgggggtgcggctctttccctgcagtcctgccgaggaagcgtgcgtccctggcgcttccttcttctcttccggcggagaggttagtgtattgccttttctttagcagctcgagtggtccggcttggaggtctgcgccctggctcctggccgcccggaacgtgtacagttacgggttacgccagtgcggctgtgaccctttgcctcttaccgtgatctttggtcagcttagctgggagtaaaaagcactcaattaatgaaccctttttttgagccagtgcaccgcggtaactgtagaaatcgataaaataattttgagtttgaggaattgaacggcatactcccaaagatgagcgccacttagctctcgaatcgtagcctagctgtaatcgattttcttaattggtgtaattgttctctaaaagttgaaatgtgcccgggaactgagtaactgccttgtatttcattttaaaaattcgatcgaatgcctactatgtgctgggcgctattgtcaggagatataataggaaaaaacacaaatccgtatcctcagggagcttccattctggaaggaagacacaaaaatctgccctttcctcttatttttttcctttagctttgtgtctcacgtattttactgatttacctcgttttgtctgtcactcccaatgcaaggttcaaaagattcaaaagataggatttttgtctattttattttcagctgtattgtcagcaactaggacaatacctggcacatgataagaactgagttcgtttgcagtatgaattaataaactaaaaattaaaggtgtgcaagtgatgttaaacaatggagaaatgcaaagtggaggaagataagagaatggatgctggttgtgtttttttttttttttttttttattgatcattcttgggtgtttctcgcagagggggatttggcagggtcataggacaatagtggagggaaggtcagcagataaacaagtgcacaaaggtctctggttttcctaggcagaggaccctgcggccttccgcagtgtttgtgtccctgggtacttgagattagggagtggtgatgactcttaaccagcacgctgccttcaagcatctgtttaacaaagcacatcttgcaccgcccttaatccattcaactctgagtggacacagcacatgtttcagagagcacagggttgggggtaaggtcaccgattagcaggatcccaaggcagaagaatttttcttagtatggaacaaaatgaaaagtctcccatgtctacttctttctacacagacacggcaaccatccgatttctcaatcttttccccccctttcccccctttctattacacaaaaccgccattgtcatcccgtcccgttctcaatgagctgttgagtacacctcccagacggggtggtggccgggcagaggggctcctcacatcccagtaggggcggccgggcagaggcgcccctcacctcccggacggggcggctggccgggcggggggctgacccccccacctccctcccggacggggcggctggccgggcggggggctgaccccccacctccctcccggacggggcggctggccgggcggggggctgacaccccaccttcctcccggacgggggctggcccccccacctccctcccagacggggtggctggccgggcggggggctgacccccacctccctcccggatggggtggctggcctggcgggggctgacccccacctccctcccggatggggtggctgccgggcggagggtctcctcacttctcagatggggcggccgggcagaggcgctcctcacatcccagacggggcggcggggcagaggtgctccccacatctcagacgatgggcggccgggcagagactcccctcacttcctagatgggatggcggccgggaagaggtgctcctcacttcctagatgggatggcggccgggcagagacgctcctcactttccagactgggcagccaggcagaggggctcctcacgtcccagacgatggggggccaggcagaggctgcaatctcggcactttgggaggccaaggcaggcggctgggaggtggaggttgtagcgagcctcgatcacgccactgcactccagcctgtgcaccattgagcactgagtgaaccagactccgtctgcaaacccggcacctcgggaggccgaggctggcagatcactcgcggttaggagctgcagaccagcccggccaacacagcgaaaccccgtctccaccaaaaaagtacgaaaaccagtcaggcgtggcggcatgcgcctgtaatcgcaggcactcggcaggctgaggcaggagaatcaggcagggaggttgcagtgagccgagatggcagcagtacagtccagcttcggctcggcatcagagggagaccgtggggagagggggaccgtggggagagggagaggagggagagggagagggctggttgtgtgtttttaatgtagtggttggggaaggcttcactgggtagaagacattttagcaaacatctgaaggaggtgagggtgtgagcctttcagatccctgggagaagagcgtaaggaacagcaagtgcacagatccagagaccagaatgaggagcaaaataagcaaaggagagtgctgtcaaagtggtgataaaggacagataatgtagtgccatgcaggccattctgaggggtttagcttttttttttttttttcgttacagaatctcactctgtcgcccagactttagtgcagtggcgcgatctcggctcactgcaacctccacctcccgggttcaggcgattctcctgccttggcctcccgagtaactgggattacaggcacccgccgccacgctcagctaatttttttgtatttttagtagagacgaggtttcaccatgttggccaggctggcctcgaacatctgaccttgtgaatcacccgcctcggcctcccaaaatgctggggttacaggcgtgagccaccgcgccaggctttttttttttttttttttttttttttgagacagagtctcgctttgttgctcattctggagtgcagtggcgcaatctccgcctcccagattcaagccattctcgtgcctcagcctcccaagtaactgggattataggcccatgccaccatgcccggctgatttttgtatttttagtagacacggggtttcgccgtgttggccaggctggtctggaactcctgaccccaagtgatccctcccaaagtgctgagattacaggcgtgagccgccatgcctggttggagggctttggcttttattaagtgaaccgtgaagccacagctagatttcgcgttgagattcaacttcaaaggatcactttggttgctgtgttgagaagaaactgtagggggcccaaaacagaatcaggaaaactggttaagaagctattataataatccatgggaaggatagcagtttggatcaggtagtattattactgatgatgagcagtggtccctagaaggcccttgggatttactgagaagttggatatggagaataaagagtcaagctggaccccacgtttttggcttagcagttataaagatacttattactgctcatgaatgggaaagactgggaagaaagggatgcaagggattctaggggtataagggagaggttagaatggtagaccatggagtgtaaactggatatggaggaagtgaagtcatggggagtgagagacagtgaaaaggtggttggatcattgacttgtgggtcctgttggggttgaagaattattggaattgggtaatagaaggagtgagatgcaaagataggaggtggtgcttagagagtaaaatggatgaaactgagatgaggaggtccgatgtattgataatgacaatagggccctgtctgatagaaaaacagtgtaaggcacaaatgtaatcttaggctttctagaaggtgcagtgataaaaatgggctgggtccggtggctcacgcctgtaatcccaacactttaggaggccaaggcaggtggatcacctgaggtcaggatttcaagaccagcctggccaacataatgaaaccccgtctctactaaaaatacaaaaaaattaactaggcatggtggcagacacctgtaatcccagctactcgggaggctgaggcaggagaatcgcttgaaccggggaggcggaggttgcagtgagctgaggtggcaccactgcactccagcctgagtgacagagcgagactcccatctcaaaaaaaaaaaaaaaaaaaagaatttactcaaagagaataaaaagaatccaggactgtagacaaacttctaaaatattttatagtttcttcaaaattaagtggttcaactggcatggcatagtactaattaaaggtgaactacagtagccaattggactagaatgaagcacagaatgcgagcttttgaagggattttggaagcagcaggttctacctcctaaatatcactgtgaatcatctttgtccttatcctgaagagaggtagtaaatacaaggtagtgggtaagagtgttgactttggaattgggaaagcctgggttttattttagttacatctctgcagcttcttaacggtgagcacttagcctctttaaacctcagtttcctaatcagtgaaatgggatcattatgaggtgaagccgagcacttagcatgtagaaagcgctcagagtgatgtcagagtctgtcttgtttcctcctacatatcatcaccaaaaatttgtttcatgaacatgcatttgaccgtgtgactctgagttaaaagctcagctttctccccacctgtagaaactttttaggatgactttatatatcctttggtgatctggccatcggctcttttggtccttacctcctgcagctcactcctacctccccgagatggggagatgaataggactccatgcctggggtgtttaacttgctgatccttctgccctttcaagactcagttcaaatgtcacctctgtgacaatgccacactcttcacatgctcctttctctggactagagcaatttgtgcatctcgttcattttcctctgctagactttgaattctgagatcattgattcatctatctctagcacctaacatattatttttaaaaaaagaattattgattactacggtctaacttttttttttttttgagacagagtctcattctgtcgcccaggctggagtgcagtggggcaatcctggctcactgcaacctctccctccctggtttgaacgattctatatctcagccacctgagtagctgggattaaagccactatgcttggctaatttttttttgtatttttagtagagatggggttttgccatgttggccaggctggttttgaactcctggcctcaagtgatccccccagcctttagcctcccagagtgctgggattacaggcgtgagccaccatgtgtggcctactataggctaactttaaaataacacatttcatactgtaaataagggggaaattctgtttaccttgtctggaatgttcatgtgtgtatctgacatgcctcgcactcccatgcccagccccaagctgaaaagcaccttcgccttctagaatcagcttagatctttctgggaacctttcctgattttttttttttttttcctgagacagaaaaagggctggaatgcagtggtacaatcatgactcactgcagcctcagtcttctgggctcaagtgatcctcccacctcagcctgtgagtagctgggactacaggcatgagctgccatcacacccagctaatttttaaatttttgtcatttttgtagagatgaggtttcaccatgttgcctcagctggtctggaactcttggactcaagcgatccacctgcctcagcctcccagtgtgctgggattacaagtgtgagctacagtgcctggccagcacagatttttatatacttgatatgctaatgaagtaaatgaagtggtcccatcactattttttttaaggttcttgttatgtcagtagctttataatcttgtaatcttccaggaagaaggccaaatgttgctaaaggcaaagtggcagaaacactgtacttatatttttaaccttgttcttttactagaattaacttagaatgtatctgttttacaaatttttctaacagaaatatgcctgctacctagggaaatattatatatgttttaaacattaatttaaaaacttgaactttgaattccttttcttttagcttgggatgtggtaatgccagccacactcctcagagccgtggccagatctcatcatatattatcaaaagcacatcagtgccgaagaatcggtcatctaatgttaaaaccacttaaggaatttgaaaatacaacatgcagcacactgacaatacgtcaaagcttggatttgttccttcctgataaaacagctagtggtttgaataagtctcagatcctggaaatgaaccaaaaaaagtcagataccagcatgctgtctccattaaatgctgctcgttgccaagatgaaaaggcacaccttccaaccatgaaatcctttggtactcacaggagagtgacccacaaaccaaatctgttgggttctaaatggtttataaaaatattaaagaggcatttctcatctgtatcaacggaaacatttgttccaaaacaagacttcccacaggtgaagagaccactaaaagcatccaggaccagacagccatccaggaccaaccttccagttctgtctgtgaacgaggtaaagtaggggtggccgtggctctcgtgcttagtgatcattgctcatgctaaaccagtgtgcgttgcaccccagccttaccgccaacgtaagagaactagcagtcactcagacttcttcatcaaggtctttgaagcctaataaatatccaaagggattcagaatcttaatttttaacaattaatgatacatataaaaacaaaatacaggtgataacacatgaaaatagagtttataaaagatttggttattggtctaaggaaactgaaaaagaggaccaatattaagtccagtctaagaatgggactgtaaaaaaaaataaaataaaaaaaaacaaactagaaattcttcatcaagttaaaaaaaattgtaactctgcagacagataagcctttattaggctgtggcagttgcatggggcggtgaaatgacacggtagggtggactccaaaagcagcaggagaggagggcccagcttttttatcctcttaaggtttaagggggtattttttattcatccttaaggggtttctgggaatttttctgctacaatttgcatttctccttcagtaacaacttaagggtcaagatcaagcccttgataacctttgtatcttgcataatacctagaactgtaccttgtacttaaatgtttataagaggatctttaatgccgatagtcatcaactttaaagatattttaaacttgatgaagacttctgaatctatcagaaaacaggttagaatgtctgtcttcaagtcttgattctgaaaagtagcccctgagcctgtttcattttggctgtgtttttattactgtgcagctgacaccccttggaaaggtatacatacatacctttactcatcctctgattctgaatctagcaatgaatgaatggtttttgtgttggattctggaatgctttcaattcttgtgtggttactctgaactcaggacgtgaaggatgaagtgttgtgcagctactgtttcccctttccttttgctggagctttggggtaacctgggaaattcagtatttaagtgtccgagatggcattaagtgtaaaaacctgaattcatggcagctccaaaaaagagaaagctcaactcactttgttcatttgtaacgtctagcagcacagtgcatcaggtttcttaggaagaagctgataggtcagagatgtccctaggctatttctttgggccatccttagacttggaagcaattttcctaaataccgtatctatttttctttagatttttttttctacttccttccaggaaagaatttgaagtagattttcaacattcaacatagtttcaaatgagataataaatactttcacatattagagcaaatagttgacatgaacagagaaatgttatgaagtacctgaaatgaataatctagttgaacattttgttttgagaagcgcagtaattaaaagaggaactcctcctgggatttagtgtttgttgtttattgttgtgggagagggcagagtaaaaacataaaaatatcttcagagaaataactttttccagcactgaaattaaggagttagttatttcatggattctgttataggagacattatgtaacatgatagacaatgacttcagttggagtttggcaagagcaagtcgcatgctgtctttctgaaagcacagggaaataatagaaaatcagatgtttctggctgggcggtggctcacagctgtaatcccaacactttgggaggcccaggcaggcgattacttgaggtcaggagttcgagaccagcctagccaatatggtgaaaccctgtctctacaaatatacaaaaattagccaggcgtagtggtgcacacctgtaatcccagcggctcgggaggctgaggcaggagaatctcttgaactcgggaggtggaggttgcagtgagctgagatcatgccactgcactccagcctgggtgacagagtgagactctgtctcaaaaaaagagaagaaaatcatgtttctaaagtggtctgagataatgtaattttggaacatcattttttgaagattttacttttcatagagaaagcagtcttggcatgactaggtaatatgtccccaggaccaaagactgactttcctctgcccgaaattgagggccactccatttttatacggccatcatagtggtaaaccctttataccactttataccatcaaaatggtaaaccctttataccattcttgactgagacaaggaaaagactctgctttgtgtcagaaagcatgtggactttattttgttcccatagttgcacccagctcatcttttcagctctgcagaacagcgtgcatctggagttggctgaatgaggtttcagtcaccctgtctgttggaattaaatctttacctggtctcattttcagagatcataatctgagatactcaacccacatccctttggcttacaattcctaaaagcaatagtggatccagtggcttatgcctataatttcagtgctttgggaggctgacacagaaagaccacttgaggccaggagttgaagaccagcctggcaacatagcaagactcccatttctaaaagacttggaaaaaaaaaaaaaaaaaagccgggcttgctggtgcgcagctgtagtcctagctactcaagaggctgaggtgggaggatcgcttgagctccagggttccaggctgcagtgagtcgtgactgcacctcgctccgtccagcctgggcgacagagtgaggccctgtcactaaacaaacaagaaaacaataatagcagtgcttcttgttaatgtccagtctttgaagagaacagcagaggatgggaacggcaggtctgagtggcatggagcccgacaccagggagaatgttttcaggctaatagcactgtgttacagaatcactggtggactgttaaccatttttttgaaaaatgaaatagaatagaaaataacagaatacattgctcatgataaacgtaaatactggtttgtgaagcttttgtggcaattggtgtgtaagcatatatgtgtatatgtactatgtttaatgatttataggttgtagtcagaaaaacttacaggataaagcgtgatcttggtaacgtaaaatgtatctgtgtttttatagctttaatctccaatcagtatgttacaggagaaaaggcatttttccttagtatgatctatctactcacagtacttctgacatcaaatatatggggacctcttcctcctcctaccagccagttctccaattctccagacactaacaaggtgtcctgcaattcagttcaattccagcactagccagagttagtgcagacgccagttagttaagctcagccccacaagactgccctcccagttgacacctgtgcttctgaccaaccagctctatgacaaccatcccctcttcaggtttgattatttgctagaatggcccacagaactcagggaatcattttatttatgtttactgggttttttatataaagtatgcaaatgaacaaccagatgtagaggtgcacagagtgaagtcaagaagggcctggaacttaggagcttctgttcctcatagaactgggctgtgccaccctcctggcacatggatgcattgatcaacccaggagttctccagaccccatcatctgggtgtttttaatggaggtttcattgtgtaagccatgattaatgattaactcaatctccagcccctctccgtccaccagaagttaagggtgaggctgaaagttctaagcttctaatcaaagtttggtctttctggtaaccaccccccatcctgaagctgtccaggacccactgagagtcacctcattaaaacaaaagatgttcccatcactcgtgaaattccaagggatttttagaagctctgtgttagtaactgaaggcaaagagcaaatactacaaccaaaaatgcccctgtcacttagaaaattacaggggtttttaggagtctgtactgggaaccaaggacaaagaccaaatgtaaatgtattatatcactatagaagcaacattgctgtaacacactaattttcttcagtaatacagtgtaaatgaaagtataatttttaaaaaaatgttctgatcagagcatgcgatgctcctaaaacaagaatcatatgtagatttctagccccatctgctggaacatgtcttctttggccagaaaaacaaaacatactaaaatacagtggtttggggtttttgctttttgggttttttaaaacattttgaagtagaaaagccctgaatatcataactattatcggttggtttgacacatctatttaacaggaaggtgtagatccccatcctgaaacccaaaatatgctttacatatatatgtagctaatgcttaataaggattcactgtaaaaatccagaaaaggatgtataaaaatgaaagctgctcagaaaacaacagcatctttaataaagaaaaaaaagcagacaagacattccatgattctctttccttttaccaaataggctaaaataaaaaaagcaaagaaaacaaaaccaaaacaaagtgtctaaaacgtcaagttcatctattaatagaagaaacccacaactaagactcagagctaagaagtttaaggagaatacagaaagtagtgtagcaaaccatataagctgagtgacattggatagaactttgagccaaactaaatgggagatcccaagagaaggaaaggggacagttgacagtctggaaaacctacaacaaagatccttaggatggccaagtgaaaacagattgtgtttaaagatttattcataatttatttggagcttagaatatattttctcataaaaatagtgattgacttgtcctgtccttgagagttgaaaatagtacacattctcaatttgccgttagtgtcggaatattcacataatttgggataccagattgcccaaaactcagttctgaatatattgagccttttatttttatctccaagtggcggtttttaaaactgaccttttaccttgatttaaaataatagtgcctggctgggcatggtggctcacgcctgtaatcccagcacttgaggccgaggtgggcagattaccagaggtcaggagtttgagaccagcctggccaacatgaagaaacaccgtctctactaaaaatacaaaaattagccaggtgtggtggtgcatgcctgtaatcctagctactcgggaggttgaggcgggataatcacttgaatccagggggtagaggttgcagtgagctgagatcgcaccactgccctcacgcctgggcgacagaggaagactccgtctcaaaaaataataaataggccgggtgcggtcactgatgcctgtaatcccagcactgtgggaggccgaggcgggaggatcagatgaggtcgggagtttgaggccagcctgaccaacatggagaaaccccgtctctactaaaaatacaaaaattagctgggcgtggtggcgcatgcctgtgatcccagcaactcgagaggctgcggcaggagaatcgcttgaaccggggaggcagaggttgtgatgagccaagattgcaccattgcactccagcctgggcaacaagagtgaaactgtctcaaaaatataataataataaagtaaaaaacagaataaaataataatgcctgccaccgccattaacagaccttgtactctaatgccaagctgtatatgggacagttgccagcatgtcttcactggcactataaaatatagccaagaagataggctctgagagtaagaagtctgtgttggttaggagtaattttgtcctggctctctggtataaagctctcaaatgtaaatccgggtgggataatggactcagctctgtctgcaacatgccactgtgcagagaagcactctcatgcataagctttttatgctgtaaactatagtagctgaaattaaatgccactttttcagaggtgaattaatggagagcctggtgaaattcaaagctttttgatgtataaaacttgataaatggaactattccatcaataggcgaagtataacaacctgtctacatagatagtatgtaatttctgcacaggtctctgtttagttaatacatcactgtatatcaatctagaatcttgctccaataaaggaacataaagttgtgttttggttttgtttttgtttgaaacggagtcttgctgtgtcgcccagagtgcagtggtgcaattttggctcactgcaacctcggcctcctggattcaagggattctcctgccttggcctcccaagtagctgggattacaggtgtgtgccaccacgcctggctaatttttgtatttttaatagagccagggtttcaccacgttgaccaggctcgtctcgaactcctgacctcaagtgatccatccgcctcagcctcccaaagttctgggattacagacgtgagtcattgggccttgccaaggtttttgggttttttttggaaaaaaaaaaaaaagtagtacacattcttagtgcagatgggcttggccagtaccacatgatggtgaagcagacgtgagacaacagggagaggcagggacagtgtgggctggagaccctgggcccccctactctatcctagtccattattatagccagatcttccactcggtcagatgatgatggaaatctggattttgtgtgaaatctctcagtttattgttgacaagtcaatttgaattttagaaacgtgatgtaggtcaactcttgagttggatggttctccgagctgccagtttacaactccgattctagcaaaagagacagcctctgccattttcagtacagctacaggaagatccttcagtggactagcttgtgacctgcttatctcctttttgtgcctcttgctcttcccacttcagcccaaactaagcacatgagctgtagccatcacagaagtaattctgacatccaacctaatgtactgtgatttcacctagcaagcttgagtgaatttgccaggtcttgcagagtggagcctacccgatgtctcgcctgatgccccttgctaggattcctttctttcagctggccgaatctttacacacatcgtacatcagctagttttaactccatgaagccttaaaaagaactagtgctcacaggtctaaaccttaagcacgtgcctgttccctgtactctggtaactcctgatacatttttatttgtatatccccgtgttcctactttcatatgtgactatgggaattagctaatttggaaggaattagcagttatctgctcataattagggtactacatccatttatccccacattccccagtaatttcagcttgtctgactttttttctaattggattagtctcattttgtttatgagtagatactttattgattttggatttttcagtttgcatggatcctcaggttctctgttattcctctacctttaaaccacgcatcagagctgtggaacagattgaggaagggcaaatggggtcaggccatttcatgagaaagagccaggagatacagaatggaggtgggaggaaggaatgaattaatatatacttctctagaatttcataccaggaatatacagaatgggaaagaattggggagctgagaggagtaaatcctaagaataaatgttgatttagtgactcataaacttgttttggccaactagaatctaacaactactgaacagttgtgttagccacagtcctgagcactttgtttattagcttatttaaactttacaacaaccccataaagtaggcattattgttattctgatactcttttaaaattgtaaccaacttctgtgcctaaaatcttaactcttatgccaatagctttcaaactttattgaccacatcttatagtgagaaatatatttaacattttacatacatagcgacctagagtagatacatagatacatgtaagtgacagaaaacttcataaaatagcatttcctgtgaataatgcactgtaatattttctatttagttttattaaaaaagctgttttgggccaactaaattggtatcagaactcactaatgtgttgtgacttacagtttgaaaaaacacagcattgagccatagtgcttaccatctgtattttatatagacacaagatgactttcctcatgtgtgcaaaggcaagatggggcatgagacaaagtacaaaccaaaccaagacacatgctcagatttacagacctttttgttaaatgttaaccagtgtaaaaatactgtaattcctttggggatttaaaggaatctgcctgtacaagagtagttacaaattaggaaatgacctcaaatactaatgttgctttgaaaaagagtcatggaaactcagggttggagagacttaaacattccatccagtcacccatgtgatgccttaatcatctctattttgcattcaatctgtgcttgagatactaccagttgagtgtggcttccctttcagaataatccattccatctttttgcctggcgggagggagcaagttcttttcaagattgagctgaaatttgcctcccagtaacttcattctcttcatcttcatcccatcccttgtatcacccttggagatgtttgaagaaaattctggagttctagctttgcagaatggagtccagtagggtgctcagcagccgtcacagatgcttcagcctcttggtaacccatgttatgctcatttccctggaacaggacctaatgcactgcacagcatttgcaacggcagatgagtatcatctgggaaatctgtctcaagatctggcctcccacggatatgttgaagtaacaagcttgcctagaggtacttcttcttgaacctggggccaagtatgttaaaatgtattggataattttcctatgatactatcttaagtatgtatttgtttgcaattcattttcttttgaaaggattgtatcataaaagtggatgttgaatctctttataaagatgacaaagttaagaattaaaatgtatttacagagaactcattaaaatcagtatgatttattaagattatttataggatcattattacttgaggtggtcagaggtcatactacttcatttctagcacattaagaagttattttagtttgtgtgtgtctgtgtgtgttttgtgttttttttttttttgttttttgggatggagtttcactcttgttgcccaggctggagtgcaatggcgcgatctcagctcactacaacttccgcctcccaggttcaagcgattttcctgcctcagcctccggagtagctaggattacaggcatgcgccaccacacctggctaatttttgtatttttagtagagatggtgtttctccatgttggtcaggctggcctcgaactcccaacctcatctaatcctcccgcctcggcctcccaaagtgctgggattacaggtttgagccaccacacccagcccgttattttagtcttatagaagaaccatgaagttgatagacatggggagagcctttaaaaaaaaaatttaccagctcaatctaatactttaaaacaattagttagccgggtgcagtagctcacgcctgtaattgcagcactttgggaggccgaggcgggcagatcacctgaggttgggagtttgagaccaacctgaccaacatagagaaacccctgtctctactaaaaatacaaataataataataataaaacgattagttagaagataaaaatgaaaaagaagaaaattaaaatgaacttaattgaggatttttatggtgaaatcaggaaggattcttgagaaatggcttgctttacattaattaaaaataatttaggccagccatggtggctcaggcctgtaatcccagcactttgggaggctgaggtgggtggatcatttgaggtcaggagttcgagaccagcctggccaacatggtgaaaccccatctctactaaaaatacaaaaattagccaggtatggtggcacgagcctgtagtcccagctacttgggagactgagacacaagaattgcttgaacctggagggtggaggttgcagtgagctgagatcatgccactgcactccaacctgggcgacagagtgagactctgtcttaaaaaataaataaataggccgggcgtgatgcctcatacctgtaatcctgcactctgggagactgagacaggcagatcacctgaggtcaggagtttcagaccagcctgtccaacatggtgaaaccccacctttactaaaaatacaaaaattagctgggcgtggtggtacgtgcctgtaatcccagctactcaggaggctgaggcaggacaatcacttgaacctgggaggtggaggttgcaatgagccaagatcgtgccactgcactccagcctgggtgacagagcgagactctgtctcaaaaataaataagttacttagaacattttgataaacttttacagtgaaactcaggatagctcaatacccagaacatttattaatttacctaagagtagcaaaaataggttgaaagccttcctataacagtggaaattcttaagactcaatcccatagaagatagttgaaatatcattgtgataatccaaacagaccgtttgtgtgattaggtgacaaaaacaagcatagttgacttagaaagacagagctatgtctagagccccttggtatgaaaatttgcctggaggtattgttggctgatgctgaaggctgccagctgtgtggtctgtgcttcacagaattgcaggcttcactgccctgggttgtttcagtcgattttattttgcttttggctgtgtaggcaaactctgtcctatgtaggatgtagtaattaacaatttagaaaaaaaaaaaaaatcacagttttggtctgtgtctgaattgcccatcacccagcctttaccagaaatttctgaagctttgaggatcctaattttatgttaattccgttaagacatacaaccttttgcaaattaatagtatattttttaattgatatattaacattggttgtaatttatattatggaatatatgcttatgataaatatcactatactaatatataaagcaacttcttatgatgaatattggtatattagtatatgttttaacaatacttaggccaggccccgtggctcatgcttgtaatgcactttgggaggccaaggcaggcagatggcttgagctgaggagttcacgaccagcctgggcaacatagtgagacctcatctctacaaaacataaacaaaaacttagccaggtgcggtggcacatgcctgtagtctaagctacttgggaggctgaggtgggtggggcgggggggggtcccttgagttcaggaggttgaggctgcattgagctgagatcatggcactgcgcttcagcctgggagacagagcaagaccctgtctcaaaaaaaacaaacaaacaaaaaaaaaactttttttttaaatagttgcaggtggctgcagtggtagcccctgtagtgattaaccttgaaatcacatatgttttgaagtggtcagtatctttatttctgtgtattttctattgccctactttttatactttaaaattcagcaggagtagtagtttgggaatgttaaaattgcattattaatgaaatggtatttataggaagagaatatattaatacttcttcaaattttatttttaattttgtagaaagaagtttaattcttgacacttagttgtatggaacctaagactttattaattatctggactagtgattattgaatcaaaatgggcatgaatgagctctaatattaatatcacaggttgttgaatgttttataaaagtaattgctgatctttttttggtggtcgtatttgcatttttatatattaaatcctttcagaggccttagtagaaagatggtgattgtgttacagagcactccatggtatataaagaaatgatcttaagtactttattacagtgtttataggtgactcttacaacttgtgttaccttgacatagcttttttgttcgtttattttaaatcacagatgcagcaaatattttggtgatgggtgtggaaaattctgcaaaagaaggtgatcctggaacaatattcttcttcaggtaagacaggaaagaaaccccattaggtgatgatgggtttgggtcaagtaattgtggtctttaaaggtgcaggcatacctttcttaacagtaaatgtgttcaaaatgtatttgtgatttaaatttatcatttaattcttatttaatctaggagagtttgtcacttttaggaattctctggtaaaccctcttataaagtaaagaatatttcaaacaagtgaatgatcttccccggggtgtctttctttgtaaattcggattttcatggactaaatttctggaaagcagccaatttcccattcatctttagtgccccttgtcagactcctgccccagggaaactcccgctacctccctgctgtctcttcttgccattttcttttttttctcccttcccctttggtagctctttaaagttttagcttacctctccagaggttttagactaggagactcacatacacacttattccttttatctaaaggccgactcaatactaaatactccacagtagctgcctgggaatgataacatgatagaaccgtgtgaaataatctcatttatcctcagcacaccgatgaaggtctattttgcacctgaggaaactgagggtcatagggattgagttacccatagtcatgagactaatacgtgacagaacagaaacacatggaccatctgtaggaatccaaagttgagtaaagttcttgtggtcataatccttatagttgatgataagtggaagttcttttttcctttcaatgcctaccttccttttgaccccatctttagagagaatcaagattccaacatttaattcaagtagagtaatagcatccctgttgttccgagtgaggaatttagatttgtgagggactctacatcagcactgtctagcagaaatacagtgcaagcctcggctgggcacggtggcttatgcctgtaatcccagcactttgggaggctgaggcaggcagatcacaaggtcaggagtttgagaccagcctggccaacatggtgaaaccctgtctctactaaaaatacaaaaaattagccaggcacatggtggagggtgcctgtaatcccagctactcaggaggctgaggcaggagattcacttgaatgcgggaggcgatggttgtggtcagctgagatcgtgccattgcactccagcctagtgacagagtgagactctgcctcaaagaaaaaaaaaaaaagaaagaaagaaatataatgcaagcctcatatgtaatgatacattttccagtaaccacattttaaatatttttaaaaagataaaattaattttgaacaacacaaatatgtttcttaacatattaacatgaaattaatttaacaatgtattttattcaacccagcatatctaaaatattatcatttcaacatgtaattaataatgatattttttcacttgtcatactaagtctttgaattttgctgtgtattgtacacttacagcgcatctcagtttgcaccaggcatgtttcaagcactcaatagccacatgtggcctctgagtaccacattgcacagcacagtgcattcctctggttggaggaatatgcagttcaccagacctctcttctgcctggaagggattctctgaactgatactgtggctgtggcttgaaatacctctcaaatccgtatcctgaaaccttatccctgcctattgtaacagcttattgtctccctgcctgcctgctcacccaccaccagtctgtttgtctattgtaagcagggtcattcttcagtggccatttctgaccactacactctcctgcctaaatttccacggactatgaacaaattctctatcactgcataaagttcccttctggattgtcccctgcttgcctctttatcctgcttgcccactgcttgaccacatctgcagccacgcagctactggctgtttattctgagatgctgctctgctccgtcccacctcctctctgagcctgtgtgtcccctctgctatgttgtctcctcttgttttctcatttggctgcctctgctagtcctttagcaaaggggtccctctggtgtacatctcatggtatactctgcatactcttgtagcactgatcacacactattgtaattggtggtctaagtgtcagtcccagtcttttctagattgaggataggaatgaaatcatacttatgtttctatcacaaatactaagcatggacccacacatatactaagtactttagaaatgtttcaagaataacgtggagccattaatatttttacctttcttttatttcctcctttccttcctccagtgcactgaccctgagctatagctcctgtttttatttactacctgaaacagcttcaacacgtcaaacttgagaaatcaaaacaaatgcattcgtagttttagaccctaaataatgttaaagccataatcggattcagagggcctcctgtggtgtcactgtagttctgttccaagcactgtgagcgtggggagcattattccatagaggcctttaaccatctgatgcttaaattaaccaccatctctttattccacaaaaatccaggcatagccctttattccttgcacatagtagagtctgcctaatgagagctaagacaaggtctcaaaaaatttccttattctgatttctgtggatcagaattgaaccaggtatgaaagagtctacatacgtgaagttatatagtattacaataatggctatttgtttggcaaaccatgtgagaaatcataaattttgaggaggtcaggttttatcaagaattttattttagctcttattgtaggaagttcacctaaggaccataatatcaaattagtaagtaccatcatattttgaaaaatcgcatcctgtatacattctagaagttacatggttttatatacgaccctaaagaatgtattccatctgtatcttagttgtttcttttatttttttaaatcagggaaggagctgctgtgttttggaatgtgaaagacaaaactgtaagtgtaaataaaaatgtgaaaatataaaaatttagttttgtgagaatgaattgttaattagcacatactgaaacattagaagggaaattaatagattatgcacaacttatttgctctgcattacatgatacttatcagtttcatcttccaaaatatattgtattttgggttaagatttcctgctttttcctttctctagacacacactaatttgtggagaatcagaaccatcctaactatactgcagacagaagtactgtagactttgcatgttgtactatacaaaatgtatgcagttaattggaagctggttgcattgagtgttcttttaagtcaagttgtctagaacttactactcatgggaaataattttttcaagatccaaatcaagatttgtttaatacaaccattttagaggcaaattggtaatctacattaaagctttatatttaacccagtaattttacacctagaaatttatccaaaggaaataatcataactattcgtgatgatttttgtacaaaaatgttcatcagagcaatatttataatggcaaaaattagaaattaccaaaatacacaataatagtttgttaaatcatccatatactacagatatactatagatccccttagaaatcatgtaaaaaaatatctatttctgggagattgcctatatatataatacagttacattaaaagagcagattatacggccaggcatggtggctcacgcctgtaatcccagcactttgggagaccaaggccggcaggtatcttgaggccaggagttcgagaccagcctggccaacatggtgaaccccatgtctactaaaaatacaaaaattagctgggcgtggtggtgcacacctgtaatcccagctactcgggtagctgaggcacaagaatcgcttaaaccttggaggcagaggttgcagtgagccaaggtcagaccattgcactccagcctgggagacagaggcatactcttgtcttcaaaaaaaaaaaaaagcgggttacaaaatataaccaatataatctcagaactggttaaaaaacatgctttatacaatcccaattttacgaaaaggaaacacacacagtaggtggtcgggaagggaacttagagaaaagaaaatataaatgaccaataaatttaagaaaatacaagttggctatttgaagttgcaaagatgtaaaaggctgataaaccccatttcttaagagtagtttcataaatgttgagattctacatttggaaaaactactttggagagcaggctagcaatattataagtgtgggccaggtgtggtaactcatacctgtaatcgtatcactttgggagtctggggtgggaggatcacttaagctcaggagttccagaccagcctgaacaacacagtgagatcccatctctacaaaaagtttttagaagttagccaggtgtggtagtgtgtacctgtagtcccagctacttgggaggctaaggcagggggatcgctcgaacccaggagtttgaggctgcaatgagctatgattgcatcactgcactccagcctgggtgacaaggtgagaccctgtctgttacatatatacatattgtgtaagtccacatatcttttgatctagcaattcctaaagaagtattcccacaaagccatgaagacctttgcacaagtgtggcacatcgcaacattgtaatggagagtagaaaaaattccccatggaggacacacctaggttggttaaataaattgcagttcgtctgtaaaggaaaatagtgttgaaaatgtcatgtgcataatatgatcctattttacataaaaagcagcataaatatgtacatatatacacataaaaagtctggaaggatatgcaccaagtttaatcatggttgcctctggggattaggatttcagtacagaagagagaaagagatgatcacctcccacacctgtgtggcttaattttttattagtatgttgggctttactttttattttttatttatttatttttttgagatagggtcttgctctgtcacaccggctgacattggctcactgcaaccgccacctcccaggctcaagccagcctctcaggtagctgggactacaggtgtacatcaccacacccagataatttttgtatttttttgtagagacaggattttgccacgttgcccaggctggtcttgaacttttgagctcaaggatccacccgcctctgcctcccaaaatgctgggattattaaagagatttaaagaatacaaattataatattactagtgattttccttgggttgtgggataatgataaccttgattttcttctccattctcatctgtgttttccaaatgtaaaaacaaatgaacatgtcatcctgattactttaatatcacaatggatttgatttgccttttccttaaaaacatgcaacagaaataatgcctgtaagtgtaatgaagactgttataagcattaaaatcataacatacttgaactgagggagtcagttatgatttcagattaatcttccttttcttctagatgaagcatgtgatgaaagttctagaaaaacatgaaattcagccctatgaaatcgcactggtacactgggaaaatgaagaacttaactacataaaaatagagtaagcaacttttcatcaaatttatgaaaggggcacttggaataaattaggtaaagcaatagaggagacaaattattatgcatatggaaactttttttttttttttgagacggagtctcactctgtcgcccaggatggagtgcagtggcacaatctcggctcactgcaacctctgcctcccgggttcaagcaattctcctgcctcagcctcctgagtaagtgggactacaggtgtgcaccaccacgcccagctaattttttgtatttttagtagagacagggtttcaccatgttggccaggatggtctggatctcgacctggtgatccgcccacctcagcctctcaaagtgctgggattacaggcgtgagccactggacctggcctggaaacttacttttaagaaaaaagtggccaggcgtggtagctcacacctgtaatcccagcactttgggaggctgaggcaggtggattacctgaggtcaggagttcaggaccagcctggccaacatggtgaaaccccatctctactaaaaaatacaaaaattagctggttatggtggcgggtgcttgtaatcccagctactcgggaggctgagacaggagaattgcttgaacctgggaggcggaggttgcagtgagccgagatcacgccattgcactccagccagggtgacaagagtgaaactccgtctcaaaaaaaaagaggaaaaagattactggtacaaatacaaagtctaaaccatataataaatattagaagataaacataattttttgaacttctcaggctatccacaagttaaaacaagtcagtagtatagccccaaaatggaaatgttaagtttctaatcagcctaatccaataaaatagtatgcatttatcaaatgaacctatcaaattattccagtaaatttttctcttaatccagttttttcctattgattttggggggtgggggtatgaaaaggaagtatagtgaggggtcaatctaagagacccacttgtagaagtgtgggtgctggaagaagtgggacctggtgtaccagtttcactaagataaatgggtaggcaacagactagctgattttcctgactcagccagagggaaaaaatgaagagatgttagggccgagacagaggcagtatgaacaagatggtagtgtctttttcctcatggagttacctgtctagtgaaatatgagtctttgcaggttcttaagaaaggtagtgttagccagatttggtggctcacacctgtaatctcagcactttgggaggccagggtgggaggatcaactgagtcaggagttcaagacagcttggccaacatggcgaaaccccatctctactaaaaatacaaaaattacccgggcatagtggcgagtgtctgtgatcccagctacttgggaggcggaggcggaggcagagaattgcttgaacctgggaggcagaggttgccatgacctgagatcgcaccactgcactccagcctgtgcaacagagtgagactctgtctcaaaaaaaaaaaaaaagcgttaaaagcagagctttgggaagacttggaagagagacagagactagctatagaaagaccagatggggataagagctgagtaatcagcgctcaccaccaatagggccagtcacggttttctaagtaagtgccttccatgtattatttcatttaatcctggggaaaaccctataattgcagctaactggctttccgatgagatttattgaatcctgtcttgccaaagggcacctgactgtgagtcagcctgagcccagtggtggctgcagtcagaggtaaggatataaacctgagagagacagcaaatgagcagcctgtagttttattatctttagtagttactcagcccttggcctgcagatacagctcctgtgaatcccctttctgtgttctattaggtttacattaaaatggcaaaaaccgcgattacttttgcaccaaccaaatacttccatatccaactactgctagacccttgtgtgtgtgtgtgtgtacgcttatccacacacacacacacacgttactgtacagtctgtgaggagtaaaatcctcagtgcttaggatcccagagtcagttattttgtttcgtcagaaagactgtcctggctgccacctacatggttattatgtgagttctgccatgattccagggatctgctcagctctgtggcatgggcccagtttactcataaagcatcttgtgaccaagcacagtggctcatgcctgtaatcccaacactttgagaggccaaggcgggcagatcacttgaggtcaggagttcaagaccagcctggccaacatggtgaagccctgtctgtactacaaatataaaaattagctggatgtggtggtgcactcctgtaatcccagctactcaggaggctgaggcaggagaatcgctggaacccaggaggcggaggttgcagtgagcgaagatcacgccactacactccagtctgggtgacagagcaagactccgtctcaaaaaaaaagacctcttgtgactgctgtctttgctttccttcctccatctgaggctgtcatagcagatgccgccctccatcaggccccttgtccccctccctttggccgtcacttcttgtctgacatcttttgtgaaggtttaccctgtcttttttccatttgcttgtgatgtttatattcacacattccgctcttcccctgtcccctgtctaggattctccacagtcacatactcatttttcacaacttccttgcctccctccccaaccccatcatgtcagtgtgattttagattacactccatatatagttttatatgcagcattttttcacatagaaatttactgtgaacgttctcctttttattaactatccttccaaaacacacttttaagtttttcttgtgtggagtgactattactgagccaacccctactgaacatttggtttatttcctaattttttactcttaaacactgaccttttttttttttttggagacagagtcttgctcagtctcccaggctggagtgcagtggcgtgatttcggcttactgcaagctccgcctcccgggttcactccattctcctgcctcagcctcccgagtagctgggactacaggcgcccgccaccacacccggctaattttattttgtgttttgagtagagacggggtttcaccatgttagccaggatggtctcaatctcctgacctcgtgatccacctgcctcggcctcccggagtgctggggttacaggcgtgagccaccgtgcccagccaacactgaccatttttttaaaagttttcagctgggcaaggtggctcgcacctgtagtcgcaccactttgggaggccgaggtgggtggatcatttgaggtcaggaattcaagaccagcctggccaacatggtgaaactctatctctattaaaaatacaaaaaaaattagctgggtgtggttacgcatgcctgtaatcccagctactagggaggctgaggcaggagaatcgcttgaacctaggagactgaggttgcagtgagctgagatcgcaccactgcactctagcctgggcggcagagtgagactgtctcaaaaaaaaaaaaaaaagttttcttgtatacaaatttttctttgcatcttagattatttccttaggataaactcctagaaagggaattacctggaccaaaggatatgagaacatttgtaacactcttgatacaaattgtcaaaatgacctccagaaagatgatatggtgtctttttcaaaggaaaagttaaagtgctttttaagatttagaaggtattatctttttgcttttcacaggggacagtcaaaacttcacaggggggaaatcaagttaaattcagagctggatttagatgatgccattctagagaagtttgctttctccaatgctctatgcctttctggtaagttactactgcttatgggatagggtactacagttgtcatttcactgagggaagtttaaatagtcacgattttggtatattttcagaatactcaacaaagccttagcattccttttcctttttttccctccatcagaaaaaatatctagtataaaagatagtactgtgctgaagttactcattccttattaattgtattaataaagcttaacctctccaaaagtattttttagatgatgattatattagcctttgtttttttctcttctctctatgcgattgttattcttagatagtctctaatccagacagagaagcccagccttgtgtgactgggcacaggtcccagtgtagaaaaacatactctagtgttccataggaatgggacccagagtcacagtggctataagtttgttctgaaagatccacatcccgaataaaactatacaagttctttaagaatttcttttgccagcagtctaccttaggtggctgctgcagcgtcctgtccatcccactctgaggggcttcggagatttctgaggtttactcttagtcctgaggagtgaaggggaggccaggaaagtcttagtcgcgccctatctgcagagctacccatggtatcaaggtgtaccctaccctcctcagtttccaagatgtaatactagaaaatcaagagttctactaaatgtagctttggtcttccaatagggcatggaaagcgattcagtttcctctatccactttaattctgtcctttatgataattaactattcttaaattatattttcaaggttttagtactttttcttaaactattactgaaatagtagtgaagatgctgtgcaattatgtattttatatacatgtgaatatgatgataaagaaatgttccattattaatttttttcccagtaaaactggcaatttgggaagcatcactggataaatttattgaatctattcagtcaattcctgaggtaattatatcaattttatgcttattcaaggattgatttttatatgtaaaaaatatgaatttcccaatataacaatatatagctatccatcagtatccatgggagatttgttccaagaccccactggataccagaatctaccagtgtccaaatccctgatataaaatggtatatatttgcatataacctatgcatatcctcatgtatactttcaaccatctctagattacctaaaatacctaatataatgtaaatactatgtaaatagttgttatactgtattatttaggaaataataacaagaaaaaacagtttgtacatgttcggtacagatgcaaccattcttttttctcaaaatactgtcaatttgcagttggttgaatctgcagttgcagaacttatagagggccgattgtttaggagtacaacaacattattacaaacaataagaaaactacagtaaacttaagaactcccagttacatataaaatgacaaattaagaaacttcatattgattactttttactttttaaaacttcaaattgtttcctctgttggtgcagtattttttttttaatattaatataattgaaatggggtctggccatgttgcccaggctggtcttgaactcctgggctcaagcgatcctcctgcctcggcctcccaaagttctagcattacaggccacgagccaccatgcccgtcagttgcagtatttttaatgtaactgaattaaagaaaaaagtgaaatgtttctctctgagaatggaaattatgaccacttttcctgatttaagaaagtgttttgctaaattatgagaaaaatagtggtatgaaaaatacatataaagttatattgaaatttcagtatacattaaaaatcatcatattgtaattaactgtgtctttattgtgaaagagtaatctaattatacttcggaaaggaggccctgcttttctactaagagattaggaatgtatatatcattgaaaatgctgatgagaagggaaatgaaaaaagagaatatacaatttctacctaataaaattatgaaatttcaaggtgagttaagacattaatctgggagacagccatcctaaaaaatatttacataggatccaaattatgccacttcagattttgccctgttgacctaatgcttattagaaagagagatacatggttttttggtttttccgattccctctcaactaggctttaaaagctgggaagaaagtgaaactatctcatgaagaagttatgcagaaaatcggtgaactctttgctctaaggtaaaagttttctctctaaataaaatatttcatatatttaacaatctcaagaaaacattcccatagttctgtggtgaagagcaaacatttacacgtttatgggaactgtagctgttttcatttcattgattataagcagggagaactcttacccattagaagtagttgggctgtgttaagactgtactgaaagaaatcacgcatgtgcaaaagagatcacgattcatctacattaaacccacattaaggagcacagtaggtgttctttgaaggtagaaagacatattcctgaatttggttaatgggaattctctgtaaaaatatatcactgcatcataatgctaaataggcttaattgctacagaaaagtttctttgaatctgagacaccaagatgccactggagagaaaaactgctgccagttaaactatgacaatactttttttatcagaggattaaaattttacacttactgaaatatcttttaatcttagctggatataaattatatcacattccctcttgggcatatatgaaaaggaaagcataagaaaataaattatttaaggcaaagacaagtaagtctcaagtgccacctgtcagacaccattaattttaagatgcctcgagatgttaaaatgggaataactatgtctaaaaactgatgaatcattttaaataagtatctggaaaggttttcagcttttattattcttgtagttgtcccaggatttacggaatgaaacatcccggatgttggtgtttttctcacaggcagcattgtccagtttatcccttctagcatgtggaatgagttaccagagctcactgcaaatgttcacctaagacttgtttttccatattctccttagatgctctgcctggagagaagtgatacagtgtttcattgtctgtgtatctctcatagctcaggacctatagttcagggtaccaacaaaacttaaaaacccatccatcaggagcatcctgcagcatatctgaagcctcaaattctctgagaagtagggtagagagattcttctctcctgttctcttggtcatgcaagcagaaattgatgtagtgaattataatatccaaactgaatagttaggactaaatatacgtaggtttgtgaatagtttctataaaggcttacttttactatcctgtttccttacctgtacaataaaaatgcttatttgttaatataaggaatgtgatacatctgtgaaaataaacatggcagataatattagattaaaaaactaaatctaaatttatatagggtatgatcccatttgtgtaagcaaataaaaatattcatgtttatctttatatgcatacacatgtacatgtgtttgcttgcacacacatgcatgtatgaatacagaaagatctggaagtacacagcaaagtgtctctacaggcctgtccttggggagaataaaggatttaagtagtgtggtagcataagagagcctaccatttttctgaatccttctctaggatattttccttttttttttaatcgtgaacaggtatgtatgtgttactttttttttttttttttttaaacagggtcttgcttgtcacccagactagagtgcagtggcatgatcatagctcaccaaagccttgatctcctgggctcagggattcctcctgcctcaccctcctgggtagctgggaccacaggagtgctccaccacacccagctaattttaaaaataatttgtagagacagggtctcaaacccttgctcaagcaatcctcctccctaggcctcccaaagtgctgggattacaggtgtgagccaccacatcagtttatgtgtactttcataacttagatttttatttagttaaacatctaagtgtaaggccaggcacggtggctcacacctgtaatgccagcactttgggaggctgagacaggtggattgcttgaggctgggagctcgagaccagcctggctaacatgatgaaaccccatctctaccaaaaatacaaaaattagccaggaatggtggtgtgcgcctgtaatcccagcttcttgggaggctgaggcatgagaattggttgaacccaggaggcgaaggttgcagtggagccaggatcatgccactgcactccagcctgggcgacagagcaagattctgtctcaaaaaagaaaaaggctgggcacggtggctcacatctgtaatcccaacactttgggaggccgaggccagtggatcatctgaggtcaggagttcaagaccagcctgaccaacatggagaaaccccatctttactaaaaatacaaaattagccgggcgtggtggcacatgcctgtaatcctagctactcgggaggctgaggcaggagaattgcttgaacccaagaggtggaggttgtggtgagccaagatcgcgccaatacactccagcctgggcaacaagaacaaaactctgtctcagaaaaaaaagtaagcacagacttcttatattaaaatgtagaaattaagagagagagtgtgtatgtttatgcttgcttgtctagtgtttgcataaacactggaaggatacagcggaaactagaagggattactgatagggaaagatacagataagaataagagttaagatttatcaatttttacctgtttatatcttgatctgctcaggaggctgaggcaggaagatcacttgagcccaggagtttgaggctgcggtaagctatgattgtgtcactgcaccccaaactgggtgacatatgaagacattatctctaaaaaaattttttaaataaaaaacaaaaaagtgtggacatattaaattttttttttatttgagatggggtctcactatgttgcctaggctggagtacagtgtcacagtcttggctcactgcagcctctgcctccgaggttcacatgatcctcccacctcagcctcccaagtagctgggactacaggcatacaccaccacacctggctagttcttgtattttttgtagagatagggtttcgctgtgctgtccaggttggtcttgaactcacagactcgagcaatctgcccgccttggccttccaaagtgctgggattacaggcatgaaccaccatgcctggccctaaaatttttaataaaaaaagtttaggctgggaatggtggctcacacctgtaatcccagcactttgggaggctgaggtaggcagatcacgtgaggtcaggagttcgagaccagcctggccaacttggtaaaaccctttactaaaaatacaaaaaattagccaggtgtgatggtaggcacctgtaatcccagctacttgggaggctgaggcaggagaattgcttaaatctgggaggcagaggttgcagtgagctgagatcatgccattgtactccagcctgggtgacaagagtgactctgtctcaaaaaaaaaaaaaaaattgaaaacaaaatgagtttttttctgtgtacttcataaataatgttggtattaaagattgaattaatttggttcagaagtttgaaactcatttgtaaattttatttacatgtttgttggcagtattttgcaaaggtcagcattaacaaatgttttcagccacatgcaatgccacatgcctgtagttccagctacatgggaggctgaggcaggagaacagcttgagcccaggagttcagtttgcagtgagttgtgatcacaccactgcactccatcccgggtaacatagcaagaccctctctcttaccaaaaaaaaaaaagttttcataaagcactatgtaaatattaaatacaatagaaacaatgatttttaattcaagataaataaaaagttataattttcctttttaaaggcaccgtataaacttgagttcagacttcctgattactcctgatttctactgggacagagaaaacctggaaggactttacgataaaacgtgtcaattccttagcattggccgaagagttaaggtacgtattttgcacttctaatgagagaaaaagacacgttgtcgcctataagttgaatatgtttaactgcttgcagagaaatatcttgtttgacttccattcaaatctctttatatttccccttcttgtcctctgtacagtcacttcaattttttgtgtcaaaggatcttctgatattagctctacagactagataaggttggtgaataagatgagagtttggaagcctaatggtccatcagtaagttcttgtcaagtttcaagcaagagttcatgactgcttctgatctgtcatggtgacagtgagaatagaaataaatttaagaaagaatcatgtaagacaaatcaagtgatgggtaataagaggccatggagaagaaagaataaaggatgactgatgtttgcctggaggtgacaagtagaaaggtggaaaaacaataatgagaggtcagagaggggaggtgacagactaaatctaagatatgctgagattagagtagcaacaagatatccaattagctccgtcatgcaggcatttagaagggcagaagcaaagtcgggaaaagagacgtgtattaagaaatcccagcactttgggaggctgaggcggatggatcacctgaggttgggagtttgagaccagcctggccaacatggcgaaaccctgtctctactaaaaatacaaaaattagccaggcatggtggcattctcctatagtccgagctactcgagaggctgaggcaggagaatcacttgaacccaggaggtggaggttgcagtgagccaaggtcgagccagtgcactccagcctggatgacagagtgagactccgtctcaaaaaaaaaaaaaaaaaaaaagctgtagtgatggaggtagaccacatggggaaagagcatagaaaacagaaaattgacattagtacaatgtgtgcacatagttctgtgacattttgccacatctatagatccatgcaaccacatgatcaagacacaaaactgtgccaggtgcggtggctcatgcctgtaaccccagcactttgtgaggctagaggtgggcagatcacttgaggtcaagagttcgagacctgcctggccaatatggtaaaacgctgtctctactaaaaatacaaaaattagctgggtgtggtggcgcgtgcctgtagtcccagctactcgggaggctgaggcagcagaatcgcttgaacccaggaagtggaggttgcagtgagctgaggtcatgccattgcactccagcctgggcgttgcagcgagactccatctcaaaaaaaacaaaacaaaaagacacaaaactgttttatcacttttcctcatgctaccctgtatagtcacactgccctccccctacccggactgtccctaacccctggcagtgagtaatctcttctccatctccataattttgtcattttgaggatgttatatagatagtcatacagtatgtgactttttttttttttttttttttgagacggagtcttgctctgttgcccaggctggagtgcagtggctcaatcttggctcattgcaagctctgcctcccgggttcacgccattctcctgcctcagcctcctgagtaggtgggactacaggcacccgccaccaagcccagctaatttttttttgtatttttagtagagatggggtttcactgtgtttagccaggatggtctcgatctgtatgtgactttttaactggcttttttcacagagcataatgccctcaacttggatccatccaaattgttgcttgtatcaaagttcctgtcttcctgtggttactgaaacaattttttggtatttcattttgatgttactttttaatatatctcgttgcatagatatttagtagttgctctggttattacatcttacgtatataacttattacaatctactgatttcaacatcttgcagattaaatgaagtatagaatctttatttccctaatggatgattggatgcagaaaaaaaaaaagaattcttatttcttttatattcctttacccttccgtatttataattttcttaactattcttctgcagacatagaaaacttcatcagataatgttataatttttgcttcaaccatcaaacataatttagaaaactaagaaaagcaaagtctgttgtatgtgcccatgtttttattctttctgttcttttctccttctgatcttctaagatttcttttactgtttttttttttcaagaactttatttagccattcttttaaggtaagtctagtgagacaaattctcttagtttgtcttcatctgagagtgtattaattttctcttcattcttgcaggatattttcctagaaataggattctaggtagacagttttctttctttcagcacctgaaaaatgccatgccacttccttctgacctccatggtttctgacggaaatctgccataattctatgacatctacattttatcttttattatcatttcacaaggtctttgaggctctgttcacttcttttccagtatattttgtctctgttaagattgggtaatgtcctttgtttcatcttctagttgattgattccttcctctgttacattcgttctgctgcccaacattgagtttatttcatttattatatttttcagttctaaaatttccatgtttttttatttgtatcttctgtttctttgcagagacttcctgctttttcgtttgtttcaaatgtgttcagaattgcttgttgaatcatttttatgatggttgctctaacatcatctaataatacctaacctcagatacctcttgatattagtgtctactgattgtcttttctgattccctccaactaattttaatacctccagtttccctcattgcctcaagtgttctggcttgatatacaaggtccttcctattgtttctgtttttcaatcatatttcctaccaatccccacattcaccttgtatcacatcaaaaataagtgattagcctgggaaacacaatgagacctcatttctactaaccttttttttaaaaaaattagccaggtataatggcatgtgcctgtagtctcagctaccctgggaggttgaggcaggaggattgctttagcccaggagtttgaggctgcagtgagccatgatcacgccactacatcccagtctaggtgacagagtgagaccctgtctcaaaaaaataaaaataaaaaatacatgatttataatttcaaaaacctaccatggcttattgaatgctatgttccactttagtgtctacatttttttcctctaagctagacaccgccccttgcaaaaccacatcaaagctatctgcagttgtcactgatcttggcaccacctattcctctgtaggtgtcttccagcacaggacagtagagatcatcaccactcggcaagaaaaccaagctatgttgcttttagctgacacagaaagattgattagtgatggtttaggaatcaaattcagtggactccatcaacacagttttagataacagaggtgtaattagacaccgatttgacagtccaactgtctggtcaaacatgaaaagcactggactttcctggttgtcgactgtgcacacaggctgaagatccagaggaggaaagggagggatactaaaagctttatacagttgaggtatttcctgtggttgtgttagctattgctgtgtaacaaattaccccaaaacttggtggactgaaacaccacttactggctgggcacggtggctcacgcctgttaccccagcactttggtaggccaaggcaggcaggtcacatgaggccaggagttcaagaccagcctggccaacatggtgaaaccccataaattagtcgggcatggtggcatgcacctgtagtcccaagtagctgactctggaggctgaggcatgagaatcacttgaacccaggaggcagaggttggactgagctgagactgcaccactgcactccagcctgggtgacagagtgagactgtctcaaaaaataaaaagaaaaaagaaacaccacttactatttaagtttttgtgggtcaggaatcagtgcagcttagctgggtcctctgattctgtgtttctcacaaggctgcagtcatctcagagattcacttcctagttcactcgtggttattggctggatttggttcctctcaggctattagattgaggcctcagttcctcataagctgatgtccagaagcttctccatagagcatctcacaacatggcagtgtgcttcatcagatgaacaagtaggggagtgatatggtttagatctgtatccctgcccaaatcttgtgtcgaatggtaatgcccgtgttggaggtgggtcctggtgggggggtgactggatcatcagggtagatttctcatgagtggtttggcaccatccccttggtgctgttcttgtgacagtgagttctcgtgaggttgtttaaaagtgtgtagcacctgcatctccccttgttcgctcttcttcgcttctgccatgtaaggtacctgctctcccttcaccttccactatgattgtaagtttctggaggcttccccagaagccaagcacatgccagcatcatgcttcctgtagaacagtgcagaaccatgagccaattaggcctcttttctttataaattaccccgtctcaggtatttctttatagcagtgagagactggactaatacagagagcaagagagactgtcaggaagagaatgctagtaaaacagaagtcacagtcttttgcaacctaatcacagaagtgatttttgctgtgctctctttgttaaaaacaagttagggccaggcacagtggctcatgcttataatcctagccctttgggaggctgagatgggagggtcacttgaggccaggagttcaagaccagcctggtcaacatagtgatacccccgcccatctctttaaaaaaaaaaaaaaattaaaaagcaagttatggccagtcgtggtggctcacacctgtaatcccagcacttcgggaggccgaggtgagtggatcacctgaggtcaggagttcaaggccagcgtggctaacatggtgaaaccctgtctctactaaaaatacaaaaattagctgggcatggtggtggacgcctgtaatcccagtcacttgggaggctgaggcaggaaaatcgcttgaacctaaggggggcagaggttgcagtgagccaagatcagcctggatgaaacagcaaaacttcgtctcaagaaaaaaaaaggcaagttattagactgagcctacgctcgagggtaggggatgacacaaaagtgaacaccaggaggtggggagtctttgggtggcatcttagaaatctgcctaccacattggttttgaaaaagatggagaaaattctggaaacctactttatgacccctgacctacacgatcctcatactaccagttactttaatggttgccagcttcaggccatcaaagttggtggaaccattactgatctcattgtgttctgaattgtcagcaagccaaatgccgctggtctcagcttagacgagaacgttaatgccaaatttaatgatctgatcttttacctgggtggcattttttatctgtccatcctcagtattcaagatggaattactgaagtcaagtctgcaactgaggatacccacctgagtgaagagtaccttgacaactaagtggtcagctgtttcatggctgagatcaactgcagttatagaaaggacacccgttgagaacaagcaggctgcccaagccccttctgcctctactgaatgtgctcttcattctggtatcgaggccaatttgagattgagtccctccatgaaggggttcacatctatacctctgtgcacatgagcagctggaagaatcaaaagccaccccagtccctggcaccctacacctgtggagaaagccataagcaatgtcacccagacatatcaccagtccttcacgggtggctctatttatatccccaagatttaaaatctcttatagggccgggcatggtggctcacacctgtaatcccagcactttgggaggccaaggtgggaggatcgcttgaggccaggagttcaagaccagcctggccaacatggtgaaacctgtctctactaaaaatacaaaaattagccgggcctggtggtgcatgcctgtgatcccaggtacttgaggggctgaggcactagaatcacttgaacttgggaggcaaaggttccgatgagctgagattgcaccactgcactccagcctgggtgacagagtgagacttatctccaaaaaaataattaataaataagataaagtctcctacaggaagaactagaactgaatttatttacaggcagtatgatcttgtatgtagaagacctggaagaatctacaaagaagctaccagaataagtgagtttatcaaggtctcaagatcaatgtataaaaacggttatctttcgttatactgcaaatacacaattggaaaatgaaattttaaaacttctgtttatagtagcacccaaaacttgaattactcaggtttgaattgagtgattcaactattccagaataatattaattaatcaattggagtaatctgagcaagtaattgttctttatttcattccccagtctcactgtgggacatcttttttggtgttaagtcttctgcatgagttatgaagcatacctaaaaggtctcaaactacctttctcagagttttttctcagcatcccgaaggcagttcagactcgttggattatgtcaaggttatttagaaggggttgagagttcaccctgccttaggctcagcatagtgctggcattatacataatacaaaagaaaagtaagaattggtcctgcccttcagccagctttacagtcttctaagaaaacagatggaacaggccgggtgcggtggctcatgcctgtaatcccagcattttgggaggccaaggagggcggatcacaaggtcaggagatccagaccatcctggctaacatggtgagaccccgtctctactaaaaatacaaaaaaattagctgggcgtggtggcgggcgtctgtagtcccagctactcgggaggctgaggcaggagaatggcgtgaacccgggagggagagcttgcagtgagcggagattgtgccactgcagtccagcctgggtgacagagcaagactccgcctcaaaaaaaaaaaaaaatggaacaaagagtagcggggttttttattccccctcaaaaagtagaagaaagggtcttgagaaaataggggtgagtaggcataagacatgctaaaaagttgagtacagaggtccagatgcagagagcagttacacagtgtcatgggacagaaactagttggcagtggatccctcgctccattttctcacgtcagtatcccctgaagtcctgtcgctgaggcttctgtccccatgccaccttctccgtgaacacttgtttgttgtcgtgacttctaatcccaccttctcctggggattttcaaatgtctctctcatcccagtctcttgtctgccttccagacttttccagttgcccctcaatctcacagatcttcctcatttacatatctcgtcgcatccttttaaaaattgtgtgtaccattttccactagaatgtaagccccatgagatcggagaccatgattattttcttgcctgttcttggcaaaggcctcacatacagtatgtccgcaagaaatatttgtagaattagtcaatgattaaaatttcaaaatgaaacttttgaaattcccccccaccccagaaaatggtaaaccttttcagttctctatttcagctcatgggaggaccttctagcctcacctatctagtcattcaaccagaaacttaaaagtcatctgggtgtcctttttctccttcaccttccatatccagtcaaacaatctttttagttccctctaagtatcatggattcattagcaaacatttattgaaagcctgtatgataggccctaggctggtgaaacaggggaataccatactgacccgtcttcaagcccccaactattaatgttcatccacacagcccctcatcttcctttcccacctggacttgtctgattccttcttgactctctcagtctccagactggaccttttcccagtctctctgcaccctttggctgcaagacagacacatgtctatttcaccattctgtctcctctgcccagcgtagtacagtaaatgttaaaacaagtacttccagactgaacaaaggcctccccattacctgcagaatgaagttcagatattctagcatgacatgctactttcctactgctgcttaacagaaatttgtcatcttactgttctgtaggtcagaagtctggcatggcctaaagttaagatgttgattcctctttggagactgcgagtggaatccatttcctcaccttttccagtgactggaggccacccatattccttgctcatggccccctcctccatctagcaaaggcctgtggaatcctcatattgtatcattctgaactcttctgccccgcatttccacttttaaggacccttgtgattacattgggcttacccagataatctaggattatctcatcttaaggtcagctaattaataactttaatttcttatacaatcttaattctcctttgccatattatattcacaggttccaagaattaggacataaatctctttggggtgggggacatggttctgcctataccatatgtagtacacagtacctctcacaatctggtactaacttctttttttctgagatggagttcaatgccgtggtcttggctcactgcaaccaccgactcctgggttcaagtgattctcctgcctcagcctcccaaatagctgggattacaggtgcctgccaccacacccagctaatttttctatttttagtagagacggggtttcgctatgttggccatgctggtcttaaactgacctcaagtgatccgcctgccttggcctcccaaaatgctgagattacagatgggagccaccgcccccagctgacttaccttcttaacctcacttccaagcactttcttctaggttgtccacaatctagctatgcttgtctgtatgctgtttcctatgcttgacatgctcccttcatcccccaataaccccaccagcatcccaccttttcttcatgtccactgccttttaaagcctaattcacatttcctacctctgtgaagcctctcctggttttttctttgctcccttaatctgcatgctcgacgcgtacatgcctctatacctaaataaatagaaagcatgctgtggtaatagtgacttttttttgtgtgtgtgacggagtctcgctctgtcgcccaggctggagtgcagtggcgcgatcttggctcactgcaagctccacctcccggctgggttcacactattctcctgcctcagcctcctgactggctgggacaacaggggccgccacaacacccggataatttttttgtatttttagtagagatggggttttaccctgttagccaggatggtcttgatctcctgacctcgtgatcctcctgccccagcctcccgaagtgttgtgattataggcaagagccactgcacccggccatagggactcttgcttgcacatttcagtgtgttgtcagatgcttggattgaggttcgaagctaagttgttagacttaataatagactttgggacgtttaggagagttgtggtaatataaactaaaggaataaattggatgatgatgaggtagtggaggaagaaaatgttgcctgttttttggcccaagttgaaagaaaatgcaagaggctgaatcagtagtctgaagagagaagcaagcttaaggatgaacattaaagaccaagatcaagcagccaatagaaacagacattaagaaagggcaagaggaaaggaaaacagggaggggaaaggaagagggaagaggcatgctctacacatctatacagattagaaactacagggtgaccataacgcctggaaataggggcaaatggtggagtgtggttcagtcagttagtcctgtggttctgtgagtaagacagtttttttttggagacaggatctcactttggcacccaggctggagtgcagtggcatgatcttggctcattgcagccttgaccacctgagctcaagcaatcctcccacctcatccctgccaagtagctagaactacaggcacacaccaccatgcctggctaatttttttgtagagacagggtttcactgtgttgcccaggctggtctccaactcctgagctcaagtgcgcctcctgcctcagcctcccaaaatgctaggattacaggcataagccaccgagcccagcctagtaaggcagtttaatgctatgtgcaaaaatcgtaacatggtgcagttaacgcattccaatcaacccctgaacacgtacctgtgattcatctcttaatgttcactgaccaaacctgtaacttcagcatacccatgagacaaactgttttaaaattttgctttcaggatttccagtagcaagtgatatataaagatattaggtaggtatttaacagttatcacatccaggcctggcacggtggctcacgcctgtaatcccagcactttgggaggccgaggcgggcggatcacaaggtcaggagatcgagaccatcctggctaacatcatctctactaaaaatacaaaaattagccgggcgtggtggcgggcacctgtagtcccagctatttgggaggctgaggcaggagaatggcgtgatcccaggaggcagagcttgcagtgagccgagatccgccattacactccggcctgggcgacagagggagactccatcccaaaaaacaacaacaacaacaaaaaaaaaagttgtcacatccaaattttgaattcagggactttattttctttgaacccccacagccagcttgtttggaggcatcggaatgcagaactgttgcagttcagttgaaagcaatgccatctagtggtgtgtgtacagcaggtcaaatgttaagcgtagattttctagtagaaagtaaattatctttaggtcttgctaaaaaacattatgtttcaagtttgcctcttttaactgctaaaaagggcagctactaaaaactaggactcaaaaacctatttttagttcttccatcaaaatcttacaaatagaagagcttcagtatgcaaagtatttcttgcagttaaatttgtacattacaaaatgtctctggacggattcacaagaaactgataatgttggtggctgcctttggggagaggactgaggagcaggatttttcactgtatagctatagaatttttatgtgtatgaccgtattaaattgtttaaatacatgttactgaaatttttcttacataggtcatgaatgaaaaacttcagcactgcatggaactaacagatctaatgcggaatcacctgaatgagaagagggcactccgcttggagtggatgattgtcatcctcattaccatagaggtaagatggaaatgctctgtactatgatcagttaccatcttttcacaaatacaggggctatgctaataagatagtttgagatagaaaattattagcagaaaagaggctgactttgttatcattactaactctatttggaagtttcaaattactatttgcaaatgcattaaaagtaattcttgaaaaggttccactttttaaaatttgagagtagacctcaaggttctgcttttaaagacagcatttggaaaaagttctagctgtaaatttataatgtacagctcaacatcaaatcaagcacccgtacctccaattcataggttgccacgtgagaaagggcaaacatttaccttacttcaggagcatttctcattaatcacaatcttggaagtcattttagtttgtacccataatttgcccgtcatgaaataattctcactttctattctaaggtaatgtttgagctgggacgagtatttttctgatcaagtgataaccaaagtgtcactgcaagagatattcaagttctacaatcaaaaattaaatgttcggcccggcgcggtgcctcatgcctgtaatcccagcactttcggaggccaagaagggtggcttgagatgagatcaggagctcaagacaagcctggccaacatggtgaaaccccatctctactaaaaataccaaaattagccaggtgtgttggcacacgcccgtcatctcagctactcaggaggctgaggcaggagaatctcttgaacttgggaggcggaggttgcagtgagctaagatcacaccactgcactccagccagggcaacagtgagactcagtctcaaaaataaacaataaaataaataaataaatgttcactactgggtgatcatttaataggtgtttttttaatcaagaaattatctttttcagcccagtatatcgtgtgaataaaattatgaagaatcta

SEQ ID NO: 15771 - DNA, 47275 bp, Homo sapiens
gcagtagcgggggtgggcgggagcgcccttccaggagatgggttggctgcagtagtgagaggctgggggtgcggctctttccctgcagtcctgccgaggaagcgtgcgtccctggcgcttccttcttctcttccggcggagaggttagtgtattgccttttctttagcagctcgagtggtccggcttggaggtctgcgccctggctcctggccgcccggaacgtgtacagttacgggttacgccagtgcggctgtgaccctttgcctcttaccgtgatctttggtcagcttagctgggagtaaaaagcactcaattaatgaaccctttttttgagccagtgcaccgcggtaactgtagaaatcgataaaataattttgagtttgaggaattgaacggcatactcccaaagatgagcgccacttagctctcgaatcgtagcctagctgtaatcgattttcttaattggtgtaattgttctctaaaagttgaaatgtgcccgggaactgagtaactgccttgtatttcattttaaaaattcgatcgaatgcctactatgtgctgggcgctattgtcaggagatataataggaaaaaacacaaatccgtatcctcagggagcttccattctggaaggaagacacaaaaatctgccctttcctcttatttttttcctttagctttgtgtctcacgtattttactgatttacctcgttttgtctgtcactcccaatgcaaggttcaaaagattcaaaagataggatttttgtctattttattttcagctgtattgtcagcaactaggacaatacctggcacatgataagaactgagttcgtttgcagtatgaattaataaactaaaaattaaaggtgtgcaagtgatgttaaacaatggagaaatgcaaagtggaggaagataagagaatggatgctggttgtgtttttttttttttttttttttattgatcattcttgggtgtttctcgcagagggggatttggcagggtcataggacaatagtggagggaaggtcagcagataaacaagtgcacaaaggtctctggttttcctaggcagaggaccctgcggccttccgcagtgtttgtgtccctgggtacttgagattagggagtggtgatgactcttaaccagcacgctgccttcaagcatctgtttaacaaagcacatcttgcaccgcccttaatccattcaactctgagtggacacagcacatgtttcagagagcacagggttgggggtaaggtcaccgattagcaggatcccaaggcagaagaatttttcttagtatggaacaaaatgaaaagtctcccatgtctacttctttctacacagacacggcaaccatccgatttctcaatcttttccccccctttcccccctttctattacacaaaaccgccattgtcatcccgtcccgttctcaatgagctgttgagtacacctcccagacggggtggtggccgggcagaggggctcctcacatcccagtaggggcggccgggcagaggcgcccctcacctcccggacggggcggctggccgggcggggggctgacccccccacctccctcccggacggggcggctggccgggcggggggctgaccccccacctccctcccggacggggcggctggccgggcggggggctgacaccccaccttcctcccggacgggggctggcccccccacctccctcccagacggggtggctggccgggcggggggctgacccccacctccctcccggatggggtggctggcctggcgggggctgacccccacctccctcccggatggggtggctgccgggcggagggtctcctcacttctcagatggggcggccgggcagaggcgctcctcacatcccagacggggcggcggggcagaggtgctccccacatctcagacgatgggcggccgggcagagactcccctcacttcctagatgggatggcggccgggaagaggtgctcctcacttcctagatgggatggcggccgggcagagacgctcctcactttccagactgggcagccaggcagaggggctcctcacgtcccagacgatggggggccaggcagaggctgcaatctcggcactttgggaggccaaggcaggcggctgggaggtggaggttgtagcgagcctcgatcacgccactgcactccagcctgtgcaccattgagcactgagtgaaccagactccgtctgcaaacccggcacctcgggaggccgaggctggcagatcactcgcggttaggagctgcagaccagcccggccaacacagcgaaaccccgtctccaccaaaaaagtacgaaaaccagtcaggcgtggcggcatgcgcctgtaatcgcaggcactcggcaggctgaggcaggagaatcaggcagggaggttgcagtgagccgagatggcagcagtacagtccagcttcggctcggcatcagagggagaccgtggggagagggggaccgtggggagagggagaggagggagagggagagggctggttgtgtgtttttaatgtagtggttggggaaggcttcactgggtagaagacattttagcaaacatctgaaggaggtgagggtgtgagcctttcagatccctgggagaagagcgtaaggaacagcaagtgcacagatccagagaccagaatgaggagcaaaataagcaaaggagagtgctgtcaaagtggtgataaaggacagataatgtagtgccatgcaggccattctgaggggtttagcttttttttttttttttcgttacagaatctcactctgtcgcccagactttagtgcagtggcgcgatctcggctcactgcaacctccacctcccgggttcaggcgattctcctgccttggcctcccgagtaactgggattacaggcacccgccgccacgctcagctaatttttttgtatttttagtagagacgaggtttcaccatgttggccaggctggcctcgaacatctgaccttgtgaatcacccgcctcggcctcccaaaatgctggggttacaggcgtgagccaccgcgccaggctttttttttttttttttttttttttttgagacagagtctcgctttgttgctcattctggagtgcagtggcgcaatctccgcctcccagattcaagccattctcgtgcctcagcctcccaagtaactgggattataggcccatgccaccatgcccggctgatttttgtatttttagtagacacggggtttcgccgtgttggccaggctggtctggaactcctgaccccaagtgatccctcccaaagtgctgagattacaggcgtgagccgccatgcctggttggagggctttggcttttattaagtgaaccgtgaagccacagctagatttcgcgttgagattcaacttcaaaggatcactttggttgctgtgttgagaagaaactgtagggggcccaaaacagaatcaggaaaactggttaagaagctattataataatccatgggaaggatagcagtttggatcaggtagtattattactgatgatgagcagtggtccctagaaggcccttgggatttactgagaagttggatatggagaataaagagtcaagctggaccccacgtttttggcttagcagttataaagatacttattactgctcatgaatgggaaagactgggaagaaagggatgcaagggattctaggggtataagggagaggttagaatggtagaccatggagtgtaaactggatatggaggaagtgaagtcatggggagtgagagacagtgaaaaggtggttggatcattgacttgtgggtcctgttggggttgaagaattattggaattgggtaatagaaggagtgagatgcaaagataggaggtggtgcttagagagtaaaatggatgaaactgagatgaggaggtccgatgtattgataatgacaatagggccctgtctgatagaaaaacagtgtaaggcacaaatgtaatcttaggctttctagaaggtgcagtgataaaaatgggctgggtccggtggctcacgcctgtaatcccaacactttaggaggccaaggcaggtggatcacctgaggtcaggatttcaagaccagcctggccaacataatgaaaccccgtctctactaaaaatacaaaaaaattaactaggcatggtggcagacacctgtaatcccagctactcgggaggctgaggcaggagaatcgcttgaaccggggaggcggaggttgcagtgagctgaggtggcaccactgcactccagcctgagtgacagagcgagactcccatctcaaaaaaaaaaaaaaaaaaaagaatttactcaaagagaataaaaagaatccaggactgtagacaaacttctaaaatattttatagtttcttcaaaattaagtggttcaactggcatggcatagtactaattaaaggtgaactacagtagccaattggactagaatgaagcacagaatgcgagcttttgaagggattttggaagcagcaggttctacctcctaaatatcactgtgaatcatctttgtccttatcctgaagagaggtagtaaatacaaggtagtgggtaagagtgttgactttggaattgggaaagcctgggttttattttagttacatctctgcagcttcttaacggtgagcacttagcctctttaaacctcagtttcctaatcagtgaaatgggatcattatgaggtgaagccgagcacttagcatgtagaaagcgctcagagtgatgtcagagtctgtcttgtttcctcctacatatcatcaccaaaaatttgtttcatgaacatgcatttgaccgtgtgactctgagttaaaagctcagctttctccccacctgtagaaactttttaggatgactttatatatcctttggtgatctggccatcggctcttttggtccttacctcctgcagctcactcctacctccccgagatggggagatgaataggactccatgcctggggtgtttaacttgctgatccttctgccctttcaagactcagttcaaatgtcacctctgtgacaatgccacactcttcacatgctcctttctctggactagagcaatttgtgcatctcgttcattttcctctgctagactttgaattctgagatcattgattcatctatctctagcacctaacatattatttttaaaaaaagaattattgattactacggtctaacttttttttttttttgagacagagtctcattctgtcgcccaggctggagtgcagtggggcaatcctggctcactgcaacctctccctccctggtttgaacgattctatatctcagccacctgagtagctgggattaaagccactatgcttggctaatttttttttgtatttttagtagagatggggttttgccatgttggccaggctggttttgaactcctggcctcaagtgatccccccagcctttagcctcccagagtgctgggattacaggcgtgagccaccatgtgtggcctactataggctaactttaaaataacacatttcatactgtaaataagggggaaattctgtttaccttgtctggaatgttcatgtgtgtatctgacatgcctcgcactcccatgcccagccccaagctgaaaagcaccttcgccttctagaatcagcttagatctttctgggaacctttcctgattttttttttttttttcctgagacagaaaaagggctggaatgcagtggtacaatcatgactcactgcagcctcagtcttctgggctcaagtgatcctcccacctcagcctgtgagtagctgggactacaggcatgagctgccatcacacccagctaatttttaaatttttgtcatttttgtagagatgaggtttcaccatgttgcctcagctggtctggaactcttggactcaagcgatccacctgcctcagcctcccagtgtgctgggattacaagtgtgagctacagtgcctggccagcacagatttttatatacttgatatgctaatgaagtaaatgaagtggtcccatcactattttttttaaggttcttgttatgtcagtagctttataatcttgtaatcttccaggaagaaggccaaatgttgctaaaggcaaagtggcagaaacactgtacttatatttttaaccttgttcttttactagaattaacttagaatgtatctgttttacaaatttttctaacagaaatatgcctgctacctagggaaatattatatatgttttaaacattaatttaaaaacttgaactttgaattccttttcttttagcttgggatgtggtaatgccagccacactcctcagagccgtggccagatctcatcatatattatcaaaagcacatcagtgccgaagaatcggtcatctaatgttaaaaccacttaaggaatttgaaaatacaacatgcagcacactgacaatacgtcaaagcttggatttgttccttcctgataaaacagctagtggtttgaataagtctcagatcctggaaatgaaccaaaaaaagtcagataccagcatgctgtctccattaaatgctgctcgttgccaagatgaaaaggcacaccttccaaccatgaaatcctttggtactcacaggagagtgacccacaaaccaaatctgttgggttctaaatggtttataaaaatattaaagaggcatttctcatctgtatcaacggaaacatttgttccaaaacaagacttcccacaggtgaagagaccactaaaagcatccaggaccagacagccatccaggaccaaccttccagttctgtctgtgaacgaggtaaagtaggggtggccgtggctctcgtgcttagtgatcattgctcatgctaaaccagtgtgcgttgcaccccagccttaccgccaacgtaagagaactagcagtcactcagacttcttcatcaaggtctttgaagcctaataaatatccaaagggattcagaatcttaatttttaacaattaatgatacatataaaaacaaaatacaggtgataacacatgaaaatagagtttataaaagatttggttattggtctaaggaaactgaaaaagaggaccaatattaagtccagtctaagaatgggactgtaaaaaaaaataaaataaaaaaaaacaaactagaaattcttcatcaagttaaaaaaaattgtaactctgcagacagataagcctttattaggctgtggcagttgcatggggcggtgaaatgacacggtagggtggactccaaaagcagcaggagaggagggcccagcttttttatcctcttaaggtttaagggggtattttttattcatccttaaggggtttctgggaatttttctgctacaatttgcatttctccttcagtaacaacttaagggtcaagatcaagcccttgataacctttgtatcttgcataatacctagaactgtaccttgtacttaaatgtttataagaggatctttaatgccgatagtcatcaactttaaagatattttaaacttgatgaagacttctgaatctatcagaaaacaggttagaatgtctgtcttcaagtcttgattctgaaaagtagcccctgagcctgtttcattttggctgtgtttttattactgtgcagctgacaccccttggaaaggtatacatacatacctttactcatcctctgattctgaatctagcaatgaatgaatggtttttgtgttggattctggaatgctttcaattcttgtgtggttactctgaactcaggacgtgaaggatgaagtgttgtgcagctactgtttcccctttccttttgctggagctttggggtaacctgggaaattcagtatttaagtgtccgagatggcattaagtgtaaaaacctgaattcatggcagctccaaaaaagagaaagctcaactcactttgttcatttgtaacgtctagcagcacagtgcatcaggtttcttaggaagaagctgataggtcagagatgtccctaggctatttctttgggccatccttagacttggaagcaattttcctaaataccgtatctatttttctttagatttttttttctacttccttccaggaaagaatttgaagtagattttcaacattcaacatagtttcaaatgagataataaatactttcacatattagagcaaatagttgacatgaacagagaaatgttatgaagtacctgaaatgaataatctagttgaacattttgttttgagaagcgcagtaattaaaagaggaactcctcctgggatttagtgtttgttgtttattgttgtgggagagggcagagtaaaaacataaaaatatcttcagagaaataactttttccagcactgaaattaaggagttagttatttcatggattctgttataggagacattatgtaacatgatagacaatgacttcagttggagtttggcaagagcaagtcgcatgctgtctttctgaaagcacagggaaataatagaaaatcagatgtttctggctgggcggtggctcacagctgtaatcccaacactttgggaggcccaggcaggcgattacttgaggtcaggagttcgagaccagcctagccaatatggtgaaaccctgtctctacaaatatacaaaaattagccaggcgtagtggtgcacacctgtaatcccagcggctcgggaggctgaggcaggagaatctcttgaactcgggaggtggaggttgcagtgagctgagatcatgccactgcactccagcctgggtgacagagtgagactctgtctcaaaaaaagagaagaaaatcatgtttctaaagtggtctgagataatgtaattttggaacatcattttttgaagattttacttttcatagagaaagcagtcttggcatgactaggtaatatgtccccaggaccaaagactgactttcctctgcccgaaattgagggccactccatttttatacggccatcatagtggtaaaccctttataccactttataccatcaaaatggtaaaccctttataccattcttgactgagacaaggaaaagactctgctttgtgtcagaaagcatgtggactttattttgttcccatagttgcacccagctcatcttttcagctctgcagaacagcgtgcatctggagttggctgaatgaggtttcagtcaccctgtctgttggaattaaatctttacctggtctcattttcagagatcataatctgagatactcaacccacatccctttggcttacaattcctaaaagcaatagtggatccagtggcttatgcctataatttcagtgctttgggaggctgacacagaaagaccacttgaggccaggagttgaagaccagcctggcaacatagcaagactcccatttctaaaagacttggaaaaaaaaaaaaaaaaaagccgggcttgctggtgcgcagctgtagtcctagctactcaagaggctgaggtgggaggatcgcttgagctccagggttccaggctgcagtgagtcgtgactgcacctcgctccgtccagcctgggcgacagagtgaggccctgtcactaaacaaacaagaaaacaataatagcagtgcttcttgttaatgtccagtctttgaagagaacagcagaggatgggaacggcaggtctgagtggcatggagcccgacaccagggagaatgttttcaggctaatagcactgtgttacagaatcactggtggactgttaaccatttttttgaaaaatgaaatagaatagaaaataacagaatacattgctcatgataaacgtaaatactggtttgtgaagcttttgtggcaattggtgtgtaagcatatatgtgtatatgtactatgtttaatgatttataggttgtagtcagaaaaacttacaggataaagcgtgatcttggtaacgtaaaatgtatctgtgtttttatagctttaatctccaatcagtatgttacaggagaaaaggcatttttccttagtatgatctatctactcacagtacttctgacatcaaatatatggggacctcttcctcctcctaccagccagttctccaattctccagacactaacaaggtgtcctgcaattcagttcaattccagcactagccagagttagtgcagacgccagttagttaagctcagccccacaagactgccctcccagttgacacctgtgcttctgaccaaccagctctatgacaaccatcccctcttcaggtttgattatttgctagaatggcccacagaactcagggaatcattttatttatgtttactgggttttttatataaagtatgcaaatgaacaaccagatgtagaggtgcacagagtgaagtcaagaagggcctggaacttaggagcttctgttcctcatagaactgggctgtgccaccctcctggcacatggatgcattgatcaacccaggagttctccagaccccatcatctgggtgtttttaatggaggtttcattgtgtaagccatgattaatgattaactcaatctccagcccctctccgtccaccagaagttaagggtgaggctgaaagttctaagcttctaatcaaagtttggtctttctggtaaccaccccccatcctgaagctgtccaggacccactgagagtcacctcattaaaacaaaagatgttcccatcactcgtgaaattccaagggatttttagaagctctgtgttagtaactgaaggcaaagagcaaatactacaaccaaaaatgcccctgtcacttagaaaattacaggggtttttaggagtctgtactgggaaccaaggacaaagaccaaatgtaaatgtattatatcactatagaagcaacattgctgtaacacactaattttcttcagtaatacagtgtaaatgaaagtataatttttaaaaaaatgttctgatcagagcatgcgatgctcctaaaacaagaatcatatgtagatttctagccccatctgctggaacatgtcttctttggccagaaaaacaaaacatactaaaatacagtggtttggggtttttgctttttgggttttttaaaacattttgaagtagaaaagccctgaatatcataactattatcggttggtttgacacatctatttaacaggaaggtgtagatccccatcctgaaacccaaaatatgctttacatatatatgtagctaatgcttaataaggattcactgtaaaaatccagaaaaggatgtataaaaatgaaagctgctcagaaaacaacagcatctttaataaagaaaaaaaagcagacaagacattccatgattctctttccttttaccaaataggctaaaataaaaaaagcaaagaaaacaaaaccaaaacaaagtgtctaaaacgtcaagttcatctattaatagaagaaacccacaactaagactcagagctaagaagtttaaggagaatacagaaagtagtgtagcaaaccatataagctgagtgacattggatagaactttgagccaaactaaatgggagatcccaagagaaggaaaggggacagttgacagtctggaaaacctacaacaaagatccttaggatggccaagtgaaaacagattgtgtttaaagatttattcataatttatttggagcttagaatatattttctcataaaaatagtgattgacttgtcctgtccttgagagttgaaaatagtacacattctcaatttgccgttagtgtcggaatattcacataatttgggataccagattgcccaaaactcagttctgaatatattgagccttttatttttatctccaagtggcggtttttaaaactgaccttttaccttgatttaaaataatagtgcctggctgggcatggtggctcacgcctgtaatcccagcacttgaggccgaggtgggcagattaccagaggtcaggagtttgagaccagcctggccaacatgaagaaacaccgtctctactaaaaatacaaaaattagccaggtgtggtggtgcatgcctgtaatcctagctactcgggaggttgaggcgggataatcacttgaatccagggggtagaggttgcagtgagctgagatcgcaccactgccctcacgcctgggcgacagaggaagactccgtctcaaaaaataataaataggccgggtgcggtcactgatgcctgtaatcccagcactgtgggaggccgaggcgggaggatcagatgaggtcgggagtttgaggccagcctgaccaacatggagaaaccccgtctctactaaaaatacaaaaattagctgggcgtggtggcgcatgcctgtgatcccagcaactcgagaggctgcggcaggagaatcgcttgaaccggggaggcagaggttgtgatgagccaagattgcaccattgcactccagcctgggcaacaagagtgaaactgtctcaaaaatataataataataaagtaaaaaacagaataaaataataatgcctgccaccgccattaacagaccttgtactctaatgccaagctgtatatgggacagttgccagcatgtcttcactggcactataaaatatagccaagaagataggctctgagagtaagaagtctgtgttggttaggagtaattttgtcctggctctctggtataaagctctcaaatgtaaatccgggtgggataatggactcagctctgtctgcaacatgccactgtgcagagaagcactctcatgcataagctttttatgctgtaaactatagtagctgaaattaaatgccactttttcagaggtgaattaatggagagcctggtgaaattcaaagctttttgatgtataaaacttgataaatggaactattccatcaataggcgaagtataacaacctgtctacatagatagtatgtaatttctgcacaggtctctgtttagttaatacatcactgtatatcaatctagaatcttgctccaataaaggaacataaagttgtgttttggttttgtttttgtttgaaacggagtcttgctgtgtcgcccagagtgcagtggtgcaattttggctcactgcaacctcggcctcctggattcaagggattctcctgccttggcctcccaagtagctgggattacaggtgtgtgccaccacgcctggctaatttttgtatttttaatagagccagggtttcaccacgttgaccaggctcgtctcgaactcctgacctcaagtgatccatccgcctcagcctcccaaagttctgggattacagacgtgagtcattgggccttgccaaggtttttgggttttttttggaaaaaaaaaaaaaagtagtacacattcttagtgcagatgggcttggccagtaccacatgatggtgaagcagacgtgagacaacagggagaggcagggacagtgtgggctggagaccctgggcccccctactctatcctagtccattattatagccagatcttccactcggtcagatgatgatggaaatctggattttgtgtgaaatctctcagtttattgttgacaagtcaatttgaattttagaaacgtgatgtaggtcaactcttgagttggatggttctccgagctgccagtttacaactccgattctagcaaaagagacagcctctgccattttcagtacagctacaggaagatccttcagtggactagcttgtgacctgcttatctcctttttgtgcctcttgctcttcccacttcagcccaaactaagcacatgagctgtagccatcacagaagtaattctgacatccaacctaatgtactgtgatttcacctagcaagcttgagtgaatttgccaggtcttgcagagtggagcctacccgatgtctcgcctgatgccccttgctaggattcctttctttcagctggccgaatctttacacacatcgtacatcagctagttttaactccatgaagccttaaaaagaactagtgctcacaggtctaaaccttaagcacgtgcctgttccctgtactctggtaactcctgatacatttttatttgtatatccccgtgttcctactttcatatgtgactatgggaattagctaatttggaaggaattagcagttatctgctcataattagggtactacatccatttatccccacattccccagtaatttcagcttgtctgactttttttctaattggattagtctcattttgtttatgagtagatactttattgattttggatttttcagtttgcatggatcctcaggttctctgttattcctctacctttaaaccacgcatcagagctgtggaacagattgaggaagggcaaatggggtcaggccatttcatgagaaagagccaggagatacagaatggaggtgggaggaaggaatgaattaatatatacttctctagaatttcataccaggaatatacagaatgggaaagaattggggagctgagaggagtaaatcctaagaataaatgttgatttagtgactcataaacttgttttggccaactagaatctaacaactactgaacagttgtgttagccacagtcctgagcactttgtttattagcttatttaaactttacaacaaccccataaagtaggcattattgttattctgatactcttttaaaattgtaaccaacttctgtgcctaaaatcttaactcttatgccaatagctttcaaactttattgaccacatcttatagtgagaaatatatttaacattttacatacatagcgacctagagtagatacatagatacatgtaagtgacagaaaacttcataaaatagcatttcctgtgaataatgcactgtaatattttctatttagttttattaaaaaagctgttttgggccaactaaattggtatcagaactcactaatgtgttgtgacttacagtttgaaaaaacacagcattgagccatagtgcttaccatctgtattttatatagacacaagatgactttcctcatgtgtgcaaaggcaagatggggcatgagacaaagtacaaaccaaaccaagacacatgctcagatttacagacctttttgttaaatgttaaccagtgtaaaaatactgtaattcctttggggatttaaaggaatctgcctgtacaagagtagttacaaattaggaaatgacctcaaatactaatgttgctttgaaaaagagtcatggaaactcagggttggagagacttaaacattccatccagtcacccatgtgatgccttaatcatctctattttgcattcaatctgtgcttgagatactaccagttgagtgtggcttccctttcagaataatccattccatctttttgcctggcgggagggagcaagttcttttcaagattgagctgaaatttgcctcccagtaacttcattctcttcatcttcatcccatcccttgtatcacccttggagatgtttgaagaaaattctggagttctagctttgcagaatggagtccagtagggtgctcagcagccgtcacagatgcttcagcctcttggtaacccatgttatgctcatttccctggaacaggacctaatgcactgcacagcatttgcaacggcagatgagtatcatctgggaaatctgtctcaagatctggcctcccacggatatgttgaagtaacaagcttgcctagaggtacttcttcttgaacctggggccaagtatgttaaaatgtattggataattttcctatgatactatcttaagtatgtatttgtttgcaattcattttcttttgaaaggattgtatcataaaagtggatgttgaatctctttataaagatgacaaagttaagaattaaaatgtatttacagagaactcattaaaatcagtatgatttattaagattatttataggatcattattacttgaggtggtcagaggtcatactacttcatttctagcacattaagaagttattttagtttgtgtgtgtctgtgtgtgttttgtgttttttttttttttgttttttgggatggagtttcactcttgttgcccaggctggagtgcaatggcgcgatctcagctcactacaacttccgcctcccaggttcaagcgattttcctgcctcagcctccggagtagctaggattacaggcatgcgccaccacacctggctaatttttgtatttttagtagagatggtgtttctccatgttggtcaggctggcctcgaactcccaacctcatctaatcctcccgcctcggcctcccaaagtgctgggattacaggtttgagccaccacacccagcccgttattttagtcttatagaagaaccatgaagttgatagacatggggagagcctttaaaaaaaaaatttaccagctcaatctaatactttaaaacaattagttagccgggtgcagtagctcacgcctgtaattgcagcactttgggaggccgaggcgggcagatcacctgaggttgggagtttgagaccaacctgaccaacatagagaaacccctgtctctactaaaaatacaaataataataataataaaacgattagttagaagataaaaatgaaaaagaagaaaattaaaatgaacttaattgaggatttttatggtgaaatcaggaaggattcttgagaaatggcttgctttacattaattaaaaataatttaggccagccatggtggctcaggcctgtaatcccagcactttgggaggctgaggtgggtggatcatttgaggtcaggagttcgagaccagcctggccaacatggtgaaaccccatctctactaaaaatacaaaaattagccaggtatggtggcacgagcctgtagtcccagctacttgggagactgagacacaagaattgcttgaacctggagggtggaggttgcagtgagctgagatcatgccactgcactccaacctgggcgacagagtgagactctgtcttaaaaaataaataaataggccgggcgtgatgcctcatacctgtaatcctgcactctgggagactgagacaggcagatcacctgaggtcaggagtttcagaccagcctgtccaacatggtgaaaccccacctttactaaaaatacaaaaattagctgggcgtggtggtacgtgcctgtaatcccagctactcaggaggctgaggcaggacaatcacttgaacctgggaggtggaggttgcaatgagccaagatcgtgccactgcactccagcctgggtgacagagcgagactctgtctcaaaaataaataagttacttagaacattttgataaacttttacagtgaaactcaggatagctcaatacccagaacatttattaatttacctaagagtagcaaaaataggttgaaagccttcctataacagtggaaattcttaagactcaatcccatagaagatagttgaaatatcattgtgataatccaaacagaccgtttgtgtgattaggtgacaaaaacaagcatagttgacttagaaagacagagctatgtctagagccccttggtatgaaaatttgcctggaggtattgttggctgatgctgaaggctgccagctgtgtggtctgtgcttcacagaattgcaggcttcactgccctgggttgtttcagtcgattttattttgcttttggctgtgtaggcaaactctgtcctatgtaggatgtagtaattaacaatttagaaaaaaaaaaaaaatcacagttttggtctgtgtctgaattgcccatcacccagcctttaccagaaatttctgaagctttgaggatcctaattttatgttaattccgttaagacatacaaccttttgcaaattaatagtatattttttaattgatatattaacattggttgtaatttatattatggaatatatgcttatgataaatatcactatactaatatataaagcaacttcttatgatgaatattggtatattagtatatgttttaacaatacttaggccaggccccgtggctcatgcttgtaatgcactttgggaggccaaggcaggcagatggcttgagctgaggagttcacgaccagcctgggcaacatagtgagacctcatctctacaaaacataaacaaaaacttagccaggtgcggtggcacatgcctgtagtctaagctacttgggaggctgaggtgggtggggcgggggggggtcccttgagttcaggaggttgaggctgcattgagctgagatcatggcactgcgcttcagcctgggagacagagcaagaccctgtctcaaaaaaaacaaacaaacaaaaaaaaaactttttttttaaatagttgcaggtggctgcagtggtagcccctgtagtgattaaccttgaaatcacatatgttttgaagtggtcagtatctttatttctgtgtattttctattgccctactttttatactttaaaattcagcaggagtagtagtttgggaatgttaaaattgcattattaatgaaatggtatttataggaagagaatatattaatacttcttcaaattttatttttaattttgtagaaagaagtttaattcttgacacttagttgtatggaacctaagactttattaattatctggactagtgattattgaatcaaaatgggcatgaatgagctctaatattaatatcacaggttgttgaatgttttataaaagtaattgctgatctttttttggtggtcgtatttgcatttttatatattaaatcctttcagaggccttagtagaaagatggtgattgtgttacagagcactccatggtatataaagaaatgatcttaagtactttattacagtgtttataggtgactcttacaacttgtgttaccttgacatagcttttttgttcgtttattttaaatcacagatgcagcaaatattttggtgatgggtgtggaaaattctgcaaaagaaggtgatcctggaacaatattcttcttcaggtaagacaggaaagaaaccccattaggtgatgatgggtttgggtcaagtaattgtggtctttaaaggtgcaggcatacctttcttaacagtaaatgtgttcaaaatgtatttgtgatttaaatttatcatttaattcttatttaatctaggagagtttgtcacttttaggaattctctggtaaaccctcttataaagtaaagaatatttcaaacaagtgaatgatcttccccggggtgtctttctttgtaaattcggattttcatggactaaatttctggaaagcagccaatttcccattcatctttagtgccccttgtcagactcctgccccagggaaactcccgctacctccctgctgtctcttcttgccattttcttttttttctcccttcccctttggtagctctttaaagttttagcttacctctccagaggttttagactaggagactcacatacacacttattccttttatctaaaggccgactcaatactaaatactccacagtagctgcctgggaatgataacatgatagaaccgtgtgaaataatctcatttatcctcagcacaccgatgaaggtctattttgcacctgaggaaactgagggtcatagggattgagttacccatagtcatgagactaatacgtgacagaacagaaacacatggaccatctgtaggaatccaaagttgagtaaagttcttgtggtcataatccttatagttgatgataagtggaagttcttttttcctttcaatgcctaccttccttttgaccccatctttagagagaatcaagattccaacatttaattcaagtagagtaatagcatccctgttgttccgagtgaggaatttagatttgtgagggactctacatcagcactgtctagcagaaatacagtgcaagcctcggctgggcacggtggcttatgcctgtaatcccagcactttgggaggctgaggcaggcagatcacaaggtcaggagtttgagaccagcctggccaacatggtgaaaccctgtctctactaaaaatacaaaaaattagccaggcacatggtggagggtgcctgtaatcccagctactcaggaggctgaggcaggagattcacttgaatgcgggaggcgatggttgtggtcagctgagatcgtgccattgcactccagcctagtgacagagtgagactctgcctcaaagaaaaaaaaaaaaagaaagaaagaaatataatgcaagcctcatatgtaatgatacattttccagtaaccacattttaaatatttttaaaaagataaaattaattttgaacaacacaaatatgtttcttaacatattaacatgaaattaatttaacaatgtattttattcaacccagcatatctaaaatattatcatttcaacatgtaattaataatgatattttttcacttgtcatactaagtctttgaattttgctgtgtattgtacacttacagcgcatctcagtttgcaccaggcatgtttcaagcactcaatagccacatgtggcctctgagtaccacattgcacagcacagtgcattcctctggttggaggaatatgcagttcaccagacctctcttctgcctggaagggattctctgaactgatactgtggctgtggcttgaaatacctctcaaatccgtatcctgaaaccttatccctgcctattgtaacagcttattgtctccctgcctgcctgctcacccaccaccagtctgtttgtctattgtaagcagggtcattcttcagtggccatttctgaccactacactctcctgcctaaatttccacggactatgaacaaattctctatcactgcataaagttcccttctggattgtcccctgcttgcctctttatcctgcttgcccactgcttgaccacatctgcagccacgcagctactggctgtttattctgagatgctgctctgctccgtcccacctcctctctgagcctgtgtgtcccctctgctatgttgtctcctcttgttttctcatttggctgcctctgctagtcctttagcaaaggggtccctctggtgtacatctcatggtatactctgcatactcttgtagcactgatcacacactattgtaattggtggtctaagtgtcagtcccagtcttttctagattgaggataggaatgaaatcatacttatgtttctatcacaaatactaagcatggacccacacatatactaagtactttagaaatgtttcaagaataacgtggagccattaatatttttacctttcttttatttcctcctttccttcctccagtgcactgaccctgagctatagctcctgtttttatttactacctgaaacagcttcaacacgtcaaacttgagaaatcaaaacaaatgcattcgtagttttagaccctaaataatgttaaagccataatcggattcagagggcctcctgtggtgtcactgtagttctgttccaagcactgtgagcgtggggagcattattccatagaggcctttaaccatctgatgcttaaattaaccaccatctctttattccacaaaaatccaggcatagccctttattccttgcacatagtagagtctgcctaatgagagctaagacaaggtctcaaaaaatttccttattctgatttctgtggatcagaattgaaccaggtatgaaagagtctacatacgtgaagttatatagtattacaataatggctatttgtttggcaaaccatgtgagaaatcataaattttgaggaggtcaggttttatcaagaattttattttagctcttattgtaggaagttcacctaaggaccataatatcaaattagtaagtaccatcatattttgaaaaatcgcatcctgtatacattctagaagttacatggttttatatacgaccctaaagaatgtattccatctgtatcttagttgtttcttttatttttttaaatcagggaaggagctgctgtgttttggaatgtgaaagacaaaactgtaagtgtaaataaaaatgtgaaaatataaaaatttagttttgtgagaatgaattgttaattagcacatactgaaacattagaagggaaattaatagattatgcacaacttatttgctctgcattacatgatacttatcagtttcatcttccaaaatatattgtattttgggttaagatttcctgctttttcctttctctagacacacactaatttgtggagaatcagaaccatcctaactatactgcagacagaagtactgtagactttgcatgttgtactatacaaaatgtatgcagttaattggaagctggttgcattgagtgttcttttaagtcaagttgtctagaacttactactcatgggaaataattttttcaagatccaaatcaagatttgtttaatacaaccattttagaggcaaattggtaatctacattaaagctttatatttaacccagtaattttacacctagaaatttatccaaaggaaataatcataactattcgtgatgatttttgtacaaaaatgttcatcagagcaatatttataatggcaaaaattagaaattaccaaaatacacaataatagtttgttaaatcatccatatactacagatatactatagatccccttagaaatcatgtaaaaaaatatctatttctgggagattgcctatatatataatacagttacattaaaagagcagattatacggccaggcatggtggctcacgcctgtaatcccagcactttgggagaccaaggccggcaggtatcttgaggccaggagttcgagaccagcctggccaacatggtgaaccccatgtctactaaaaatacaaaaattagctgggcgtggtggtgcacacctgtaatcccagctactcgggtagctgaggcacaagaatcgcttaaaccttggaggcagaggttgcagtgagccaaggtcagaccattgcactccagcctgggagacagaggcatactcttgtcttcaaaaaaaaaaaaaagcgggttacaaaatataaccaatataatctcagaactggttaaaaaacatgctttatacaatcccaattttacgaaaaggaaacacacacagtaggtggtcgggaagggaacttagagaaaagaaaatataaatgaccaataaatttaagaaaatacaagttggctatttgaagttgcaaagatgtaaaaggctgataaaccccatttcttaagagtagtttcataaatgttgagattctacatttggaaaaactactttggagagcaggctagcaatattataagtgtgggccaggtgtggtaactcatacctgtaatcgtatcactttgggagtctggggtgggaggatcacttaagctcaggagttccagaccagcctgaacaacacagtgagatcccatctctacaaaaagtttttagaagttagccaggtgtggtagtgtgtacctgtagtcccagctacttgggaggctaaggcagggggatcgctcgaacccaggagtttgaggctgcaatgagctatgattgcatcactgcactccagcctgggtgacaaggtgagaccctgtctgttacatatatacatattgtgtaagtccacatatcttttgatctagcaattcctaaagaagtattcccacaaagccatgaagacctttgcacaagtgtggcacatcgcaacattgtaatggagagtagaaaaaattccccatggaggacacacctaggttggttaaataaattgcagttcgtctgtaaaggaaaatagtgttgaaaatgtcatgtgcataatatgatcctattttacataaaaagcagcataaatatgtacatatatacacataaaaagtctggaaggatatgcaccaagtttaatcatggttgcctctggggattaggatttcagtacagaagagagaaagagatgatcacctcccacacctgtgtggcttaattttttattagtatgttgggctttactttttattttttatttatttatttttttgagatagggtcttgctctgtcacaccggctgacattggctcactgcaaccgccacctcccaggctcaagccagcctctcaggtagctgggactacaggtgtacatcaccacacccagataatttttgtatttttttgtagagacaggattttgccacgttgcccaggctggtcttgaacttttgagctcaaggatccacccgcctctgcctcccaaaatgctgggattattaaagagatttaaagaatacaaattataatattactagtgattttccttgggttgtgggataatgataaccttgattttcttctccattctcatctgtgttttccaaatgtaaaaacaaatgaacatgtcatcctgattactttaatatcacaatggatttgatttgccttttccttaaaaacatgcaacagaaataatgcctgtaagtgtaatgaagactgttataagcattaaaatcataacatacttgaactgagggagtcagttatgatttcagattaatcttccttttcttctagatgaagcatgtgatgaaagttctagaaaaacatgaaattcagccctatgaaatcgcactggtacactgggaaaatgaagaacttaactacataaaaatagagtaagcaacttttcatcaaatttatgaaaggggcacttggaataaattaggtaaagcaatagaggagacaaattattatgcatatggaaactttttttttttttttgagacggagtctcactctgtcgcccaggatggagtgcagtggcacaatctcggctcactgcaacctctgcctcccgggttcaagcaattctcctgcctcagcctcctgagtaagtgggactacaggtgtgcaccaccacgcccagctaattttttgtatttttagtagagacagggtttcaccatgttggccaggatggtctggatctcgacctggtgatccgcccacctcagcctctcaaagtgctgggattacaggcgtgagccactggacctggcctggaaacttacttttaagaaaaaagtggccaggcgtggtagctcacacctgtaatcccagcactttgggaggctgaggcaggtggattacctgaggtcaggagttcaggaccagcctggccaacatggtgaaaccccatctctactaaaaaatacaaaaattagctggttatggtggcgggtgcttgtaatcccagctactcgggaggctgagacaggagaattgcttgaacctgggaggcggaggttgcagtgagccgagatcacgccattgcactccagccagggtgacaagagtgaaactccgtctcaaaaaaaaagaggaaaaagattactggtacaaatacaaagtctaaaccatataataaatattagaagataaacataattttttgaacttctcaggctatccacaagttaaaacaagtcagtagtatagccccaaaatggaaatgttaagtttctaatcagcctaatccaataaaatagtatgcatttatcaaatgaacctatcaaattattccagtaaatttttctcttaatccagttttttcctattgattttggggggtgggggtatgaaaaggaagtatagtgaggggtcaatctaagagacccacttgtagaagtgtgggtgctggaagaagtgggacctggtgtaccagtttcactaagataaatgggtaggcaacagactagctgattttcctgactcagccagagggaaaaaatgaagagatgttagggccgagacagaggcagtatgaacaagatggtagtgtctttttcctcatggagttacctgtctagtgaaatatgagtctttgcaggttcttaagaaaggtagtgttagccagatttggtggctcacacctgtaatctcagcactttgggaggccagggtgggaggatcaactgagtcaggagttcaagacagcttggccaacatggcgaaaccccatctctactaaaaatacaaaaattacccgggcatagtggcgagtgtctgtgatcccagctacttgggaggcggaggcggaggcagagaattgcttgaacctgggaggcagaggttgccatgacctgagatcgcaccactgcactccagcctgtgcaacagagtgagactctgtctcaaaaaaaaaaaaaaagcgttaaaagcagagctttgggaagacttggaagagagacagagactagctatagaaagaccagatggggataagagctgagtaatcagcgctcaccaccaatagggccagtcacggttttctaagtaagtgccttccatgtattatttcatttaatcctggggaaaaccctataattgcagctaactggctttccgatgagatttattgaatcctgtcttgccaaagggcacctgactgtgagtcagcctgagcccagtggtggctgcagtcagaggtaaggatataaacctgagagagacagcaaatgagcagcctgtagttttattatctttagtagttactcagcccttggcctgcagatacagctcctgtgaatcccctttctgtgttctattaggtttacattaaaatggcaaaaaccgcgattacttttgcaccaaccaaatacttccatatccaactactgctagacccttgtgtgtgtgtgtgtgtacgcttatccacacacacacacacacgttactgtacagtctgtgaggagtaaaatcctcagtgcttaggatcccagagtcagttattttgtttcgtcagaaagactgtcctggctgccacctacatggttattatgtgagttctgccatgattccagggatctgctcagctctgtggcatgggcccagtttactcataaagcatcttgtgaccaagcacagtggctcatgcctgtaatcccaacactttgagaggccaaggcgggcagatcacttgaggtcaggagttcaagaccagcctggccaacatggtgaagccctgtctgtactacaaatataaaaattagctggatgtggtggtgcactcctgtaatcccagctactcaggaggctgaggcaggagaatcgctggaacccaggaggcggaggttgcagtgagcgaagatcacgccactacactccagtctgggtgacagagcaagactccgtctcaaaaaaaaagacctcttgtgactgctgtctttgctttccttcctccatctgaggctgtcatagcagatgccgccctccatcaggccccttgtccccctccctttggccgtcacttcttgtctgacatcttttgtgaaggtttaccctgtcttttttccatttgcttgtgatgtttatattcacacattccgctcttcccctgtcccctgtctaggattctccacagtcacatactcatttttcacaacttccttgcctccctccccaaccccatcatgtcagtgtgattttagattacactccatatatagttttatatgcagcattttttcacatagaaatttactgtgaacgttctcctttttattaactatccttccaaaacacacttttaagtttttcttgtgtggagtgactattactgagccaacccctactgaacatttggtttatttcctaattttttactcttaaacactgaccttttttttttttttggagacagagtcttgctcagtctcccaggctggagtgcagtggcgtgatttcggcttactgcaagctccgcctcccgggttcactccattctcctgcctcagcctcccgagtagctgggactacaggcgcccgccaccacacccggctaattttattttgtgttttgagtagagacggggtttcaccatgttagccaggatggtctcaatctcctgacctcgtgatccacctgcctcggcctcccggagtgctggggttacaggcgtgagccaccgtgcccagccaacactgaccatttttttaaaagttttcagctgggcaaggtggctcgcacctgtagtcgcaccactttgggaggccgaggtgggtggatcatttgaggtcaggaattcaagaccagcctggccaacatggtgaaactctatctctattaaaaatacaaaaaaaattagctgggtgtggttacgcatgcctgtaatcccagctactagggaggctgaggcaggagaatcgcttgaacctaggagactgaggttgcagtgagctgagatcgcaccactgcactctagcctgggcggcagagtgagactgtctcaaaaaaaaaaaaaaaagttttcttgtatacaaatttttctttgcatcttagattatttccttaggataaactcctagaaagggaattacctggaccaaaggatatgagaacatttgtaacactcttgatacaaattgtcaaaatgacctccagaaagatgatatggtgtctttttcaaaggaaaagttaaagtgctttttaagatttagaaggtattatctttttgcttttcacaggggacagtcaaaacttcacaggggggaaatcaagttaaattcagagctggatttagatgatgccattctagagaagtttgctttctccaatgctctatgcctttctggtaagttactactgcttatgggatagggtactacagttgtcatttcactgagggaagtttaaatagtcacgattttggtatattttcagaatactcaacaaagccttagcattccttttcctttttttccctccatcagaaaaaatatctagtataaaagatagtactgtgctgaagttactcattccttattaattgtattaataaagcttaacctctccaaaagtattttttagatgatgattatattagcctttgtttttttctcttctctctatgcgattgttattcttagatagtctctaatccagacagagaagcccagccttgtgtgactgggcacaggtcccagtgtagaaaaacatactctagtgttccataggaatgggacccagagtcacagtggctataagtttgttctgaaagatccacatcccgaataaaactatacaagttctttaagaatttcttttgccagcagtctaccttaggtggctgctgcagcgtcctgtccatcccactctgaggggcttcggagatttctgaggtttactcttagtcctgaggagtgaaggggaggccaggaaagtcttagtcgcgccctatctgcagagctacccatggtatcaaggtgtaccctaccctcctcagtttccaagatgtaatactagaaaatcaagagttctactaaatgtagctttggtcttccaatagggcatggaaagcgattcagtttcctctatccactttaattctgtcctttatgataattaactattcttaaattatattttcaaggttttagtactttttcttaaactattactgaaatagtagtgaagatgctgtgcaattatgtattttatatacatgtgaatatgatgataaagaaatgttccattattaatttttttcccagtaaaactggcaatttgggaagcatcactggataaatttattgaatctattcagtcaattcctgaggtaattatatcaattttatgcttattcaaggattgatttttatatgtaaaaaatatgaatttcccaatataacaatatatagctatccatcagtatccatgggagatttgttccaagaccccactggataccagaatctaccagtgtccaaatccctgatataaaatggtatatatttgcatataacctatgcatatcctcatgtatactttcaaccatctctagattacctaaaatacctaatataatgtaaatactatgtaaatagttgttatactgtattatttaggaaataataacaagaaaaaacagtttgtacatgttcggtacagatgcaaccattcttttttctcaaaatactgtcaatttgcagttggttgaatctgcagttgcagaacttatagagggccgattgtttaggagtacaacaacattattacaaacaataagaaaactacagtaaacttaagaactcccagttacatataaaatgacaaattaagaaacttcatattgattactttttactttttaaaacttcaaattgtttcctctgttggtgcagtattttttttttaatattaatataattgaaatggggtctggccatgttgcccaggctggtcttgaactcctgggctcaagcgatcctcctgcctcggcctcccaaagttctagcattacaggccacgagccaccatgcccgtcagttgcagtatttttaatgtaactgaattaaagaaaaaagtgaaatgtttctctctgagaatggaaattatgaccacttttcctgatttaagaaagtgttttgctaaattatgagaaaaatagtggtatgaaaaatacatataaagttatattgaaatttcagtatacattaaaaatcatcatattgtaattaactgtgtctttattgtgaaagagtaatctaattatacttcggaaaggaggccctgcttttctactaagagattaggaatgtatatatcattgaaaatgctgatgagaagggaaatgaaaaaagagaatatacaatttctacctaataaaattatgaaatttcaaggtgagttaagacattaatctgggagacagccatcctaaaaaatatttacataggatccaaattatgccacttcagattttgccctgttgacctaatgcttattagaaagagagatacatggttttttggtttttccgattccctctcaactaggctttaaaagctgggaagaaagtgaaactatctcatgaagaagttatgcagaaaatcggtgaactctttgctctaaggtaaaagttttctctctaaataaaatatttcatatatttaacaatctcaagaaaacattcccatagttctgtggtgaagagcaaacatttacacgtttatgggaactgtagctgttttcatttcattgattataagcagggagaactcttacccattagaagtagttgggctgtgttaagactgtactgaaagaaatcacgcatgtgcaaaagagatcacgattcatctacattaaacccacattaaggagcacagtaggtgttctttgaaggtagaaagacatattcctgaatttggttaatgggaattctctgtaaaaatatatcactgcatcataatgctaaataggcttaattgctacagaaaagtttctttgaatctgagacaccaagatgccactggagagaaaaactgctgccagttaaactatgacaatactttttttatcagaggattaaaattttacacttactgaaatatcttttaatcttagctggatataaattatatcacattccctcttgggcatatatgaaaaggaaagcataagaaaataaattatttaaggcaaagacaagtaagtctcaagtgccacctgtcagacaccattaattttaagatgcctcgagatgttaaaatgggaataactatgtctaaaaactgatgaatcattttaaataagtatctggaaaggttttcagcttttattattcttgtagttgtcccaggatttacggaatgaaacatcccggatgttggtgtttttctcacaggcagcattgtccagtttatcccttctagcatgtggaatgagttaccagagctcactgcaaatgttcacctaagacttgtttttccatattctccttagatgctctgcctggagagaagtgatacagtgtttcattgtctgtgtatctctcatagctcaggacctatagttcagggtaccaacaaaacttaaaaacccatccatcaggagcatcctgcagcatatctgaagcctcaaattctctgagaagtagggtagagagattcttctctcctgttctcttggtcatgcaagcagaaattgatgtagtgaattataatatccaaactgaatagttaggactaaatatacgtaggtttgtgaatagtttctataaaggcttacttttactatcctgtttccttacctgtacaataaaaatgcttatttgttaatataaggaatgtgatacatctgtgaaaataaacatggcagataatattagattaaaaaactaaatctaaatttatatagggtatgatcccatttgtgtaagcaaataaaaatattcatgtttatctttatatgcatacacatgtacatgtgtttgcttgcacacacatgcatgtatgaatacagaaagatctggaagtacacagcaaagtgtctctacaggcctgtccttggggagaataaaggatttaagtagtgtggtagcataagagagcctaccatttttctgaatccttctctaggatattttccttttttttttaatcgtgaacaggtatgtatgtgttactttttttttttttttttttaaacagggtcttgcttgtcacccagactagagtgcagtggcatgatcatagctcaccaaagccttgatctcctgggctcagggattcctcctgcctcaccctcctgggtagctgggaccacaggagtgctccaccacacccagctaattttaaaaataatttgtagagacagggtctcaaacccttgctcaagcaatcctcctccctaggcctcccaaagtgctgggattacaggtgtgagccaccacatcagtttatgtgtactttcataacttagatttttatttagttaaacatctaagtgtaaggccaggcacggtggctcacacctgtaatgccagcactttgggaggctgagacaggtggattgcttgaggctgggagctcgagaccagcctggctaacatgatgaaaccccatctctaccaaaaatacaaaaattagccaggaatggtggtgtgcgcctgtaatcccagcttcttgggaggctgaggcatgagaattggttgaacccaggaggcgaaggttgcagtggagccaggatcatgccactgcactccagcctgggcgacagagcaagattctgtctcaaaaaagaaaaaggctgggcacggtggctcacatctgtaatcccaacactttgggaggccgaggccagtggatcatctgaggtcaggagttcaagaccagcctgaccaacatggagaaaccccatctttactaaaaatacaaaattagccgggcgtggtggcacatgcctgtaatcctagctactcgggaggctgaggcaggagaattgcttgaacccaagaggtggaggttgtggtgagccaagatcgcgccaatacactccagcctgggcaacaagaacaaaactctgtctcagaaaaaaaagtaagcacagacttcttatattaaaatgtagaaattaagagagagagtgtgtatgtttatgcttgcttgtctagtgtttgcataaacactggaaggatacagcggaaactagaagggattactgatagggaaagatacagataagaataagagttaagatttatcaatttttacctgtttatatcttgatctgctcaggaggctgaggcaggaagatcacttgagcccaggagtttgaggctgcggtaagctatgattgtgtcactgcaccccaaactgggtgacatatgaagacattatctctaaaaaaattttttaaataaaaaacaaaaaagtgtggacatattaaattttttttttatttgagatggggtctcactatgttgcctaggctggagtacagtgtcacagtcttggctcactgcagcctctgcctccgaggttcacatgatcctcccacctcagcctcccaagtagctgggactacaggcatacaccaccacacctggctagttcttgtattttttgtagagatagggtttcgctgtgctgtccaggttggtcttgaactcacagactcgagcaatctgcccgccttggccttccaaagtgctgggattacaggcatgaaccaccatgcctggccctaaaatttttaataaaaaaagtttaggctgggaatggtggctcacacctgtaatcccagcactttgggaggctgaggtaggcagatcacgtgaggtcaggagttcgagaccagcctggccaacttggtaaaaccctttactaaaaatacaaaaaattagccaggtgtgatggtaggcacctgtaatcccagctacttgggaggctgaggcaggagaattgcttaaatctgggaggcagaggttgcagtgagctgagatcatgccattgtactccagcctgggtgacaagagtgactctgtctcaaaaaaaaaaaaaaaattgaaaacaaaatgagtttttttctgtgtacttcataaataatgttggtattaaagattgaattaatttggttcagaagtttgaaactcatttgtaaattttatttacatgtttgttggcagtattttgcaaaggtcagcattaacaaatgttttcagccacatgcaatgccacatgcctgtagttccagctacatgggaggctgaggcaggagaacagcttgagcccaggagttcagtttgcagtgagttgtgatcacaccactgcactccatcccgggtaacatagcaagaccctctctcttaccaaaaaaaaaaaagttttcataaagcactatgtaaatattaaatacaatagaaacaatgatttttaattcaagataaataaaaagttataattttcctttttaaaggcaccgtataaacttgagttcagacttcctgattactcctgatttctactgggacagagaaaacctggaaggactttacgataaaacgtgtcaattccttagcattggccgaagagttaaggtacgtattttgcacttctaatgagagaaaaagacacgttgtcgcctataagttgaatatgtttaactgcttgcagagaaatatcttgtttgacttccattcaaatctctttatatttccccttcttgtcctctgtacagtcacttcaattttttgtgtcaaaggatcttctgatattagctctacagactagataaggttggtgaataagatgagagtttggaagcctaatggtccatcagtaagttcttgtcaagtttcaagcaagagttcatgactgcttctgatctgtcatggtgacagtgagaatagaaataaatttaagaaagaatcatgtaagacaaatcaagtgatgggtaataagaggccatggagaagaaagaataaaggatgactgatgtttgcctggaggtgacaagtagaaaggtggaaaaacaataatgagaggtcagagaggggaggtgacagactaaatctaagatatgctgagattagagtagcaacaagatatccaattagctccgtcatgcaggcatttagaagggcagaagcaaagtcgggaaaagagacgtgtattaagaaatcccagcactttgggaggctgaggcggatggatcacctgaggttgggagtttgagaccagcctggccaacatggcgaaaccctgtctctactaaaaatacaaaaattagccaggcatggtggcattctcctatagtccgagctactcgagaggctgaggcaggagaatcacttgaacccaggaggtggaggttgcagtgagccaaggtcgagccagtgcactccagcctggatgacagagtgagactccgtctcaaaaaaaaaaaaaaaaaaaaagctgtagtgatggaggtagaccacatggggaaagagcatagaaaacagaaaattgacattagtacaatgtgtgcacatagttctgtgacattttgccacatctatagatccatgcaaccacatgatcaagacacaaaactgtgccaggtgcggtggctcatgcctgtaaccccagcactttgtgaggctagaggtgggcagatcacttgaggtcaagagttcgagacctgcctggccaatatggtaaaacgctgtctctactaaaaatacaaaaattagctgggtgtggtggcgcgtgcctgtagtcccagctactcgggaggctgaggcagcagaatcgcttgaacccaggaagtggaggttgcagtgagctgaggtcatgccattgcactccagcctgggcgttgcagcgagactccatctcaaaaaaaacaaaacaaaaagacacaaaactgttttatcacttttcctcatgctaccctgtatagtcacactgccctccccctacccggactgtccctaacccctggcagtgagtaatctcttctccatctccataattttgtcattttgaggatgttatatagatagtcatacagtatgtgactttttttttttttttttttttgagacggagtcttgctctgttgcccaggctggagtgcagtggctcaatcttggctcattgcaagctctgcctcccgggttcacgccattctcctgcctcagcctcctgagtaggtgggactacaggcacccgccaccaagcccagctaatttttttttgtatttttagtagagatggggtttcactgtgtttagccaggatggtctcgatctgtatgtgactttttaactggcttttttcacagagcataatgccctcaacttggatccatccaaattgttgcttgtatcaaagttcctgtcttcctgtggttactgaaacaattttttggtatttcattttgatgttactttttaatatatctcgttgcatagatatttagtagttgctctggttattacatcttacgtatataacttattacaatctactgatttcaacatcttgcagattaaatgaagtatagaatctttatttccctaatggatgattggatgcagaaaaaaaaaaagaattcttatttcttttatattcctttacccttccgtatttataattttcttaactattcttctgcagacatagaaaacttcatcagataatgttataatttttgcttcaaccatcaaacataatttagaaaactaagaaaagcaaagtctgttgtatgtgcccatgtttttattctttctgttcttttctccttctgatcttctaagatttcttttactgtttttttttttcaagaactttatttagccattcttttaaggtaagtctagtgagacaaattctcttagtttgtcttcatctgagagtgtattaattttctcttcattcttgcaggatattttcctagaaataggattctaggtagacagttttctttctttcagcacctgaaaaatgccatgccacttccttctgacctccatggtttctgacggaaatctgccataattctatgacatctacattttatcttttattatcatttcacaaggtctttgaggctctgttcacttcttttccagtatattttgtctctgttaagattgggtaatgtcctttgtttcatcttctagttgattgattccttcctctgttacattcgttctgctgcccaacattgagtttatttcatttattatatttttcagttctaaaatttccatgtttttttatttgtatcttctgtttctttgcagagacttcctgctttttcgtttgtttcaaatgtgttcagaattgcttgttgaatcatttttatgatggttgctctaacatcatctaataatacctaacctcagatacctcttgatattagtgtctactgattgtcttttctgattccctccaactaattttaatacctccagtttccctcattgcctcaagtgttctggcttgatatacaaggtccttcctattgtttctgtttttcaatcatatttcctaccaatccccacattcaccttgtatcacatcaaaaataagtgattagcctgggaaacacaatgagacctcatttctactaaccttttttttaaaaaaattagccaggtataatggcatgtgcctgtagtctcagctaccctgggaggttgaggcaggaggattgctttagcccaggagtttgaggctgcagtgagccatgatcacgccactacatcccagtctaggtgacagagtgagaccctgtctcaaaaaaataaaaataaaaaatacatgatttataatttcaaaaacctaccatggcttattgaatgctatgttccactttagtgtctacatttttttcctctaagctagacaccgccccttgcaaaaccacatcaaagctatctgcagttgtcactgatcttggcaccacctattcctctgtaggtgtcttccagcacaggacagtagagatcatcaccactcggcaagaaaaccaagctatgttgcttttagctgacacagaaagattgattagtgatggtttaggaatcaaattcagtggactccatcaacacagttttagataacagaggtgtaattagacaccgatttgacagtccaactgtctggtcaaacatgaaaagcactggactttcctggttgtcgactgtgcacacaggctgaagatccagaggaggaaagggagggatactaaaagctttatacagttgaggtatttcctgtggttgtgttagctattgctgtgtaacaaattaccccaaaacttggtggactgaaacaccacttactggctgggcacggtggctcacgcctgttaccccagcactttggtaggccaaggcaggcaggtcacatgaggccaggagttcaagaccagcctggccaacatggtgaaaccccataaattagtcgggcatggtggcatgcacctgtagtcccaagtagctgactctggaggctgaggcatgagaatcacttgaacccaggaggcagaggttggactgagctgagactgcaccactgcactccagcctgggtgacagagtgagactgtctcaaaaaataaaaagaaaaaagaaacaccacttactatttaagtttttgtgggtcaggaatcagtgcagcttagctgggtcctctgattctgtgtttctcacaaggctgcagtcatctcagagattcacttcctagttcactcgtggttattggctggatttggttcctctcaggctattagattgaggcctcagttcctcataagctgatgtccagaagcttctccatagagcatctcacaacatggcagtgtgcttcatcagatgaacaagtaggggagtgatatggtttagatctgtatccctgcccaaatcttgtgtcgaatggtaatgcccgtgttggaggtgggtcctggtgggggggtgactggatcatcagggtagatttctcatgagtggtttggcaccatccccttggtgctgttcttgtgacagtgagttctcgtgaggttgtttaaaagtgtgtagcacctgcatctccccttgttcgctcttcttcgcttctgccatgtaaggtacctgctctcccttcaccttccactatgattgtaagtttctggaggcttccccagaagccaagcacatgccagcatcatgcttcctgtagaacagtgcagaaccatgagccaattaggcctcttttctttataaattaccccgtctcaggtatttctttatagcagtgagagactggactaatacagagagcaagagagactgtcaggaagagaatgctagtaaaacagaagtcacagtcttttgcaacctaatcacagaagtgatttttgctgtgctctctttgttaaaaacaagttagggccaggcacagtggctcatgcttataatcctagccctttgggaggctgagatgggagggtcacttgaggccaggagttcaagaccagcctggtcaacatagtgatacccccgcccatctctttaaaaaaaaaaaaaaattaaaaagcaagttatggccagtcgtggtggctcacacctgtaatcccagcacttcgggaggccgaggtgagtggatcacctgaggtcaggagttcaaggccagcgtggctaacatggtgaaaccctgtctctactaaaaatacaaaaattagctgggcatggtggtggacgcctgtaatcccagtcacttgggaggctgaggcaggaaaatcgcttgaacctaaggggggcagaggttgcagtgagccaagatcagcctggatgaaacagcaaaacttcgtctcaagaaaaaaaaaggcaagttattagactgagcctacgctcgagggtaggggatgacacaaaagtgaacaccaggaggtggggagtctttgggtggcatcttagaaatctgcctaccacattggttttgaaaaagatggagaaaattctggaaacctactttatgacccctgacctacacgatcctcatactaccagttactttaatggttgccagcttcaggccatcaaagttggtggaaccattactgatctcattgtgttctgaattgtcagcaagccaaatgccgctggtctcagcttagacgagaacgttaatgccaaatttaatgatctgatcttttacctgggtggcattttttatctgtccatcctcagtattcaagatggaattactgaagtcaagtctgcaactgaggatacccacctgagtgaagagtaccttgacaactaagtggtcagctgtttcatggctgagatcaactgcagttatagaaaggacacccgttgagaacaagcaggctgcccaagccccttctgcctctactgaatgtgctcttcattctggtatcgaggccaatttgagattgagtccctccatgaaggggttcacatctatacctctgtgcacatgagcagctggaagaatcaaaagccaccccagtccctggcaccctacacctgtggagaaagccataagcaatgtcacccagacatatcaccagtccttcacgggtggctctatttatatccccaagatttaaaatctcttatagggccgggcatggtggctcacacctgtaatcccagcactttgggaggccaaggtgggaggatcgcttgaggccaggagttcaagaccagcctggccaacatggtgaaacctgtctctactaaaaatacaaaaattagccgggcctggtggtgcatgcctgtgatcccaggtacttgaggggctgaggcactagaatcacttgaacttgggaggcaaaggttccgatgagctgagattgcaccactgcactccagcctgggtgacagagtgagacttatctccaaaaaaataattaataaataagataaagtctcctacaggaagaactagaactgaatttatttacaggcagtatgatcttgtatgtagaagacctggaagaatctacaaagaagctaccagaataagtgagtttatcaaggtctcaagatcaatgtataaaaacggttatctttcgttatactgcaaatacacaattggaaaatgaaattttaaaacttctgtttatagtagcacccaaaacttgaattactcaggtttgaattgagtgattcaactattccagaataatattaattaatcaattggagtaatctgagcaagtaattgttctttatttcattccccagtctcactgtgggacatcttttttggtgttaagtcttctgcatgagttatgaagcatacctaaaaggtctcaaactacctttctcagagttttttctcagcatcccgaaggcagttcagactcgttggattatgtcaaggttatttagaaggggttgagagttcaccctgccttaggctcagcatagtgctggcattatacataatacaaaagaaaagtaagaattggtcctgcccttcagccagctttacagtcttctaagaaaacagatggaacaggccgggtgcggtggctcatgcctgtaatcccagcattttgggaggccaaggagggcggatcacaaggtcaggagatccagaccatcctggctaacatggtgagaccccgtctctactaaaaatacaaaaaaattagctgggcgtggtggcgggcgtctgtagtcccagctactcgggaggctgaggcaggagaatggcgtgaacccgggagggagagcttgcagtgagcggagattgtgccactgcagtccagcctgggtgacagagcaagactccgcctcaaaaaaaaaaaaaaatggaacaaagagtagcggggttttttattccccctcaaaaagtagaagaaagggtcttgagaaaataggggtgagtaggcataagacatgctaaaaagttgagtacagaggtccagatgcagagagcagttacacagtgtcatgggacagaaactagttggcagtggatccctcgctccattttctcacgtcagtatcccctgaagtcctgtcgctgaggcttctgtccccatgccaccttctccgtgaacacttgtttgttgtcgtgacttctaatcccaccttctcctggggattttcaaatgtctctctcatcccagtctcttgtctgccttccagacttttccagttgcccctcaatctcacagatcttcctcatttacatatctcgtcgcatccttttaaaaattgtgtgtaccattttccactagaatgtaagccccatgagatcggagaccatgattattttcttgcctgttcttggcaaaggcctcacatacagtatgtccgcaagaaatatttgtagaattagtcaatgattaaaatttcaaaatgaaacttttgaaattcccccccaccccagaaaatggtaaaccttttcagttctctatttcagctcatgggaggaccttctagcctcacctatctagtcattcaaccagaaacttaaaagtcatctgggtgtcctttttctccttcaccttccatatccagtcaaacaatctttttagttccctctaagtatcatggattcattagcaaacatttattgaaagcctgtatgataggccctaggctggtgaaacaggggaataccatactgacccgtcttcaagcccccaactattaatgttcatccacacagcccctcatcttcctttcccacctggacttgtctgattccttcttgactctctcagtctccagactggaccttttcccagtctctctgcaccctttggctgcaagacagacacatgtctatttcaccattctgtctcctctgcccagcgtagtacagtaaatgttaaaacaagtacttccagactgaacaaaggcctccccattacctgcagaatgaagttcagatattctagcatgacatgctactttcctactgctgcttaacagaaatttgtcatcttactgttctgtaggtcagaagtctggcatggcctaaagttaagatgttgattcctctttggagactgcgagtggaatccatttcctcaccttttccagtgactggaggccacccatattccttgctcatggccccctcctccatctagcaaaggcctgtggaatcctcatattgtatcattctgaactcttctgccccgcatttccacttttaaggacccttgtgattacattgggcttacccagataatctaggattatctcatcttaaggtcagctaattaataactttaatttcttatacaatcttaattctcctttgccatattatattcacaggttccaagaattaggacataaatctctttggggtgggggacatggttctgcctataccatatgtagtacacagtacctctcacaatctggtactaacttctttttttctgagatggagttcaatgccgtggtcttggctcactgcaaccaccgactcctgggttcaagtgattctcctgcctcagcctcccaaatagctgggattacaggtgcctgccaccacacccagctaatttttctatttttagtagagacggggtttcgctatgttggccatgctggtcttaaactgacctcaagtgatccgcctgccttggcctcccaaaatgctgagattacagatgggagccaccgcccccagctgacttaccttcttaacctcacttccaagcactttcttctaggttgtccacaatctagctatgcttgtctgtatgctgtttcctatgcttgacatgctcccttcatcccccaataaccccaccagcatcccaccttttcttcatgtccactgccttttaaagcctaattcacatttcctacctctgtgaagcctctcctggttttttctttgctcccttaatctgcatgctcgacgcgtacatgcctctatacctaaataaatagaaagcatgctgtggtaatagtgacttttttttgtgtgtgtgacggagtctcgctctgtcgcccaggctggagtgcagtggcgcgatcttggctcactgcaagctccacctcccggctgggttcacactattctcctgcctcagcctcctgactggctgggacaacaggggccgccacaacacccggataatttttttgtatttttagtagagatggggttttaccctgttagccaggatggtcttgatctcctgacctcgtgatcctcctgccccagcctcccgaagtgttgtgattataggcaagagccactgcacccggccatagggactcttgcttgcacatttcagtgtgttgtcagatgcttggattgaggttcgaagctaagttgttagacttaataatagactttgggacgtttaggagagttgtggtaatataaactaaaggaataaattggatgatgatgaggtagtggaggaagaaaatgttgcctgttttttggcccaagttgaaagaaaatgcaagaggctgaatcagtagtctgaagagagaagcaagcttaaggatgaacattaaagaccaagatcaagcagccaatagaaacagacattaagaaagggcaagaggaaaggaaaacagggaggggaaaggaagagggaagaggcatgctctacacatctatacagattagaaactacagggtgaccataacgcctggaaataggggcaaatggtggagtgtggttcagtcagttagtcctgtggttctgtgagtaagacagtttttttttggagacaggatctcactttggcacccaggctggagtgcagtggcatgatcttggctcattgcagccttgaccacctgagctcaagcaatcctcccacctcatccctgccaagtagctagaactacaggcacacaccaccatgcctggctaatttttttgtagagacagggtttcactgtgttgcccaggctggtctccaactcctgagctcaagtgcgcctcctgcctcagcctcccaaaatgctaggattacaggcataagccaccgagcccagcctagtaaggcagtttaatgctatgtgcaaaaatcgtaacatggtgcagttaacgcattccaatcaacccctgaacacgtacctgtgattcatctcttaatgttcactgaccaaacctgtaacttcagcatacccatgagacaaactgttttaaaattttgctttcaggatttccagtagcaagtgatatataaagatattaggtaggtatttaacagttatcacatccaggcctggcacggtggctcacgcctgtaatcccagcactttgggaggccgaggcgggcggatcacaaggtcaggagatcgagaccatcctggctaacatcatctctactaaaaatacaaaaattagccgggcgtggtggcgggcacctgtagtcccagctatttgggaggctgaggcaggagaatggcgtgatcccaggaggcagagcttgcagtgagccgagatccgccattacactccggcctgggcgacagagggagactccatcccaaaaaacaacaacaacaacaaaaaaaaaagttgtcacatccaaattttgaattcagggactttattttctttgaacccccacagccagcttgtttggaggcatcggaatgcagaactgttgcagttcagttgaaagcaatgccatctagtggtgtgtgtacagcaggtcaaatgttaagcgtagattttctagtagaaagtaaattatctttaggtcttgctaaaaaacattatgtttcaagtttgcctcttttaactgctaaaaagggcagctactaaaaactaggactcaaaaacctatttttagttcttccatcaaaatcttacaaatagaagagcttcagtatgcaaagtatttcttgcagttaaatttgtacattacaaaatgtctctggacggattcacaagaaactgataatgttggtggctgcctttggggagaggactgaggagcaggatttttcactgtatagctatagaatttttatgtgtatgaccgtattaaattgtttaaatacatgttactgaaatttttcttacataggtcatgaatgaaaaacttcagcactgcatggaactaacagatctaatgcggaatcacctgaatgagaagagggcactccgcttggagtggatgattgtcatcctcattaccatagaggtaagatggaaatgctctgtactatgatcagttaccatcttttcacaaatacaggggctatgctaataagatagtttgagatagaaaattattagcagaaaagaggctgactttgttatcattactaactctatttggaagtttcaaattactatttgcaaatgcattaaaagtaattcttgaaaaggttccactttttaaaatttgagagtagacctcaaggttctgcttttaaagacagcatttggaaaaagttctagctgtaaatttataatgtacagctcaacatcaaatcaagcacccgtacctccaattcataggttgccacgtgagaaagggcaaacatttaccttacttcaggagcatttctcattaatcacaatcttggaagtcattttagtttgtacccataatttgcccgtcatgaaataattctcactttctattctaaggtaatgtttgagctgggacgagtatttttctgatcaagtgataaccaaagtgtcactgcaagagatattcaagttctacaatcaaaaattaaatgttcggcccggcgcggtgcctcatgcctgtaatcccagcactttcggaggccaagaagggtggcttgagatgagatcaggagctcaagacaagcctggccaacatggtgaaaccccatctctactaaaaataccaaaattagccaggtgtgttggcacacgcccgtcatctcagctactcaggaggctgaggcaggagaatctcttgaacttgggaggcggaggttgcagtgagctaagatcacaccactgcactccagccagggcaacagtgagactcagtctcaaaaa

SEQ ID NO: 15772 - DNA, 39988 bp, Homo sapiens
aatttgaaaatacaacatgcagcacactgacaatacgtcaaagcttggatttgttccttcctgataaaacagctagtggtttgaataagtctcagatcctggaaatgaaccaaaaaaagtcagataccagcatgctgtctccattaaatgctgctcgttgccaagatgaaaaggcacaccttccaaccatgaaatcctttggtactcacaggagagtgacccacaaaccaaatctgttgggttctaaatggtttataaaaatattaaagaggcatttctcatctgtatcaacggaaacatttgttccaaaacaagacttcccacaggtgaagagaccactaaaagcatccaggaccagacagccatccaggaccaaccttccagttctgtctgtgaacgaggtaaagtaggggtggccgtggctctcgtgcttagtgatcattgctcatgctaaaccagtgtgcgttgcaccccagccttaccgccaacgtaagagaactagcagtcactcagacttcttcatcaaggtctttgaagcctaataaatatccaaagggattcagaatcttaatttttaacaattaatgatacatataaaaacaaaatacaggtgataacacatgaaaatagagtttataaaagatttggttattggtctaaggaaactgaaaaagaggaccaatattaagtccagtctaagaatgggactgtaaaaaaaaataaaataaaaaaaaacaaactagaaattcttcatcaagttaaaaaaaattgtaactctgcagacagataagcctttattaggctgtggcagttgcatggggcggtgaaatgacacggtagggtggactccaaaagcagcaggagaggagggcccagcttttttatcctcttaaggtttaagggggtattttttattcatccttaaggggtttctgggaatttttctgctacaatttgcatttctccttcagtaacaacttaagggtcaagatcaagcccttgataacctttgtatcttgcataatacctagaactgtaccttgtacttaaatgtttataagaggatctttaatgccgatagtcatcaactttaaagatattttaaacttgatgaagacttctgaatctatcagaaaacaggttagaatgtctgtcttcaagtcttgattctgaaaagtagcccctgagcctgtttcattttggctgtgtttttattactgtgcagctgacaccccttggaaaggtatacatacatacctttactcatcctctgattctgaatctagcaatgaatgaatggtttttgtgttggattctggaatgctttcaattcttgtgtggttactctgaactcaggacgtgaaggatgaagtgttgtgcagctactgtttcccctttccttttgctggagctttggggtaacctgggaaattcagtatttaagtgtccgagatggcattaagtgtaaaaacctgaattcatggcagctccaaaaaagagaaagctcaactcactttgttcatttgtaacgtctagcagcacagtgcatcaggtttcttaggaagaagctgataggtcagagatgtccctaggctatttctttgggccatccttagacttggaagcaattttcctaaataccgtatctatttttctttagatttttttttctacttccttccaggaaagaatttgaagtagattttcaacattcaacatagtttcaaatgagataataaatactttcacatattagagcaaatagttgacatgaacagagaaatgttatgaagtacctgaaatgaataatctagttgaacattttgttttgagaagcgcagtaattaaaagaggaactcctcctgggatttagtgtttgttgtttattgttgtgggagagggcagagtaaaaacataaaaatatcttcagagaaataactttttccagcactgaaattaaggagttagttatttcatggattctgttataggagacattatgtaacatgatagacaatgacttcagttggagtttggcaagagcaagtcgcatgctgtctttctgaaagcacagggaaataatagaaaatcagatgtttctggctgggcggtggctcacagctgtaatcccaacactttgggaggcccaggcaggcgattacttgaggtcaggagttcgagaccagcctagccaatatggtgaaaccctgtctctacaaatatacaaaaattagccaggcgtagtggtgcacacctgtaatcccagcggctcgggaggctgaggcaggagaatctcttgaactcgggaggtggaggttgcagtgagctgagatcatgccactgcactccagcctgggtgacagagtgagactctgtctcaaaaaaagagaagaaaatcatgtttctaaagtggtctgagataatgtaattttggaacatcattttttgaagattttacttttcatagagaaagcagtcttggcatgactaggtaatatgtccccaggaccaaagactgactttcctctgcccgaaattgagggccactccatttttatacggccatcatagtggtaaaccctttataccactttataccatcaaaatggtaaaccctttataccattcttgactgagacaaggaaaagactctgctttgtgtcagaaagcatgtggactttattttgttcccatagttgcacccagctcatcttttcagctctgcagaacagcgtgcatctggagttggctgaatgaggtttcagtcaccctgtctgttggaattaaatctttacctggtctcattttcagagatcataatctgagatactcaacccacatccctttggcttacaattcctaaaagcaatagtggatccagtggcttatgcctataatttcagtgctttgggaggctgacacagaaagaccacttgaggccaggagttgaagaccagcctggcaacatagcaagactcccatttctaaaagacttggaaaaaaaaaaaaaaaaaagccgggcttgctggtgcgcagctgtagtcctagctactcaagaggctgaggtgggaggatcgcttgagctccagggttccaggctgcagtgagtcgtgactgcacctcgctccgtccagcctgggcgacagagtgaggccctgtcactaaacaaacaagaaaacaataatagcagtgcttcttgttaatgtccagtctttgaagagaacagcagaggatgggaacggcaggtctgagtggcatggagcccgacaccagggagaatgttttcaggctaatagcactgtgttacagaatcactggtggactgttaaccatttttttgaaaaatgaaatagaatagaaaataacagaatacattgctcatgataaacgtaaatactggtttgtgaagcttttgtggcaattggtgtgtaagcatatatgtgtatatgtactatgtttaatgatttataggttgtagtcagaaaaacttacaggataaagcgtgatcttggtaacgtaaaatgtatctgtgtttttatagctttaatctccaatcagtatgttacaggagaaaaggcatttttccttagtatgatctatctactcacagtacttctgacatcaaatatatggggacctcttcctcctcctaccagccagttctccaattctccagacactaacaaggtgtcctgcaattcagttcaattccagcactagccagagttagtgcagacgccagttagttaagctcagccccacaagactgccctcccagttgacacctgtgcttctgaccaaccagctctatgacaaccatcccctcttcaggtttgattatttgctagaatggcccacagaactcagggaatcattttatttatgtttactgggttttttatataaagtatgcaaatgaacaaccagatgtagaggtgcacagagtgaagtcaagaagggcctggaacttaggagcttctgttcctcatagaactgggctgtgccaccctcctggcacatggatgcattgatcaacccaggagttctccagaccccatcatctgggtgtttttaatggaggtttcattgtgtaagccatgattaatgattaactcaatctccagcccctctccgtccaccagaagttaagggtgaggctgaaagttctaagcttctaatcaaagtttggtctttctggtaaccaccccccatcctgaagctgtccaggacccactgagagtcacctcattaaaacaaaagatgttcccatcactcgtgaaattccaagggatttttagaagctctgtgttagtaactgaaggcaaagagcaaatactacaaccaaaaatgcccctgtcacttagaaaattacaggggtttttaggagtctgtactgggaaccaaggacaaagaccaaatgtaaatgtattatatcactatagaagcaacattgctgtaacacactaattttcttcagtaatacagtgtaaatgaaagtataatttttaaaaaaatgttctgatcagagcatgcgatgctcctaaaacaagaatcatatgtagatttctagccccatctgctggaacatgtcttctttggccagaaaaacaaaacatactaaaatacagtggtttggggtttttgctttttgggttttttaaaacattttgaagtagaaaagccctgaatatcataactattatcggttggtttgacacatctatttaacaggaaggtgtagatccccatcctgaaacccaaaatatgctttacatatatatgtagctaatgcttaataaggattcactgtaaaaatccagaaaaggatgtataaaaatgaaagctgctcagaaaacaacagcatctttaataaagaaaaaaaagcagacaagacattccatgattctctttccttttaccaaataggctaaaataaaaaaagcaaagaaaacaaaaccaaaacaaagtgtctaaaacgtcaagttcatctattaatagaagaaacccacaactaagactcagagctaagaagtttaaggagaatacagaaagtagtgtagcaaaccatataagctgagtgacattggatagaactttgagccaaactaaatgggagatcccaagagaaggaaaggggacagttgacagtctggaaaacctacaacaaagatccttaggatggccaagtgaaaacagattgtgtttaaagatttattcataatttatttggagcttagaatatattttctcataaaaatagtgattgacttgtcctgtccttgagagttgaaaatagtacacattctcaatttgccgttagtgtcggaatattcacataatttgggataccagattgcccaaaactcagttctgaatatattgagccttttatttttatctccaagtggcggtttttaaaactgaccttttaccttgatttaaaataatagtgcctggctgggcatggtggctcacgcctgtaatcccagcacttgaggccgaggtgggcagattaccagaggtcaggagtttgagaccagcctggccaacatgaagaaacaccgtctctactaaaaatacaaaaattagccaggtgtggtggtgcatgcctgtaatcctagctactcgggaggttgaggcgggataatcacttgaatccagggggtagaggttgcagtgagctgagatcgcaccactgccctcacgcctgggcgacagaggaagactccgtctcaaaaaataataaataggccgggtgcggtcactgatgcctgtaatcccagcactgtgggaggccgaggcgggaggatcagatgaggtcgggagtttgaggccagcctgaccaacatggagaaaccccgtctctactaaaaatacaaaaattagctgggcgtggtggcgcatgcctgtgatcccagcaactcgagaggctgcggcaggagaatcgcttgaaccggggaggcagaggttgtgatgagccaagattgcaccattgcactccagcctgggcaacaagagtgaaactgtctcaaaaatataataataataaagtaaaaaacagaataaaataataatgcctgccaccgccattaacagaccttgtactctaatgccaagctgtatatgggacagttgccagcatgtcttcactggcactataaaatatagccaagaagataggctctgagagtaagaagtctgtgttggttaggagtaattttgtcctggctctctggtataaagctctcaaatgtaaatccgggtgggataatggactcagctctgtctgcaacatgccactgtgcagagaagcactctcatgcataagctttttatgctgtaaactatagtagctgaaattaaatgccactttttcagaggtgaattaatggagagcctggtgaaattcaaagctttttgatgtataaaacttgataaatggaactattccatcaataggcgaagtataacaacctgtctacatagatagtatgtaatttctgcacaggtctctgtttagttaatacatcactgtatatcaatctagaatcttgctccaataaaggaacataaagttgtgttttggttttgtttttgtttgaaacggagtcttgctgtgtcgcccagagtgcagtggtgcaattttggctcactgcaacctcggcctcctggattcaagggattctcctgccttggcctcccaagtagctgggattacaggtgtgtgccaccacgcctggctaatttttgtatttttaatagagccagggtttcaccacgttgaccaggctcgtctcgaactcctgacctcaagtgatccatccgcctcagcctcccaaagttctgggattacagacgtgagtcattgggccttgccaaggtttttgggttttttttggaaaaaaaaaaaaaagtagtacacattcttagtgcagatgggcttggccagtaccacatgatggtgaagcagacgtgagacaacagggagaggcagggacagtgtgggctggagaccctgggcccccctactctatcctagtccattattatagccagatcttccactcggtcagatgatgatggaaatctggattttgtgtgaaatctctcagtttattgttgacaagtcaatttgaattttagaaacgtgatgtaggtcaactcttgagttggatggttctccgagctgccagtttacaactccgattctagcaaaagagacagcctctgccattttcagtacagctacaggaagatccttcagtggactagcttgtgacctgcttatctcctttttgtgcctcttgctcttcccacttcagcccaaactaagcacatgagctgtagccatcacagaagtaattctgacatccaacctaatgtactgtgatttcacctagcaagcttgagtgaatttgccaggtcttgcagagtggagcctacccgatgtctcgcctgatgccccttgctaggattcctttctttcagctggccgaatctttacacacatcgtacatcagctagttttaactccatgaagccttaaaaagaactagtgctcacaggtctaaaccttaagcacgtgcctgttccctgtactctggtaactcctgatacatttttatttgtatatccccgtgttcctactttcatatgtgactatgggaattagctaatttggaaggaattagcagttatctgctcataattagggtactacatccatttatccccacattccccagtaatttcagcttgtctgactttttttctaattggattagtctcattttgtttatgagtagatactttattgattttggatttttcagtttgcatggatcctcaggttctctgttattcctctacctttaaaccacgcatcagagctgtggaacagattgaggaagggcaaatggggtcaggccatttcatgagaaagagccaggagatacagaatggaggtgggaggaaggaatgaattaatatatacttctctagaatttcataccaggaatatacagaatgggaaagaattggggagctgagaggagtaaatcctaagaataaatgttgatttagtgactcataaacttgttttggccaactagaatctaacaactactgaacagttgtgttagccacagtcctgagcactttgtttattagcttatttaaactttacaacaaccccataaagtaggcattattgttattctgatactcttttaaaattgtaaccaacttctgtgcctaaaatcttaactcttatgccaatagctttcaaactttattgaccacatcttatagtgagaaatatatttaacattttacatacatagcgacctagagtagatacatagatacatgtaagtgacagaaaacttcataaaatagcatttcctgtgaataatgcactgtaatattttctatttagttttattaaaaaagctgttttgggccaactaaattggtatcagaactcactaatgtgttgtgacttacagtttgaaaaaacacagcattgagccatagtgcttaccatctgtattttatatagacacaagatgactttcctcatgtgtgcaaaggcaagatggggcatgagacaaagtacaaaccaaaccaagacacatgctcagatttacagacctttttgttaaatgttaaccagtgtaaaaatactgtaattcctttggggatttaaaggaatctgcctgtacaagagtagttacaaattaggaaatgacctcaaatactaatgttgctttgaaaaagagtcatggaaactcagggttggagagacttaaacattccatccagtcacccatgtgatgccttaatcatctctattttgcattcaatctgtgcttgagatactaccagttgagtgtggcttccctttcagaataatccattccatctttttgcctggcgggagggagcaagttcttttcaagattgagctgaaatttgcctcccagtaacttcattctcttcatcttcatcccatcccttgtatcacccttggagatgtttgaagaaaattctggagttctagctttgcagaatggagtccagtagggtgctcagcagccgtcacagatgcttcagcctcttggtaacccatgttatgctcatttccctggaacaggacctaatgcactgcacagcatttgcaacggcagatgagtatcatctgggaaatctgtctcaagatctggcctcccacggatatgttgaagtaacaagcttgcctagaggtacttcttcttgaacctggggccaagtatgttaaaatgtattggataattttcctatgatactatcttaagtatgtatttgtttgcaattcattttcttttgaaaggattgtatcataaaagtggatgttgaatctctttataaagatgacaaagttaagaattaaaatgtatttacagagaactcattaaaatcagtatgatttattaagattatttataggatcattattacttgaggtggtcagaggtcatactacttcatttctagcacattaagaagttattttagtttgtgtgtgtctgtgtgtgttttgtgttttttttttttttgttttttgggatggagtttcactcttgttgcccaggctggagtgcaatggcgcgatctcagctcactacaacttccgcctcccaggttcaagcgattttcctgcctcagcctccggagtagctaggattacaggcatgcgccaccacacctggctaatttttgtatttttagtagagatggtgtttctccatgttggtcaggctggcctcgaactcccaacctcatctaatcctcccgcctcggcctcccaaagtgctgggattacaggtttgagccaccacacccagcccgttattttagtcttatagaagaaccatgaagttgatagacatggggagagcctttaaaaaaaaaatttaccagctcaatctaatactttaaaacaattagttagccgggtgcagtagctcacgcctgtaattgcagcactttgggaggccgaggcgggcagatcacctgaggttgggagtttgagaccaacctgaccaacatagagaaacccctgtctctactaaaaatacaaataataataataataaaacgattagttagaagataaaaatgaaaaagaagaaaattaaaatgaacttaattgaggatttttatggtgaaatcaggaaggattcttgagaaatggcttgctttacattaattaaaaataatttaggccagccatggtggctcaggcctgtaatcccagcactttgggaggctgaggtgggtggatcatttgaggtcaggagttcgagaccagcctggccaacatggtgaaaccccatctctactaaaaatacaaaaattagccaggtatggtggcacgagcctgtagtcccagctacttgggagactgagacacaagaattgcttgaacctggagggtggaggttgcagtgagctgagatcatgccactgcactccaacctgggcgacagagtgagactctgtcttaaaaaataaataaataggccgggcgtgatgcctcatacctgtaatcctgcactctgggagactgagacaggcagatcacctgaggtcaggagtttcagaccagcctgtccaacatggtgaaaccccacctttactaaaaatacaaaaattagctgggcgtggtggtacgtgcctgtaatcccagctactcaggaggctgaggcaggacaatcacttgaacctgggaggtggaggttgcaatgagccaagatcgtgccactgcactccagcctgggtgacagagcgagactctgtctcaaaaataaataagttacttagaacattttgataaacttttacagtgaaactcaggatagctcaatacccagaacatttattaatttacctaagagtagcaaaaataggttgaaagccttcctataacagtggaaattcttaagactcaatcccatagaagatagttgaaatatcattgtgataatccaaacagaccgtttgtgtgattaggtgacaaaaacaagcatagttgacttagaaagacagagctatgtctagagccccttggtatgaaaatttgcctggaggtattgttggctgatgctgaaggctgccagctgtgtggtctgtgcttcacagaattgcaggcttcactgccctgggttgtttcagtcgattttattttgcttttggctgtgtaggcaaactctgtcctatgtaggatgtagtaattaacaatttagaaaaaaaaaaaaaatcacagttttggtctgtgtctgaattgcccatcacccagcctttaccagaaatttctgaagctttgaggatcctaattttatgttaattccgttaagacatacaaccttttgcaaattaatagtatattttttaattgatatattaacattggttgtaatttatattatggaatatatgcttatgataaatatcactatactaatatataaagcaacttcttatgatgaatattggtatattagtatatgttttaacaatacttaggccaggccccgtggctcatgcttgtaatgcactttgggaggccaaggcaggcagatggcttgagctgaggagttcacgaccagcctgggcaacatagtgagacctcatctctacaaaacataaacaaaaacttagccaggtgcggtggcacatgcctgtagtctaagctacttgggaggctgaggtgggtggggcgggggggggtcccttgagttcaggaggttgaggctgcattgagctgagatcatggcactgcgcttcagcctgggagacagagcaagaccctgtctcaaaaaaaacaaacaaacaaaaaaaaaactttttttttaaatagttgcaggtggctgcagtggtagcccctgtagtgattaaccttgaaatcacatatgttttgaagtggtcagtatctttatttctgtgtattttctattgccctactttttatactttaaaattcagcaggagtagtagtttgggaatgttaaaattgcattattaatgaaatggtatttataggaagagaatatattaatacttcttcaaattttatttttaattttgtagaaagaagtttaattcttgacacttagttgtatggaacctaagactttattaattatctggactagtgattattgaatcaaaatgggcatgaatgagctctaatattaatatcacaggttgttgaatgttttataaaagtaattgctgatctttttttggtggtcgtatttgcatttttatatattaaatcctttcagaggccttagtagaaagatggtgattgtgttacagagcactccatggtatataaagaaatgatcttaagtactttattacagtgtttataggtgactcttacaacttgtgttaccttgacatagcttttttgttcgtttattttaaatcacagatgcagcaaatattttggtgatgggtgtggaaaattctgcaaaagaaggtgatcctggaacaatattcttcttcaggtaagacaggaaagaaaccccattaggtgatgatgggtttgggtcaagtaattgtggtctttaaaggtgcaggcatacctttcttaacagtaaatgtgttcaaaatgtatttgtgatttaaatttatcatttaattcttatttaatctaggagagtttgtcacttttaggaattctctggtaaaccctcttataaagtaaagaatatttcaaacaagtgaatgatcttccccggggtgtctttctttgtaaattcggattttcatggactaaatttctggaaagcagccaatttcccattcatctttagtgccccttgtcagactcctgccccagggaaactcccgctacctccctgctgtctcttcttgccattttcttttttttctcccttcccctttggtagctctttaaagttttagcttacctctccagaggttttagactaggagactcacatacacacttattccttttatctaaaggccgactcaatactaaatactccacagtagctgcctgggaatgataacatgatagaaccgtgtgaaataatctcatttatcctcagcacaccgatgaaggtctattttgcacctgaggaaactgagggtcatagggattgagttacccatagtcatgagactaatacgtgacagaacagaaacacatggaccatctgtaggaatccaaagttgagtaaagttcttgtggtcataatccttatagttgatgataagtggaagttcttttttcctttcaatgcctaccttccttttgaccccatctttagagagaatcaagattccaacatttaattcaagtagagtaatagcatccctgttgttccgagtgaggaatttagatttgtgagggactctacatcagcactgtctagcagaaatacagtgcaagcctcggctgggcacggtggcttatgcctgtaatcccagcactttgggaggctgaggcaggcagatcacaaggtcaggagtttgagaccagcctggccaacatggtgaaaccctgtctctactaaaaatacaaaaaattagccaggcacatggtggagggtgcctgtaatcccagctactcaggaggctgaggcaggagattcacttgaatgcgggaggcgatggttgtggtcagctgagatcgtgccattgcactccagcctagtgacagagtgagactctgcctcaaagaaaaaaaaaaaaagaaagaaagaaatataatgcaagcctcatatgtaatgatacattttccagtaaccacattttaaatatttttaaaaagataaaattaattttgaacaacacaaatatgtttcttaacatattaacatgaaattaatttaacaatgtattttattcaacccagcatatctaaaatattatcatttcaacatgtaattaataatgatattttttcacttgtcatactaagtctttgaattttgctgtgtattgtacacttacagcgcatctcagtttgcaccaggcatgtttcaagcactcaatagccacatgtggcctctgagtaccacattgcacagcacagtgcattcctctggttggaggaatatgcagttcaccagacctctcttctgcctggaagggattctctgaactgatactgtggctgtggcttgaaatacctctcaaatccgtatcctgaaaccttatccctgcctattgtaacagcttattgtctccctgcctgcctgctcacccaccaccagtctgtttgtctattgtaagcagggtcattcttcagtggccatttctgaccactacactctcctgcctaaatttccacggactatgaacaaattctctatcactgcataaagttcccttctggattgtcccctgcttgcctctttatcctgcttgcccactgcttgaccacatctgcagccacgcagctactggctgtttattctgagatgctgctctgctccgtcccacctcctctctgagcctgtgtgtcccctctgctatgttgtctcctcttgttttctcatttggctgcctctgctagtcctttagcaaaggggtccctctggtgtacatctcatggtatactctgcatactcttgtagcactgatcacacactattgtaattggtggtctaagtgtcagtcccagtcttttctagattgaggataggaatgaaatcatacttatgtttctatcacaaatactaagcatggacccacacatatactaagtactttagaaatgtttcaagaataacgtggagccattaatatttttacctttcttttatttcctcctttccttcctccagtgcactgaccctgagctatagctcctgtttttatttactacctgaaacagcttcaacacgtcaaacttgagaaatcaaaacaaatgcattcgtagttttagaccctaaataatgttaaagccataatcggattcagagggcctcctgtggtgtcactgtagttctgttccaagcactgtgagcgtggggagcattattccatagaggcctttaaccatctgatgcttaaattaaccaccatctctttattccacaaaaatccaggcatagccctttattccttgcacatagtagagtctgcctaatgagagctaagacaaggtctcaaaaaatttccttattctgatttctgtggatcagaattgaaccaggtatgaaagagtctacatacgtgaagttatatagtattacaataatggctatttgtttggcaaaccatgtgagaaatcataaattttgaggaggtcaggttttatcaagaattttattttagctcttattgtaggaagttcacctaaggaccataatatcaaattagtaagtaccatcatattttgaaaaatcgcatcctgtatacattctagaagttacatggttttatatacgaccctaaagaatgtattccatctgtatcttagttgtttcttttatttttttaaatcagggaaggagctgctgtgttttggaatgtgaaagacaaaactgtaagtgtaaataaaaatgtgaaaatataaaaatttagttttgtgagaatgaattgttaattagcacatactgaaacattagaagggaaattaatagattatgcacaacttatttgctctgcattacatgatacttatcagtttcatcttccaaaatatattgtattttgggttaagatttcctgctttttcctttctctagacacacactaatttgtggagaatcagaaccatcctaactatactgcagacagaagtactgtagactttgcatgttgtactatacaaaatgtatgcagttaattggaagctggttgcattgagtgttcttttaagtcaagttgtctagaacttactactcatgggaaataattttttcaagatccaaatcaagatttgtttaatacaaccattttagaggcaaattggtaatctacattaaagctttatatttaacccagtaattttacacctagaaatttatccaaaggaaataatcataactattcgtgatgatttttgtacaaaaatgttcatcagagcaatatttataatggcaaaaattagaaattaccaaaatacacaataatagtttgttaaatcatccatatactacagatatactatagatccccttagaaatcatgtaaaaaaatatctatttctgggagattgcctatatatataatacagttacattaaaagagcagattatacggccaggcatggtggctcacgcctgtaatcccagcactttgggagaccaaggccggcaggtatcttgaggccaggagttcgagaccagcctggccaacatggtgaaccccatgtctactaaaaatacaaaaattagctgggcgtggtggtgcacacctgtaatcccagctactcgggtagctgaggcacaagaatcgcttaaaccttggaggcagaggttgcagtgagccaaggtcagaccattgcactccagcctgggagacagaggcatactcttgtcttcaaaaaaaaaaaaaagcgggttacaaaatataaccaatataatctcagaactggttaaaaaacatgctttatacaatcccaattttacgaaaaggaaacacacacagtaggtggtcgggaagggaacttagagaaaagaaaatataaatgaccaataaatttaagaaaatacaagttggctatttgaagttgcaaagatgtaaaaggctgataaaccccatttcttaagagtagtttcataaatgttgagattctacatttggaaaaactactttggagagcaggctagcaatattataagtgtgggccaggtgtggtaactcatacctgtaatcgtatcactttgggagtctggggtgggaggatcacttaagctcaggagttccagaccagcctgaacaacacagtgagatcccatctctacaaaaagtttttagaagttagccaggtgtggtagtgtgtacctgtagtcccagctacttgggaggctaaggcagggggatcgctcgaacccaggagtttgaggctgcaatgagctatgattgcatcactgcactccagcctgggtgacaaggtgagaccctgtctgttacatatatacatattgtgtaagtccacatatcttttgatctagcaattcctaaagaagtattcccacaaagccatgaagacctttgcacaagtgtggcacatcgcaacattgtaatggagagtagaaaaaattccccatggaggacacacctaggttggttaaataaattgcagttcgtctgtaaaggaaaatagtgttgaaaatgtcatgtgcataatatgatcctattttacataaaaagcagcataaatatgtacatatatacacataaaaagtctggaaggatatgcaccaagtttaatcatggttgcctctggggattaggatttcagtacagaagagagaaagagatgatcacctcccacacctgtgtggcttaattttttattagtatgttgggctttactttttattttttatttatttatttttttgagatagggtcttgctctgtcacaccggctgacattggctcactgcaaccgccacctcccaggctcaagccagcctctcaggtagctgggactacaggtgtacatcaccacacccagataatttttgtatttttttgtagagacaggattttgccacgttgcccaggctggtcttgaacttttgagctcaaggatccacccgcctctgcctcccaaaatgctgggattattaaagagatttaaagaatacaaattataatattactagtgattttccttgggttgtgggataatgataaccttgattttcttctccattctcatctgtgttttccaaatgtaaaaacaaatgaacatgtcatcctgattactttaatatcacaatggatttgatttgccttttccttaaaaacatgcaacagaaataatgcctgtaagtgtaatgaagactgttataagcattaaaatcataacatacttgaactgagggagtcagttatgatttcagattaatcttccttttcttctagatgaagcatgtgatgaaagttctagaaaaacatgaaattcagccctatgaaatcgcactggtacactgggaaaatgaagaacttaactacataaaaatagagtaagcaacttttcatcaaatttatgaaaggggcacttggaataaattaggtaaagcaatagaggagacaaattattatgcatatggaaactttttttttttttttgagacggagtctcactctgtcgcccaggatggagtgcagtggcacaatctcggctcactgcaacctctgcctcccgggttcaagcaattctcctgcctcagcctcctgagtaagtgggactacaggtgtgcaccaccacgcccagctaattttttgtatttttagtagagacagggtttcaccatgttggccaggatggtctggatctcgacctggtgatccgcccacctcagcctctcaaagtgctgggattacaggcgtgagccactggacctggcctggaaacttacttttaagaaaaaagtggccaggcgtggtagctcacacctgtaatcccagcactttgggaggctgaggcaggtggattacctgaggtcaggagttcaggaccagcctggccaacatggtgaaaccccatctctactaaaaaatacaaaaattagctggttatggtggcgggtgcttgtaatcccagctactcgggaggctgagacaggagaattgcttgaacctgggaggcggaggttgcagtgagccgagatcacgccattgcactccagccagggtgacaagagtgaaactccgtctcaaaaaaaaagaggaaaaagattactggtacaaatacaaagtctaaaccatataataaatattagaagataaacataattttttgaacttctcaggctatccacaagttaaaacaagtcagtagtatagccccaaaatggaaatgttaagtttctaatcagcctaatccaataaaatagtatgcatttatcaaatgaacctatcaaattattccagtaaatttttctcttaatccagttttttcctattgattttggggggtgggggtatgaaaaggaagtatagtgaggggtcaatctaagagacccacttgtagaagtgtgggtgctggaagaagtgggacctggtgtaccagtttcactaagataaatgggtaggcaacagactagctgattttcctgactcagccagagggaaaaaatgaagagatgttagggccgagacagaggcagtatgaacaagatggtagtgtctttttcctcatggagttacctgtctagtgaaatatgagtctttgcaggttcttaagaaaggtagtgttagccagatttggtggctcacacctgtaatctcagcactttgggaggccagggtgggaggatcaactgagtcaggagttcaagacagcttggccaacatggcgaaaccccatctctactaaaaatacaaaaattacccgggcatagtggcgagtgtctgtgatcccagctacttgggaggcggaggcggaggcagagaattgcttgaacctgggaggcagaggttgccatgacctgagatcgcaccactgcactccagcctgtgcaacagagtgagactctgtctcaaaaaaaaaaaaaaagcgttaaaagcagagctttgggaagacttggaagagagacagagactagctatagaaagaccagatggggataagagctgagtaatcagcgctcaccaccaatagggccagtcacggttttctaagtaagtgccttccatgtattatttcatttaatcctggggaaaaccctataattgcagctaactggctttccgatgagatttattgaatcctgtcttgccaaagggcacctgactgtgagtcagcctgagcccagtggtggctgcagtcagaggtaaggatataaacctgagagagacagcaaatgagcagcctgtagttttattatctttagtagttactcagcccttggcctgcagatacagctcctgtgaatcccctttctgtgttctattaggtttacattaaaatggcaaaaaccgcgattacttttgcaccaaccaaatacttccatatccaactactgctagacccttgtgtgtgtgtgtgtgtacgcttatccacacacacacacacacgttactgtacagtctgtgaggagtaaaatcctcagtgcttaggatcccagagtcagttattttgtttcgtcagaaagactgtcctggctgccacctacatggttattatgtgagttctgccatgattccagggatctgctcagctctgtggcatgggcccagtttactcataaagcatcttgtgaccaagcacagtggctcatgcctgtaatcccaacactttgagaggccaaggcgggcagatcacttgaggtcaggagttcaagaccagcctggccaacatggtgaagccctgtctgtactacaaatataaaaattagctggatgtggtggtgcactcctgtaatcccagctactcaggaggctgaggcaggagaatcgctggaacccaggaggcggaggttgcagtgagcgaagatcacgccactacactccagtctgggtgacagagcaagactccgtctcaaaaaaaaagacctcttgtgactgctgtctttgctttccttcctccatctgaggctgtcatagcagatgccgccctccatcaggccccttgtccccctccctttggccgtcacttcttgtctgacatcttttgtgaaggtttaccctgtcttttttccatttgcttgtgatgtttatattcacacattccgctcttcccctgtcccctgtctaggattctccacagtcacatactcatttttcacaacttccttgcctccctccccaaccccatcatgtcagtgtgattttagattacactccatatatagttttatatgcagcattttttcacatagaaatttactgtgaacgttctcctttttattaactatccttccaaaacacacttttaagtttttcttgtgtggagtgactattactgagccaacccctactgaacatttggtttatttcctaattttttactcttaaacactgaccttttttttttttttggagacagagtcttgctcagtctcccaggctggagtgcagtggcgtgatttcggcttactgcaagctccgcctcccgggttcactccattctcctgcctcagcctcccgagtagctgggactacaggcgcccgccaccacacccggctaattttattttgtgttttgagtagagacggggtttcaccatgttagccaggatggtctcaatctcctgacctcgtgatccacctgcctcggcctcccggagtgctggggttacaggcgtgagccaccgtgcccagccaacactgaccatttttttaaaagttttcagctgggcaaggtggctcgcacctgtagtcgcaccactttgggaggccgaggtgggtggatcatttgaggtcaggaattcaagaccagcctggccaacatggtgaaactctatctctattaaaaatacaaaaaaaattagctgggtgtggttacgcatgcctgtaatcccagctactagggaggctgaggcaggagaatcgcttgaacctaggagactgaggttgcagtgagctgagatcgcaccactgcactctagcctgggcggcagagtgagactgtctcaaaaaaaaaaaaaaaagttttcttgtatacaaatttttctttgcatcttagattatttccttaggataaactcctagaaagggaattacctggaccaaaggatatgagaacatttgtaacactcttgatacaaattgtcaaaatgacctccagaaagatgatatggtgtctttttcaaaggaaaagttaaagtgctttttaagatttagaaggtattatctttttgcttttcacaggggacagtcaaaacttcacaggggggaaatcaagttaaattcagagctggatttagatgatgccattctagagaagtttgctttctccaatgctctatgcctttctggtaagttactactgcttatgggatagggtactacagttgtcatttcactgagggaagtttaaatagtcacgattttggtatattttcagaatactcaacaaagccttagcattccttttcctttttttccctccatcagaaaaaatatctagtataaaagatagtactgtgctgaagttactcattccttattaattgtattaataaagcttaacctctccaaaagtattttttagatgatgattatattagcctttgtttttttctcttctctctatgcgattgttattcttagatagtctctaatccagacagagaagcccagccttgtgtgactgggcacaggtcccagtgtagaaaaacatactctagtgttccataggaatgggacccagagtcacagtggctataagtttgttctgaaagatccacatcccgaataaaactatacaagttctttaagaatttcttttgccagcagtctaccttaggtggctgctgcagcgtcctgtccatcccactctgaggggcttcggagatttctgaggtttactcttagtcctgaggagtgaaggggaggccaggaaagtcttagtcgcgccctatctgcagagctacccatggtatcaaggtgtaccctaccctcctcagtttccaagatgtaatactagaaaatcaagagttctactaaatgtagctttggtcttccaatagggcatggaaagcgattcagtttcctctatccactttaattctgtcctttatgataattaactattcttaaattatattttcaaggttttagtactttttcttaaactattactgaaatagtagtgaagatgctgtgcaattatgtattttatatacatgtgaatatgatgataaagaaatgttccattattaatttttttcccagtaaaactggcaatttgggaagcatcactggataaatttattgaatctattcagtcaattcctgaggtaattatatcaattttatgcttattcaaggattgatttttatatgtaaaaaatatgaatttcccaatataacaatatatagctatccatcagtatccatgggagatttgttccaagaccccactggataccagaatctaccagtgtccaaatccctgatataaaatggtatatatttgcatataacctatgcatatcctcatgtatactttcaaccatctctagattacctaaaatacctaatataatgtaaatactatgtaaatagttgttatactgtattatttaggaaataataacaagaaaaaacagtttgtacatgttcggtacagatgcaaccattcttttttctcaaaatactgtcaatttgcagttggttgaatctgcagttgcagaacttatagagggccgattgtttaggagtacaacaacattattacaaacaataagaaaactacagtaaacttaagaactcccagttacatataaaatgacaaattaagaaacttcatattgattactttttactttttaaaacttcaaattgtttcctctgttggtgcagtattttttttttaatattaatataattgaaatggggtctggccatgttgcccaggctggtcttgaactcctgggctcaagcgatcctcctgcctcggcctcccaaagttctagcattacaggccacgagccaccatgcccgtcagttgcagtatttttaatgtaactgaattaaagaaaaaagtgaaatgtttctctctgagaatggaaattatgaccacttttcctgatttaagaaagtgttttgctaaattatgagaaaaatagtggtatgaaaaatacatataaagttatattgaaatttcagtatacattaaaaatcatcatattgtaattaactgtgtctttattgtgaaagagtaatctaattatacttcggaaaggaggccctgcttttctactaagagattaggaatgtatatatcattgaaaatgctgatgagaagggaaatgaaaaaagagaatatacaatttctacctaataaaattatgaaatttcaaggtgagttaagacattaatctgggagacagccatcctaaaaaatatttacataggatccaaattatgccacttcagattttgccctgttgacctaatgcttattagaaagagagatacatggttttttggtttttccgattccctctcaactaggctttaaaagctgggaagaaagtgaaactatctcatgaagaagttatgcagaaaatcggtgaactctttgctctaaggtaaaagttttctctctaaataaaatatttcatatatttaacaatctcaagaaaacattcccatagttctgtggtgaagagcaaacatttacacgtttatgggaactgtagctgttttcatttcattgattataagcagggagaactcttacccattagaagtagttgggctgtgttaagactgtactgaaagaaatcacgcatgtgcaaaagagatcacgattcatctacattaaacccacattaaggagcacagtaggtgttctttgaaggtagaaagacatattcctgaatttggttaatgggaattctctgtaaaaatatatcactgcatcataatgctaaataggcttaattgctacagaaaagtttctttgaatctgagacaccaagatgccactggagagaaaaactgctgccagttaaactatgacaatactttttttatcagaggattaaaattttacacttactgaaatatcttttaatcttagctggatataaattatatcacattccctcttgggcatatatgaaaaggaaagcataagaaaataaattatttaaggcaaagacaagtaagtctcaagtgccacctgtcagacaccattaattttaagatgcctcgagatgttaaaatgggaataactatgtctaaaaactgatgaatcattttaaataagtatctggaaaggttttcagcttttattattcttgtagttgtcccaggatttacggaatgaaacatcccggatgttggtgtttttctcacaggcagcattgtccagtttatcccttctagcatgtggaatgagttaccagagctcactgcaaatgttcacctaagacttgtttttccatattctccttagatgctctgcctggagagaagtgatacagtgtttcattgtctgtgtatctctcatagctcaggacctatagttcagggtaccaacaaaacttaaaaacccatccatcaggagcatcctgcagcatatctgaagcctcaaattctctgagaagtagggtagagagattcttctctcctgttctcttggtcatgcaagcagaaattgatgtagtgaattataatatccaaactgaatagttaggactaaatatacgtaggtttgtgaatagtttctataaaggcttacttttactatcctgtttccttacctgtacaataaaaatgcttatttgttaatataaggaatgtgatacatctgtgaaaataaacatggcagataatattagattaaaaaactaaatctaaatttatatagggtatgatcccatttgtgtaagcaaataaaaatattcatgtttatctttatatgcatacacatgtacatgtgtttgcttgcacacacatgcatgtatgaatacagaaagatctggaagtacacagcaaagtgtctctacaggcctgtccttggggagaataaaggatttaagtagtgtggtagcataagagagcctaccatttttctgaatccttctctaggatattttccttttttttttaatcgtgaacaggtatgtatgtgttactttttttttttttttttttaaacagggtcttgcttgtcacccagactagagtgcagtggcatgatcatagctcaccaaagccttgatctcctgggctcagggattcctcctgcctcaccctcctgggtagctgggaccacaggagtgctccaccacacccagctaattttaaaaataatttgtagagacagggtctcaaacccttgctcaagcaatcctcctccctaggcctcccaaagtgctgggattacaggtgtgagccaccacatcagtttatgtgtactttcataacttagatttttatttagttaaacatctaagtgtaaggccaggcacggtggctcacacctgtaatgccagcactttgggaggctgagacaggtggattgcttgaggctgggagctcgagaccagcctggctaacatgatgaaaccccatctctaccaaaaatacaaaaattagccaggaatggtggtgtgcgcctgtaatcccagcttcttgggaggctgaggcatgagaattggttgaacccaggaggcgaaggttgcagtggagccaggatcatgccactgcactccagcctgggcgacagagcaagattctgtctcaaaaaagaaaaaggctgggcacggtggctcacatctgtaatcccaacactttgggaggccgaggccagtggatcatctgaggtcaggagttcaagaccagcctgaccaacatggagaaaccccatctttactaaaaatacaaaattagccgggcgtggtggcacatgcctgtaatcctagctactcgggaggctgaggcaggagaattgcttgaacccaagaggtggaggttgtggtgagccaagatcgcgccaatacactccagcctgggcaacaagaacaaaactctgtctcagaaaaaaaagtaagcacagacttcttatattaaaatgtagaaattaagagagagagtgtgtatgtttatgcttgcttgtctagtgtttgcataaacactggaaggatacagcggaaactagaagggattactgatagggaaagatacagataagaataagagttaagatttatcaatttttacctgtttatatcttgatctgctcaggaggctgaggcaggaagatcacttgagcccaggagtttgaggctgcggtaagctatgattgtgtcactgcaccccaaactgggtgacatatgaagacattatctctaaaaaaattttttaaataaaaaacaaaaaagtgtggacatattaaattttttttttatttgagatggggtctcactatgttgcctaggctggagtacagtgtcacagtcttggctcactgcagcctctgcctccgaggttcacatgatcctcccacctcagcctcccaagtagctgggactacaggcatacaccaccacacctggctagttcttgtattttttgtagagatagggtttcgctgtgctgtccaggttggtcttgaactcacagactcgagcaatctgcccgccttggccttccaaagtgctgggattacaggcatgaaccaccatgcctggccctaaaatttttaataaaaaaagtttaggctgggaatggtggctcacacctgtaatcccagcactttgggaggctgaggtaggcagatcacgtgaggtcaggagttcgagaccagcctggccaacttggtaaaaccctttactaaaaatacaaaaaattagccaggtgtgatggtaggcacctgtaatcccagctacttgggaggctgaggcaggagaattgcttaaatctgggaggcagaggttgcagtgagctgagatcatgccattgtactccagcctgggtgacaagagtgactctgtctcaaaaaaaaaaaaaaaattgaaaacaaaatgagtttttttctgtgtacttcataaataatgttggtattaaagattgaattaatttggttcagaagtttgaaactcatttgtaaattttatttacatgtttgttggcagtattttgcaaaggtcagcattaacaaatgttttcagccacatgcaatgccacatgcctgtagttccagctacatgggaggctgaggcaggagaacagcttgagcccaggagttcagtttgcagtgagttgtgatcacaccactgcactccatcccgggtaacatagcaagaccctctctcttaccaaaaaaaaaaaagttttcataaagcactatgtaaatattaaatacaatagaaacaatgatttttaattcaagataaataaaaagttataattttcctttttaaaggcaccgtataaacttgagttcagacttcctgattactcctgatttctactgggacagagaaaacctggaaggactttacgataaaacgtgtcaattccttagcattggccgaagagttaaggtacgtattttgcacttctaatgagagaaaaagacacgttgtcgcctataagttgaatatgtttaactgcttgcagagaaatatcttgtttgacttccattcaaatctctttatatttccccttcttgtcctctgtacagtcacttcaattttttgtgtcaaaggatcttctgatattagctctacagactagataaggttggtgaataagatgagagtttggaagcctaatggtccatcagtaagttcttgtcaagtttcaagcaagagttcatgactgcttctgatctgtcatggtgacagtgagaatagaaataaatttaagaaagaatcatgtaagacaaatcaagtgatgggtaataagaggccatggagaagaaagaataaaggatgactgatgtttgcctggaggtgacaagtagaaaggtggaaaaacaataatgagaggtcagagaggggaggtgacagactaaatctaagatatgctgagattagagtagcaacaagatatccaattagctccgtcatgcaggcatttagaagggcagaagcaaagtcgggaaaagagacgtgtattaagaaatcccagcactttgggaggctgaggcggatggatcacctgaggttgggagtttgagaccagcctggccaacatggcgaaaccctgtctctactaaaaatacaaaaattagccaggcatggtggcattctcctatagtccgagctactcgagaggctgaggcaggagaatcacttgaacccaggaggtggaggttgcagtgagccaaggtcgagccagtgcactccagcctggatgacagagtgagactccgtctcaaaaaaaaaaaaaaaaaaaaagctgtagtgatggaggtagaccacatggggaaagagcatagaaaacagaaaattgacattagtacaatgtgtgcacatagttctgtgacattttgccacatctatagatccatgcaaccacatgatcaagacacaaaactgtgccaggtgcggtggctcatgcctgtaaccccagcactttgtgaggctagaggtgggcagatcacttgaggtcaagagttcgagacctgcctggccaatatggtaaaacgctgtctctactaaaaatacaaaaattagctgggtgtggtggcgcgtgcctgtagtcccagctactcgggaggctgaggcagcagaatcgcttgaacccaggaagtggaggttgcagtgagctgaggtcatgccattgcactccagcctgggcgttgcagcgagactccatctcaaaaaaaacaaaacaaaaagacacaaaactgttttatcacttttcctcatgctaccctgtatagtcacactgccctccccctacccggactgtccctaacccctggcagtgagtaatctcttctccatctccataattttgtcattttgaggatgttatatagatagtcatacagtatgtgactttttttttttttttttttttgagacggagtcttgctctgttgcccaggctggagtgcagtggctcaatcttggctcattgcaagctctgcctcccgggttcacgccattctcctgcctcagcctcctgagtaggtgggactacaggcacccgccaccaagcccagctaatttttttttgtatttttagtagagatggggtttcactgtgtttagccaggatggtctcgatctgtatgtgactttttaactggcttttttcacagagcataatgccctcaacttggatccatccaaattgttgcttgtatcaaagttcctgtcttcctgtggttactgaaacaattttttggtatttcattttgatgttactttttaatatatctcgttgcatagatatttagtagttgctctggttattacatcttacgtatataacttattacaatctactgatttcaacatcttgcagattaaatgaagtatagaatctttatttccctaatggatgattggatgcagaaaaaaaaaaagaattcttatttcttttatattcctttacccttccgtatttataattttcttaactattcttctgcagacatagaaaacttcatcagataatgttataatttttgcttcaaccatcaaacataatttagaaaactaagaaaagcaaagtctgttgtatgtgcccatgtttttattctttctgttcttttctccttctgatcttctaagatttcttttactgtttttttttttcaagaactttatttagccattcttttaaggtaagtctagtgagacaaattctcttagtttgtcttcatctgagagtgtattaattttctcttcattcttgcaggatattttcctagaaataggattctaggtagacagttttctttctttcagcacctgaaaaatgccatgccacttccttctgacctccatggtttctgacggaaatctgccataattctatgacatctacattttatcttttattatcatttcacaaggtctttgaggctctgttcacttcttttccagtatattttgtctctgttaagattgggtaatgtcctttgtttcatcttctagttgattgattccttcctctgttacattcgttctgctgcccaacattgagtttatttcatttattatatttttcagttctaaaatttccatgtttttttatttgtatcttctgtttctttgcagagacttcctgctttttcgtttgtttcaaatgtgttcagaattgcttgttgaatcatttttatgatggttgctctaacatcatctaataatacctaacctcagatacctcttgatattagtgtctactgattgtcttttctgattccctccaactaattttaatacctccagtttccctcattgcctcaagtgttctggcttgatatacaaggtccttcctattgtttctgtttttcaatcatatttcctaccaatccccacattcaccttgtatcacatcaaaaataagtgattagcctgggaaacacaatgagacctcatttctactaaccttttttttaaaaaaattagccaggtataatggcatgtgcctgtagtctcagctaccctgggaggttgaggcaggaggattgctttagcccaggagtttgaggctgcagtgagccatgatcacgccactacatcccagtctaggtgacagagtgagaccctgtctcaaaaaaataaaaataaaaaatacatgatttataatttcaaaaacctaccatggcttattgaatgctatgttccactttagtgtctacatttttttcctctaagctagacaccgccccttgcaaaaccacatcaaagctatctgcagttgtcactgatcttggcaccacctattcctctgtaggtgtcttccagcacaggacagtagagatcatcaccactcggcaagaaaaccaagctatgttgcttttagctgacacagaaagattgattagtgatggtttaggaatcaaattcagtggactccatcaacacagttttagataacagaggtgtaattagacaccgatttgacagtccaactgtctggtcaaacatgaaaagcactggactttcctggttgtcgactgtgcacacaggctgaagatccagaggaggaaagggagggatactaaaagctttatacagttgaggtatttcctgtggttgtgttagctattgctgtgtaacaaattaccccaaaacttggtggactgaaacaccacttactggctgggcacggtggctcacgcctgttaccccagcactttggtaggccaaggcaggcaggtcacatgaggccaggagttcaagaccagcctggccaacatggtgaaaccccataaattagtcgggcatggtggcatgcacctgtagtcccaagtagctgactctggaggctgaggcatgagaatcacttgaacccaggaggcagaggttggactgagctgagactgcaccactgcactccagcctgggtgacagagtgagactgtctcaaaaaataaaaagaaaaaagaaacaccacttactatttaagtttttgtgggtcaggaatcagtgcagcttagctgggtcctctgattctgtgtttctcacaaggctgcagtcatctcagagattcacttcctagttcactcgtggttattggctggatttggttcctctcaggctattagattgaggcctcagttcctcataagctgatgtccagaagcttctccatagagcatctcacaacatggcagtgtgcttcatcagatgaacaagtaggggagtgatatggtttagatctgtatccctgcccaaatcttgtgtcgaatggtaatgcccgtgttggaggtgggtcctggtgggggggtgactggatcatcagggtagatttctcatgagtggtttggcaccatccccttggtgctgttcttgtgacagtgagttctcgtgaggttgtttaaaagtgtgtagcacctgcatctccccttgttcgctcttcttcgcttctgccatgtaaggtacctgctctcccttcaccttccactatgattgtaagtttctggaggcttccccagaagccaagcacatgccagcatcatgcttcctgtagaacagtgcagaaccatgagccaattaggcctcttttctttataaattaccccgtctcaggtatttctttatagcagtgagagactggactaatacagagagcaagagagactgtcaggaagagaatgctagtaaaacagaagtcacagtcttttgcaacctaatcacagaagtgatttttgctgtgctctctttgttaaaaacaagttagggccaggcacagtggctcatgcttataatcctagccctttgggaggctgagatgggagggtcacttgaggccaggagttcaagaccagcctggtcaacatagtgatacccccgcccatctctttaaaaaaaaaaaaaaattaaaaagcaagttatggccagtcgtggtggctcacacctgtaatcccagcacttcgggaggccgaggtgagtggatcacctgaggtcaggagttcaaggccagcgtggctaacatggtgaaaccctgtctctactaaaaatacaaaaattagctgggcatggtggtggacgcctgtaatcccagtcacttgggaggctgaggcaggaaaatcgcttgaacctaaggggggcagaggttgcagtgagccaagatcagcctggatgaaacagcaaaacttcgtctcaagaaaaaaaaaggcaagttattagactgagcctacgctcgagggtaggggatgacacaaaagtgaacaccaggaggtggggagtctttgggtggcatcttagaaatctgcctaccacattggttttgaaaaagatggagaaaattctggaaacctactttatgacccctgacctacacgatcctcatactaccagttactttaatggttgccagcttcaggccatcaaagttggtggaaccattactgatctcattgtgttctgaattgtcagcaagccaaatgccgctggtctcagcttagacgagaacgttaatgccaaatttaatgatctgatcttttacctgggtggcattttttatctgtccatcctcagtattcaagatggaattactgaagtcaagtctgcaactgaggatacccacctgagtgaagagtaccttgacaactaagtggtcagctgtttcatggctgagatcaactgcagttatagaaaggacacccgttgagaacaagcaggctgcccaagccccttctgcctctactgaatgtgctcttcattctggtatcgaggccaatttgagattgagtccctccatgaaggggttcacatctatacctctgtgcacatgagcagctggaagaatcaaaagccaccccagtccctggcaccctacacctgtggagaaagccataagcaatgtcacccagacatatcaccagtccttcacgggtggctctatttatatccccaagatttaaaatctcttatagggccgggcatggtggctcacacctgtaatcccagcactttgggaggccaaggtgggaggatcgcttgaggccaggagttcaagaccagcctggccaacatggtgaaacctgtctctactaaaaatacaaaaattagccgggcctggtggtgcatgcctgtgatcccaggtacttgaggggctgaggcactagaatcacttgaacttgggaggcaaaggttccgatgagctgagattgcaccactgcactccagcctgggtgacagagtgagacttatctccaaaaaaataattaataaataagataaagtctcctacaggaagaactagaactgaatttatttacaggcagtatgatcttgtatgtagaagacctggaagaatctacaaagaagctaccagaataagtgagtttatcaaggtctcaagatcaatgtataaaaacggttatctttcgttatactgcaaatacacaattggaaaatgaaattttaaaacttctgtttatagtagcacccaaaacttgaattactcaggtttgaattgagtgattcaactattccagaataatattaattaatcaattggagtaatctgagcaagtaattgttctttatttcattccccagtctcactgtgggacatcttttttggtgttaagtcttctgcatgagttatgaagcatacctaaaaggtctcaaactacctttctcagagttttttctcagcatcccgaaggcagttcagactcgttggattatgtcaaggttatttagaaggggttgagagttcaccctgccttaggctcagcatagtgctggcattatacataatacaaaagaaaagtaagaattggtcctgcccttcagccagctttacagtcttctaagaaaacagatggaacaggccgggtgcggtggctcatgcctgtaatcccagcattttgggaggccaaggagggcggatcacaaggtcaggagatccagaccatcctggctaacatggtgagaccccgtctctactaaaaatacaaaaaaattagctgggcgtggtggcgggcgtctgtagtcccagctactcgggaggctgaggcaggagaatggcgtgaacccgggagggagagcttgcagtgagcggagattgtgccactgcagtccagcctgggtgacagagcaagactccgcctcaaaaaaaaaaaaaaatggaacaaagagtagcggggttttttattccccctcaaaaagtagaagaaagggtcttgagaaaataggggtgagtaggcataagacatgctaaaaagttgagtacagaggtccagatgcagagagcagttacacagtgtcatgggacagaaactagttggcagtggatccctcgctccattttctcacgtcagtatcccctgaagtcctgtcgctgaggcttctgtccccatgccaccttctccgtgaacacttgtttgttgtcgtgacttctaatcccaccttctcctggggattttcaaatgtctctctcatcccagtctcttgtctgccttccagacttttccagttgcccctcaatctcacagatcttcctcatttacatatctcgtcgcatccttttaaaaattgtgtgtaccattttccactagaatgtaagccccatgagatcggagaccatgattattttcttgcctgttcttggcaaaggcctcacatacagtatgtccgcaagaaatatttgtagaattagtcaatgattaaaatttcaaaatgaaacttttgaaattcccccccaccccagaaaatggtaaaccttttcagttctctatttcagctcatgggaggaccttctagcctcacctatctagtcattcaaccagaaacttaaaagtcatctgggtgtcctttttctccttcaccttccatatccagtcaaacaatctttttagttccctctaagtatcatggattcattagcaaacatttattgaaagcctgtatgataggccctaggctggtgaaacaggggaataccatactgacccgtcttcaagcccccaactattaatgttcatccacacagcccctcatcttcctttcccacctggacttgtctgattccttcttgactctctcagtctccagactggaccttttcccagtctctctgcaccctttggctgcaagacagacacatgtctatttcaccattctgtctcctctgcccagcgtagtacagtaaatgttaaaacaagtacttccagactgaacaaaggcctccccattacctgcagaatgaagttcagatattctagcatgacatgctactttcctactgctgcttaacagaaatttgtcatcttactgttctgtaggtcagaagtctggcatggcctaaagttaagatgttgattcctctttggagactgcgagtggaatccatttcctcaccttttccagtgactggaggccacccatattccttgctcatggccccctcctccatctagcaaaggcctgtggaatcctcatattgtatcattctgaactcttctgccccgcatttccacttttaaggacccttgtgattacattgggcttacccagataatctaggattatctcatcttaaggtcagctaattaataactttaatttcttatacaatcttaattctcctttgccatattatattcacaggttccaagaattaggacataaatctctttggggtgggggacatggttctgcctataccatatgtagtacacagtacctctcacaatctggtactaacttctttttttctgagatggagttcaatgccgtggtcttggctcactgcaaccaccgactcctgggttcaagtgattctcctgcctcagcctcccaaatagctgggattacaggtgcctgccaccacacccagctaatttttctatttttagtagagacggggtttcgctatgttggccatgctggtcttaaactgacctcaagtgatccgcctgccttggcctcccaaaatgctgagattacagatgggagccaccgcccccagctgacttaccttcttaacctcacttccaagcactttcttctaggttgtccacaatctagctatgcttgtctgtatgctgtttcctatgcttgacatgctcccttcatcccccaataaccccaccagcatcccaccttttcttcatgtccactgccttttaaagcctaattcacatttcctacctctgtgaagcctctcctggttttttctttgctcccttaatctgcatgctcgacgcgtacatgcctctatacctaaataaatagaaagcatgctgtggtaatagtgacttttttttgtgtgtgtgacggagtctcgctctgtcgcccaggctggagtgcagtggcgcgatcttggctcactgcaagctccacctcccggctgggttcacactattctcctgcctcagcctcctgactggctgggacaacaggggccgccacaacacccggataatttttttgtatttttagtagagatggggttttaccctgttagccaggatggtcttgatctcctgacctcgtgatcctcctgccccagcctcccgaagtgttgtgattataggcaagagccactgcacccggccatagggactcttgcttgcacatttcagtgtgttgtcagatgcttggattgaggttcgaagctaagttgttagacttaataatagactttgggacgtttaggagagttgtggtaatataaactaaaggaataaattggatgatgatgaggtagtggaggaagaaaatgttgcctgttttttggcccaagttgaaagaaaatgcaagaggctgaatcagtagtctgaagagagaagcaagcttaaggatgaacattaaagaccaagatcaagcagccaatagaaacagacattaagaaagggcaagaggaaaggaaaacagggaggggaaaggaagagggaagaggcatgctctacacatctatacagattagaaactacagggtgaccataacgcctggaaataggggcaaatggtggagtgtggttcagtcagttagtcctgtggttctgtgagtaagacagtttttttttggagacaggatctcactttggcacccaggctggagtgcagtggcatgatcttggctcattgcagccttgaccacctgagctcaagcaatcctcccacctcatccctgccaagtagctagaactacaggcacacaccaccatgcctggctaatttttttgtagagacagggtttcactgtgttgcccaggctggtctccaactcctgagctcaagtgcgcctcctgcctcagcctcccaaaatgctaggattacaggcataagccaccgagcccagcctagtaaggcagtttaatgctatgtgcaaaaatcgtaacatggtgcagttaacgcattccaatcaacccctgaacacgtacctgtgattcatctcttaatgttcactgaccaaacctgtaacttcagcatacccatgagacaaactgttttaaaattttgctttcaggatttccagtagcaagtgatatataaagatattaggtaggtatttaacagttatcacatccaggcctggcacggtggctcacgcctgtaatcccagcactttgggaggccgaggcgggcggatcacaaggtcaggagatcgagaccatcctggctaacatcatctctactaaaaatacaaaaattagccgggcgtggtggcgggcacctgtagtcccagctatttgggaggctgaggcaggagaatggcgtgatcccaggaggcagagcttgcagtgagccgagatccgccattacactccggcctgggcgacagagggagactccatcccaaaaaacaacaacaacaacaaaaaaaaaagttgtcacatccaaattttgaattcagggactttattttctttgaacccccacagccagcttgtttggaggcatcggaatgcagaactgttgcagttcagttgaaagcaatgccatctagtggtgtgtgtacagcaggtcaaatgttaagcgtagattttctagtagaaagtaaattatctttaggtcttgctaaaaaacattatgtttcaagtttgcctcttttaactgctaaaaagggcagctactaaaaactaggactcaaaaacctatttttagttcttccatcaaaatcttacaaatagaagagcttcagtatgcaaagtatttcttgcagttaaatttgtacattacaaaatgtctctggacggattcacaagaaactgataatgttggtggctgcctttggggagaggactgaggagcaggatttttcactgtatagctatagaatttttatgtgtatgaccgtattaaattgtttaaatacatgttactgaaatttttcttacataggtcatgaatgaaaaacttcagcactgcatggaactaacagatctaatgcggaatcacctgaatgagaagagggcactccgcttggagtggatgattgtcatcctcattaccataga

SEQ ID NO: 15773 - DNA, 47073 bp, Homo sapiens
ggagatgggttggctgcagtagtgagaggctgggggtgcggctctttccctgcagtcctgccgaggaagcgtgcgtccctggcgcttccttcttctcttccggcggagaggttagtgtattgccttttctttagcagctcgagtggtccggcttggaggtctgcgccctggctcctggccgcccggaacgtgtacagttacgggttacgccagtgcggctgtgaccctttgcctcttaccgtgatctttggtcagcttagctgggagtaaaaagcactcaattaatgaaccctttttttgagccagtgcaccgcggtaactgtagaaatcgataaaataattttgagtttgaggaattgaacggcatactcccaaagatgagcgccacttagctctcgaatcgtagcctagctgtaatcgattttcttaattggtgtaattgttctctaaaagttgaaatgtgcccgggaactgagtaactgccttgtatttcattttaaaaattcgatcgaatgcctactatgtgctgggcgctattgtcaggagatataataggaaaaaacacaaatccgtatcctcagggagcttccattctggaaggaagacacaaaaatctgccctttcctcttatttttttcctttagctttgtgtctcacgtattttactgatttacctcgttttgtctgtcactcccaatgcaaggttcaaaagattcaaaagataggatttttgtctattttattttcagctgtattgtcagcaactaggacaatacctggcacatgataagaactgagttcgtttgcagtatgaattaataaactaaaaattaaaggtgtgcaagtgatgttaaacaatggagaaatgcaaagtggaggaagataagagaatggatgctggttgtgtttttttttttttttttttttattgatcattcttgggtgtttctcgcagagggggatttggcagggtcataggacaatagtggagggaaggtcagcagataaacaagtgcacaaaggtctctggttttcctaggcagaggaccctgcggccttccgcagtgtttgtgtccctgggtacttgagattagggagtggtgatgactcttaaccagcacgctgccttcaagcatctgtttaacaaagcacatcttgcaccgcccttaatccattcaactctgagtggacacagcacatgtttcagagagcacagggttgggggtaaggtcaccgattagcaggatcccaaggcagaagaatttttcttagtatggaacaaaatgaaaagtctcccatgtctacttctttctacacagacacggcaaccatccgatttctcaatcttttccccccctttcccccctttctattacacaaaaccgccattgtcatcccgtcccgttctcaatgagctgttgagtacacctcccagacggggtggtggccgggcagaggggctcctcacatcccagtaggggcggccgggcagaggcgcccctcacctcccggacggggcggctggccgggcggggggctgacccccccacctccctcccggacggggcggctggccgggcggggggctgaccccccacctccctcccggacggggcggctggccgggcggggggctgacaccccaccttcctcccggacgggggctggcccccccacctccctcccagacggggtggctggccgggcggggggctgacccccacctccctcccggatggggtggctggcctggcgggggctgacccccacctccctcccggatggggtggctgccgggcggagggtctcctcacttctcagatggggcggccgggcagaggcgctcctcacatcccagacggggcggcggggcagaggtgctccccacatctcagacgatgggcggccgggcagagactcccctcacttcctagatgggatggcggccgggaagaggtgctcctcacttcctagatgggatggcggccgggcagagacgctcctcactttccagactgggcagccaggcagaggggctcctcacgtcccagacgatggggggccaggcagaggctgcaatctcggcactttgggaggccaaggcaggcggctgggaggtggaggttgtagcgagcctcgatcacgccactgcactccagcctgtgcaccattgagcactgagtgaaccagactccgtctgcaaacccggcacctcgggaggccgaggctggcagatcactcgcggttaggagctgcagaccagcccggccaacacagcgaaaccccgtctccaccaaaaaagtacgaaaaccagtcaggcgtggcggcatgcgcctgtaatcgcaggcactcggcaggctgaggcaggagaatcaggcagggaggttgcagtgagccgagatggcagcagtacagtccagcttcggctcggcatcagagggagaccgtggggagagggggaccgtggggagagggagaggagggagagggagagggctggttgtgtgtttttaatgtagtggttggggaaggcttcactgggtagaagacattttagcaaacatctgaaggaggtgagggtgtgagcctttcagatccctgggagaagagcgtaaggaacagcaagtgcacagatccagagaccagaatgaggagcaaaataagcaaaggagagtgctgtcaaagtggtgataaaggacagataatgtagtgccatgcaggccattctgaggggtttagcttttttttttttttttcgttacagaatctcactctgtcgcccagactttagtgcagtggcgcgatctcggctcactgcaacctccacctcccgggttcaggcgattctcctgccttggcctcccgagtaactgggattacaggcacccgccgccacgctcagctaatttttttgtatttttagtagagacgaggtttcaccatgttggccaggctggcctcgaacatctgaccttgtgaatcacccgcctcggcctcccaaaatgctggggttacaggcgtgagccaccgcgccaggctttttttttttttttttttttttttttgagacagagtctcgctttgttgctcattctggagtgcagtggcgcaatctccgcctcccagattcaagccattctcgtgcctcagcctcccaagtaactgggattataggcccatgccaccatgcccggctgatttttgtatttttagtagacacggggtttcgccgtgttggccaggctggtctggaactcctgaccccaagtgatccctcccaaagtgctgagattacaggcgtgagccgccatgcctggttggagggctttggcttttattaagtgaaccgtgaagccacagctagatttcgcgttgagattcaacttcaaaggatcactttggttgctgtgttgagaagaaactgtagggggcccaaaacagaatcaggaaaactggttaagaagctattataataatccatgggaaggatagcagtttggatcaggtagtattattactgatgatgagcagtggtccctagaaggcccttgggatttactgagaagttggatatggagaataaagagtcaagctggaccccacgtttttggcttagcagttataaagatacttattactgctcatgaatgggaaagactgggaagaaagggatgcaagggattctaggggtataagggagaggttagaatggtagaccatggagtgtaaactggatatggaggaagtgaagtcatggggagtgagagacagtgaaaaggtggttggatcattgacttgtgggtcctgttggggttgaagaattattggaattgggtaatagaaggagtgagatgcaaagataggaggtggtgcttagagagtaaaatggatgaaactgagatgaggaggtccgatgtattgataatgacaatagggccctgtctgatagaaaaacagtgtaaggcacaaatgtaatcttaggctttctagaaggtgcagtgataaaaatgggctgggtccggtggctcacgcctgtaatcccaacactttaggaggccaaggcaggtggatcacctgaggtcaggatttcaagaccagcctggccaacataatgaaaccccgtctctactaaaaatacaaaaaaattaactaggcatggtggcagacacctgtaatcccagctactcgggaggctgaggcaggagaatcgcttgaaccggggaggcggaggttgcagtgagctgaggtggcaccactgcactccagcctgagtgacagagcgagactcccatctcaaaaaaaaaaaaaaaaaaaagaatttactcaaagagaataaaaagaatccaggactgtagacaaacttctaaaatattttatagtttcttcaaaattaagtggttcaactggcatggcatagtactaattaaaggtgaactacagtagccaattggactagaatgaagcacagaatgcgagcttttgaagggattttggaagcagcaggttctacctcctaaatatcactgtgaatcatctttgtccttatcctgaagagaggtagtaaatacaaggtagtgggtaagagtgttgactttggaattgggaaagcctgggttttattttagttacatctctgcagcttcttaacggtgagcacttagcctctttaaacctcagtttcctaatcagtgaaatgggatcattatgaggtgaagccgagcacttagcatgtagaaagcgctcagagtgatgtcagagtctgtcttgtttcctcctacatatcatcaccaaaaatttgtttcatgaacatgcatttgaccgtgtgactctgagttaaaagctcagctttctccccacctgtagaaactttttaggatgactttatatatcctttggtgatctggccatcggctcttttggtccttacctcctgcagctcactcctacctccccgagatggggagatgaataggactccatgcctggggtgtttaacttgctgatccttctgccctttcaagactcagttcaaatgtcacctctgtgacaatgccacactcttcacatgctcctttctctggactagagcaatttgtgcatctcgttcattttcctctgctagactttgaattctgagatcattgattcatctatctctagcacctaacatattatttttaaaaaaagaattattgattactacggtctaacttttttttttttttgagacagagtctcattctgtcgcccaggctggagtgcagtggggcaatcctggctcactgcaacctctccctccctggtttgaacgattctatatctcagccacctgagtagctgggattaaagccactatgcttggctaatttttttttgtatttttagtagagatggggttttgccatgttggccaggctggttttgaactcctggcctcaagtgatccccccagcctttagcctcccagagtgctgggattacaggcgtgagccaccatgtgtggcctactataggctaactttaaaataacacatttcatactgtaaataagggggaaattctgtttaccttgtctggaatgttcatgtgtgtatctgacatgcctcgcactcccatgcccagccccaagctgaaaagcaccttcgccttctagaatcagcttagatctttctgggaacctttcctgattttttttttttttttcctgagacagaaaaagggctggaatgcagtggtacaatcatgactcactgcagcctcagtcttctgggctcaagtgatcctcccacctcagcctgtgagtagctgggactacaggcatgagctgccatcacacccagctaatttttaaatttttgtcatttttgtagagatgaggtttcaccatgttgcctcagctggtctggaactcttggactcaagcgatccacctgcctcagcctcccagtgtgctgggattacaagtgtgagctacagtgcctggccagcacagatttttatatacttgatatgctaatgaagtaaatgaagtggtcccatcactattttttttaaggttcttgttatgtcagtagctttataatcttgtaatcttccaggaagaaggccaaatgttgctaaaggcaaagtggcagaaacactgtacttatatttttaaccttgttcttttactagaattaacttagaatgtatctgttttacaaatttttctaacagaaatatgcctgctacctagggaaatattatatatgttttaaacattaatttaaaaacttgaactttgaattccttttcttttagcttgggatgtggtaatgccagccacactcctcagagccgtggccagatctcatcatatattatcaaaagcacatcagtgccgaagaatcggtcatctaatgttaaaaccacttaaggaatttgaaaatacaacatgcagcacactgacaatacgtcaaagcttggatttgttccttcctgataaaacagctagtggtttgaataagtctcagatcctggaaatgaaccaaaaaaagtcagataccagcatgctgtctccattaaatgctgctcgttgccaagatgaaaaggcacaccttccaaccatgaaatcctttggtactcacaggagagtgacccacaaaccaaatctgttgggttctaaatggtttataaaaatattaaagaggcatttctcatctgtatcaacggaaacatttgttccaaaacaagacttcccacaggtgaagagaccactaaaagcatccaggaccagacagccatccaggaccaaccttccagttctgtctgtgaacgaggtaaagtaggggtggccgtggctctcgtgcttagtgatcattgctcatgctaaaccagtgtgcgttgcaccccagccttaccgccaacgtaagagaactagcagtcactcagacttcttcatcaaggtctttgaagcctaataaatatccaaagggattcagaatcttaatttttaacaattaatgatacatataaaaacaaaatacaggtgataacacatgaaaatagagtttataaaagatttggttattggtctaaggaaactgaaaaagaggaccaatattaagtccagtctaagaatgggactgtaaaaaaaaataaaataaaaaaaaacaaactagaaattcttcatcaagttaaaaaaaattgtaactctgcagacagataagcctttattaggctgtggcagttgcatggggcggtgaaatgacacggtagggtggactccaaaagcagcaggagaggagggcccagcttttttatcctcttaaggtttaagggggtattttttattcatccttaaggggtttctgggaatttttctgctacaatttgcatttctccttcagtaacaacttaagggtcaagatcaagcccttgataacctttgtatcttgcataatacctagaactgtaccttgtacttaaatgtttataagaggatctttaatgccgatagtcatcaactttaaagatattttaaacttgatgaagacttctgaatctatcagaaaacaggttagaatgtctgtcttcaagtcttgattctgaaaagtagcccctgagcctgtttcattttggctgtgtttttattactgtgcagctgacaccccttggaaaggtatacatacatacctttactcatcctctgattctgaatctagcaatgaatgaatggtttttgtgttggattctggaatgctttcaattcttgtgtggttactctgaactcaggacgtgaaggatgaagtgttgtgcagctactgtttcccctttccttttgctggagctttggggtaacctgggaaattcagtatttaagtgtccgagatggcattaagtgtaaaaacctgaattcatggcagctccaaaaaagagaaagctcaactcactttgttcatttgtaacgtctagcagcacagtgcatcaggtttcttaggaagaagctgataggtcagagatgtccctaggctatttctttgggccatccttagacttggaagcaattttcctaaataccgtatctatttttctttagatttttttttctacttccttccaggaaagaatttgaagtagattttcaacattcaacatagtttcaaatgagataataaatactttcacatattagagcaaatagttgacatgaacagagaaatgttatgaagtacctgaaatgaataatctagttgaacattttgttttgagaagcgcagtaattaaaagaggaactcctcctgggatttagtgtttgttgtttattgttgtgggagagggcagagtaaaaacataaaaatatcttcagagaaataactttttccagcactgaaattaaggagttagttatttcatggattctgttataggagacattatgtaacatgatagacaatgacttcagttggagtttggcaagagcaagtcgcatgctgtctttctgaaagcacagggaaataatagaaaatcagatgtttctggctgggcggtggctcacagctgtaatcccaacactttgggaggcccaggcaggcgattacttgaggtcaggagttcgagaccagcctagccaatatggtgaaaccctgtctctacaaatatacaaaaattagccaggcgtagtggtgcacacctgtaatcccagcggctcgggaggctgaggcaggagaatctcttgaactcgggaggtggaggttgcagtgagctgagatcatgccactgcactccagcctgggtgacagagtgagactctgtctcaaaaaaagagaagaaaatcatgtttctaaagtggtctgagataatgtaattttggaacatcattttttgaagattttacttttcatagagaaagcagtcttggcatgactaggtaatatgtccccaggaccaaagactgactttcctctgcccgaaattgagggccactccatttttatacggccatcatagtggtaaaccctttataccactttataccatcaaaatggtaaaccctttataccattcttgactgagacaaggaaaagactctgctttgtgtcagaaagcatgtggactttattttgttcccatagttgcacccagctcatcttttcagctctgcagaacagcgtgcatctggagttggctgaatgaggtttcagtcaccctgtctgttggaattaaatctttacctggtctcattttcagagatcataatctgagatactcaacccacatccctttggcttacaattcctaaaagcaatagtggatccagtggcttatgcctataatttcagtgctttgggaggctgacacagaaagaccacttgaggccaggagttgaagaccagcctggcaacatagcaagactcccatttctaaaagacttggaaaaaaaaaaaaaaaaaagccgggcttgctggtgcgcagctgtagtcctagctactcaagaggctgaggtgggaggatcgcttgagctccagggttccaggctgcagtgagtcgtgactgcacctcgctccgtccagcctgggcgacagagtgaggccctgtcactaaacaaacaagaaaacaataatagcagtgcttcttgttaatgtccagtctttgaagagaacagcagaggatgggaacggcaggtctgagtggcatggagcccgacaccagggagaatgttttcaggctaatagcactgtgttacagaatcactggtggactgttaaccatttttttgaaaaatgaaatagaatagaaaataacagaatacattgctcatgataaacgtaaatactggtttgtgaagcttttgtggcaattggtgtgtaagcatatatgtgtatatgtactatgtttaatgatttataggttgtagtcagaaaaacttacaggataaagcgtgatcttggtaacgtaaaatgtatctgtgtttttatagctttaatctccaatcagtatgttacaggagaaaaggcatttttccttagtatgatctatctactcacagtacttctgacatcaaatatatggggacctcttcctcctcctaccagccagttctccaattctccagacactaacaaggtgtcctgcaattcagttcaattccagcactagccagagttagtgcagacgccagttagttaagctcagccccacaagactgccctcccagttgacacctgtgcttctgaccaaccagctctatgacaaccatcccctcttcaggtttgattatttgctagaatggcccacagaactcagggaatcattttatttatgtttactgggttttttatataaagtatgcaaatgaacaaccagatgtagaggtgcacagagtgaagtcaagaagggcctggaacttaggagcttctgttcctcatagaactgggctgtgccaccctcctggcacatggatgcattgatcaacccaggagttctccagaccccatcatctgggtgtttttaatggaggtttcattgtgtaagccatgattaatgattaactcaatctccagcccctctccgtccaccagaagttaagggtgaggctgaaagttctaagcttctaatcaaagtttggtctttctggtaaccaccccccatcctgaagctgtccaggacccactgagagtcacctcattaaaacaaaagatgttcccatcactcgtgaaattccaagggatttttagaagctctgtgttagtaactgaaggcaaagagcaaatactacaaccaaaaatgcccctgtcacttagaaaattacaggggtttttaggagtctgtactgggaaccaaggacaaagaccaaatgtaaatgtattatatcactatagaagcaacattgctgtaacacactaattttcttcagtaatacagtgtaaatgaaagtataatttttaaaaaaatgttctgatcagagcatgcgatgctcctaaaacaagaatcatatgtagatttctagccccatctgctggaacatgtcttctttggccagaaaaacaaaacatactaaaatacagtggtttggggtttttgctttttgggttttttaaaacattttgaagtagaaaagccctgaatatcataactattatcggttggtttgacacatctatttaacaggaaggtgtagatccccatcctgaaacccaaaatatgctttacatatatatgtagctaatgcttaataaggattcactgtaaaaatccagaaaaggatgtataaaaatgaaagctgctcagaaaacaacagcatctttaataaagaaaaaaaagcagacaagacattccatgattctctttccttttaccaaataggctaaaataaaaaaagcaaagaaaacaaaaccaaaacaaagtgtctaaaacgtcaagttcatctattaatagaagaaacccacaactaagactcagagctaagaagtttaaggagaatacagaaagtagtgtagcaaaccatataagctgagtgacattggatagaactttgagccaaactaaatgggagatcccaagagaaggaaaggggacagttgacagtctggaaaacctacaacaaagatccttaggatggccaagtgaaaacagattgtgtttaaagatttattcataatttatttggagcttagaatatattttctcataaaaatagtgattgacttgtcctgtccttgagagttgaaaatagtacacattctcaatttgccgttagtgtcggaatattcacataatttgggataccagattgcccaaaactcagttctgaatatattgagccttttatttttatctccaagtggcggtttttaaaactgaccttttaccttgatttaaaataatagtgcctggctgggcatggtggctcacgcctgtaatcccagcacttgaggccgaggtgggcagattaccagaggtcaggagtttgagaccagcctggccaacatgaagaaacaccgtctctactaaaaatacaaaaattagccaggtgtggtggtgcatgcctgtaatcctagctactcgggaggttgaggcgggataatcacttgaatccagggggtagaggttgcagtgagctgagatcgcaccactgccctcacgcctgggcgacagaggaagactccgtctcaaaaaataataaataggccgggtgcggtcactgatgcctgtaatcccagcactgtgggaggccgaggcgggaggatcagatgaggtcgggagtttgaggccagcctgaccaacatggagaaaccccgtctctactaaaaatacaaaaattagctgggcgtggtggcgcatgcctgtgatcccagcaactcgagaggctgcggcaggagaatcgcttgaaccggggaggcagaggttgtgatgagccaagattgcaccattgcactccagcctgggcaacaagagtgaaactgtctcaaaaatataataataataaagtaaaaaacagaataaaataataatgcctgccaccgccattaacagaccttgtactctaatgccaagctgtatatgggacagttgccagcatgtcttcactggcactataaaatatagccaagaagataggctctgagagtaagaagtctgtgttggttaggagtaattttgtcctggctctctggtataaagctctcaaatgtaaatccgggtgggataatggactcagctctgtctgcaacatgccactgtgcagagaagcactctcatgcataagctttttatgctgtaaactatagtagctgaaattaaatgccactttttcagaggtgaattaatggagagcctggtgaaattcaaagctttttgatgtataaaacttgataaatggaactattccatcaataggcgaagtataacaacctgtctacatagatagtatgtaatttctgcacaggtctctgtttagttaatacatcactgtatatcaatctagaatcttgctccaataaaggaacataaagttgtgttttggttttgtttttgtttgaaacggagtcttgctgtgtcgcccagagtgcagtggtgcaattttggctcactgcaacctcggcctcctggattcaagggattctcctgccttggcctcccaagtagctgggattacaggtgtgtgccaccacgcctggctaatttttgtatttttaatagagccagggtttcaccacgttgaccaggctcgtctcgaactcctgacctcaagtgatccatccgcctcagcctcccaaagttctgggattacagacgtgagtcattgggccttgccaaggtttttgggttttttttggaaaaaaaaaaaaaagtagtacacattcttagtgcagatgggcttggccagtaccacatgatggtgaagcagacgtgagacaacagggagaggcagggacagtgtgggctggagaccctgggcccccctactctatcctagtccattattatagccagatcttccactcggtcagatgatgatggaaatctggattttgtgtgaaatctctcagtttattgttgacaagtcaatttgaattttagaaacgtgatgtaggtcaactcttgagttggatggttctccgagctgccagtttacaactccgattctagcaaaagagacagcctctgccattttcagtacagctacaggaagatccttcagtggactagcttgtgacctgcttatctcctttttgtgcctcttgctcttcccacttcagcccaaactaagcacatgagctgtagccatcacagaagtaattctgacatccaacctaatgtactgtgatttcacctagcaagcttgagtgaatttgccaggtcttgcagagtggagcctacccgatgtctcgcctgatgccccttgctaggattcctttctttcagctggccgaatctttacacacatcgtacatcagctagttttaactccatgaagccttaaaaagaactagtgctcacaggtctaaaccttaagcacgtgcctgttccctgtactctggtaactcctgatacatttttatttgtatatccccgtgttcctactttcatatgtgactatgggaattagctaatttggaaggaattagcagttatctgctcataattagggtactacatccatttatccccacattccccagtaatttcagcttgtctgactttttttctaattggattagtctcattttgtttatgagtagatactttattgattttggatttttcagtttgcatggatcctcaggttctctgttattcctctacctttaaaccacgcatcagagctgtggaacagattgaggaagggcaaatggggtcaggccatttcatgagaaagagccaggagatacagaatggaggtgggaggaaggaatgaattaatatatacttctctagaatttcataccaggaatatacagaatgggaaagaattggggagctgagaggagtaaatcctaagaataaatgttgatttagtgactcataaacttgttttggccaactagaatctaacaactactgaacagttgtgttagccacagtcctgagcactttgtttattagcttatttaaactttacaacaaccccataaagtaggcattattgttattctgatactcttttaaaattgtaaccaacttctgtgcctaaaatcttaactcttatgccaatagctttcaaactttattgaccacatcttatagtgagaaatatatttaacattttacatacatagcgacctagagtagatacatagatacatgtaagtgacagaaaacttcataaaatagcatttcctgtgaataatgcactgtaatattttctatttagttttattaaaaaagctgttttgggccaactaaattggtatcagaactcactaatgtgttgtgacttacagtttgaaaaaacacagcattgagccatagtgcttaccatctgtattttatatagacacaagatgactttcctcatgtgtgcaaaggcaagatggggcatgagacaaagtacaaaccaaaccaagacacatgctcagatttacagacctttttgttaaatgttaaccagtgtaaaaatactgtaattcctttggggatttaaaggaatctgcctgtacaagagtagttacaaattaggaaatgacctcaaatactaatgttgctttgaaaaagagtcatggaaactcagggttggagagacttaaacattccatccagtcacccatgtgatgccttaatcatctctattttgcattcaatctgtgcttgagatactaccagttgagtgtggcttccctttcagaataatccattccatctttttgcctggcgggagggagcaagttcttttcaagattgagctgaaatttgcctcccagtaacttcattctcttcatcttcatcccatcccttgtatcacccttggagatgtttgaagaaaattctggagttctagctttgcagaatggagtccagtagggtgctcagcagccgtcacagatgcttcagcctcttggtaacccatgttatgctcatttccctggaacaggacctaatgcactgcacagcatttgcaacggcagatgagtatcatctgggaaatctgtctcaagatctggcctcccacggatatgttgaagtaacaagcttgcctagaggtacttcttcttgaacctggggccaagtatgttaaaatgtattggataattttcctatgatactatcttaagtatgtatttgtttgcaattcattttcttttgaaaggattgtatcataaaagtggatgttgaatctctttataaagatgacaaagttaagaattaaaatgtatttacagagaactcattaaaatcagtatgatttattaagattatttataggatcattattacttgaggtggtcagaggtcatactacttcatttctagcacattaagaagttattttagtttgtgtgtgtctgtgtgtgttttgtgttttttttttttttgttttttgggatggagtttcactcttgttgcccaggctggagtgcaatggcgcgatctcagctcactacaacttccgcctcccaggttcaagcgattttcctgcctcagcctccggagtagctaggattacaggcatgcgccaccacacctggctaatttttgtatttttagtagagatggtgtttctccatgttggtcaggctggcctcgaactcccaacctcatctaatcctcccgcctcggcctcccaaagtgctgggattacaggtttgagccaccacacccagcccgttattttagtcttatagaagaaccatgaagttgatagacatggggagagcctttaaaaaaaaaatttaccagctcaatctaatactttaaaacaattagttagccgggtgcagtagctcacgcctgtaattgcagcactttgggaggccgaggcgggcagatcacctgaggttgggagtttgagaccaacctgaccaacatagagaaacccctgtctctactaaaaatacaaataataataataataaaacgattagttagaagataaaaatgaaaaagaagaaaattaaaatgaacttaattgaggatttttatggtgaaatcaggaaggattcttgagaaatggcttgctttacattaattaaaaataatttaggccagccatggtggctcaggcctgtaatcccagcactttgggaggctgaggtgggtggatcatttgaggtcaggagttcgagaccagcctggccaacatggtgaaaccccatctctactaaaaatacaaaaattagccaggtatggtggcacgagcctgtagtcccagctacttgggagactgagacacaagaattgcttgaacctggagggtggaggttgcagtgagctgagatcatgccactgcactccaacctgggcgacagagtgagactctgtcttaaaaaataaataaataggccgggcgtgatgcctcatacctgtaatcctgcactctgggagactgagacaggcagatcacctgaggtcaggagtttcagaccagcctgtccaacatggtgaaaccccacctttactaaaaatacaaaaattagctgggcgtggtggtacgtgcctgtaatcccagctactcaggaggctgaggcaggacaatcacttgaacctgggaggtggaggttgcaatgagccaagatcgtgccactgcactccagcctgggtgacagagcgagactctgtctcaaaaataaataagttacttagaacattttgataaacttttacagtgaaactcaggatagctcaatacccagaacatttattaatttacctaagagtagcaaaaataggttgaaagccttcctataacagtggaaattcttaagactcaatcccatagaagatagttgaaatatcattgtgataatccaaacagaccgtttgtgtgattaggtgacaaaaacaagcatagttgacttagaaagacagagctatgtctagagccccttggtatgaaaatttgcctggaggtattgttggctgatgctgaaggctgccagctgtgtggtctgtgcttcacagaattgcaggcttcactgccctgggttgtttcagtcgattttattttgcttttggctgtgtaggcaaactctgtcctatgtaggatgtagtaattaacaatttagaaaaaaaaaaaaaatcacagttttggtctgtgtctgaattgcccatcacccagcctttaccagaaatttctgaagctttgaggatcctaattttatgttaattccgttaagacatacaaccttttgcaaattaatagtatattttttaattgatatattaacattggttgtaatttatattatggaatatatgcttatgataaatatcactatactaatatataaagcaacttcttatgatgaatattggtatattagtatatgttttaacaatacttaggccaggccccgtggctcatgcttgtaatgcactttgggaggccaaggcaggcagatggcttgagctgaggagttcacgaccagcctgggcaacatagtgagacctcatctctacaaaacataaacaaaaacttagccaggtgcggtggcacatgcctgtagtctaagctacttgggaggctgaggtgggtggggcgggggggggtcccttgagttcaggaggttgaggctgcattgagctgagatcatggcactgcgcttcagcctgggagacagagcaagaccctgtctcaaaaaaaacaaacaaacaaaaaaaaaactttttttttaaatagttgcaggtggctgcagtggtagcccctgtagtgattaaccttgaaatcacatatgttttgaagtggtcagtatctttatttctgtgtattttctattgccctactttttatactttaaaattcagcaggagtagtagtttgggaatgttaaaattgcattattaatgaaatggtatttataggaagagaatatattaatacttcttcaaattttatttttaattttgtagaaagaagtttaattcttgacacttagttgtatggaacctaagactttattaattatctggactagtgattattgaatcaaaatgggcatgaatgagctctaatattaatatcacaggttgttgaatgttttataaaagtaattgctgatctttttttggtggtcgtatttgcatttttatatattaaatcctttcagaggccttagtagaaagatggtgattgtgttacagagcactccatggtatataaagaaatgatcttaagtactttattacagtgtttataggtgactcttacaacttgtgttaccttgacatagcttttttgttcgtttattttaaatcacagatgcagcaaatattttggtgatgggtgtggaaaattctgcaaaagaaggtgatcctggaacaatattcttcttcaggtaagacaggaaagaaaccccattaggtgatgatgggtttgggtcaagtaattgtggtctttaaaggtgcaggcatacctttcttaacagtaaatgtgttcaaaatgtatttgtgatttaaatttatcatttaattcttatttaatctaggagagtttgtcacttttaggaattctctggtaaaccctcttataaagtaaagaatatttcaaacaagtgaatgatcttccccggggtgtctttctttgtaaattcggattttcatggactaaatttctggaaagcagccaatttcccattcatctttagtgccccttgtcagactcctgccccagggaaactcccgctacctccctgctgtctcttcttgccattttcttttttttctcccttcccctttggtagctctttaaagttttagcttacctctccagaggttttagactaggagactcacatacacacttattccttttatctaaaggccgactcaatactaaatactccacagtagctgcctgggaatgataacatgatagaaccgtgtgaaataatctcatttatcctcagcacaccgatgaaggtctattttgcacctgaggaaactgagggtcatagggattgagttacccatagtcatgagactaatacgtgacagaacagaaacacatggaccatctgtaggaatccaaagttgagtaaagttcttgtggtcataatccttatagttgatgataagtggaagttcttttttcctttcaatgcctaccttccttttgaccccatctttagagagaatcaagattccaacatttaattcaagtagagtaatagcatccctgttgttccgagtgaggaatttagatttgtgagggactctacatcagcactgtctagcagaaatacagtgcaagcctcggctgggcacggtggcttatgcctgtaatcccagcactttgggaggctgaggcaggcagatcacaaggtcaggagtttgagaccagcctggccaacatggtgaaaccctgtctctactaaaaatacaaaaaattagccaggcacatggtggagggtgcctgtaatcccagctactcaggaggctgaggcaggagattcacttgaatgcgggaggcgatggttgtggtcagctgagatcgtgccattgcactccagcctagtgacagagtgagactctgcctcaaagaaaaaaaaaaaaagaaagaaagaaatataatgcaagcctcatatgtaatgatacattttccagtaaccacattttaaatatttttaaaaagataaaattaattttgaacaacacaaatatgtttcttaacatattaacatgaaattaatttaacaatgtattttattcaacccagcatatctaaaatattatcatttcaacatgtaattaataatgatattttttcacttgtcatactaagtctttgaattttgctgtgtattgtacacttacagcgcatctcagtttgcaccaggcatgtttcaagcactcaatagccacatgtggcctctgagtaccacattgcacagcacagtgcattcctctggttggaggaatatgcagttcaccagacctctcttctgcctggaagggattctctgaactgatactgtggctgtggcttgaaatacctctcaaatccgtatcctgaaaccttatccctgcctattgtaacagcttattgtctccctgcctgcctgctcacccaccaccagtctgtttgtctattgtaagcagggtcattcttcagtggccatttctgaccactacactctcctgcctaaatttccacggactatgaacaaattctctatcactgcataaagttcccttctggattgtcccctgcttgcctctttatcctgcttgcccactgcttgaccacatctgcagccacgcagctactggctgtttattctgagatgctgctctgctccgtcccacctcctctctgagcctgtgtgtcccctctgctatgttgtctcctcttgttttctcatttggctgcctctgctagtcctttagcaaaggggtccctctggtgtacatctcatggtatactctgcatactcttgtagcactgatcacacactattgtaattggtggtctaagtgtcagtcccagtcttttctagattgaggataggaatgaaatcatacttatgtttctatcacaaatactaagcatggacccacacatatactaagtactttagaaatgtttcaagaataacgtggagccattaatatttttacctttcttttatttcctcctttccttcctccagtgcactgaccctgagctatagctcctgtttttatttactacctgaaacagcttcaacacgtcaaacttgagaaatcaaaacaaatgcattcgtagttttagaccctaaataatgttaaagccataatcggattcagagggcctcctgtggtgtcactgtagttctgttccaagcactgtgagcgtggggagcattattccatagaggcctttaaccatctgatgcttaaattaaccaccatctctttattccacaaaaatccaggcatagccctttattccttgcacatagtagagtctgcctaatgagagctaagacaaggtctcaaaaaatttccttattctgatttctgtggatcagaattgaaccaggtatgaaagagtctacatacgtgaagttatatagtattacaataatggctatttgtttggcaaaccatgtgagaaatcataaattttgaggaggtcaggttttatcaagaattttattttagctcttattgtaggaagttcacctaaggaccataatatcaaattagtaagtaccatcatattttgaaaaatcgcatcctgtatacattctagaagttacatggttttatatacgaccctaaagaatgtattccatctgtatcttagttgtttcttttatttttttaaatcagggaaggagctgctgtgttttggaatgtgaaagacaaaactgtaagtgtaaataaaaatgtgaaaatataaaaatttagttttgtgagaatgaattgttaattagcacatactgaaacattagaagggaaattaatagattatgcacaacttatttgctctgcattacatgatacttatcagtttcatcttccaaaatatattgtattttgggttaagatttcctgctttttcctttctctagacacacactaatttgtggagaatcagaaccatcctaactatactgcagacagaagtactgtagactttgcatgttgtactatacaaaatgtatgcagttaattggaagctggttgcattgagtgttcttttaagtcaagttgtctagaacttactactcatgggaaataattttttcaagatccaaatcaagatttgtttaatacaaccattttagaggcaaattggtaatctacattaaagctttatatttaacccagtaattttacacctagaaatttatccaaaggaaataatcataactattcgtgatgatttttgtacaaaaatgttcatcagagcaatatttataatggcaaaaattagaaattaccaaaatacacaataatagtttgttaaatcatccatatactacagatatactatagatccccttagaaatcatgtaaaaaaatatctatttctgggagattgcctatatatataatacagttacattaaaagagcagattatacggccaggcatggtggctcacgcctgtaatcccagcactttgggagaccaaggccggcaggtatcttgaggccaggagttcgagaccagcctggccaacatggtgaaccccatgtctactaaaaatacaaaaattagctgggcgtggtggtgcacacctgtaatcccagctactcgggtagctgaggcacaagaatcgcttaaaccttggaggcagaggttgcagtgagccaaggtcagaccattgcactccagcctgggagacagaggcatactcttgtcttcaaaaaaaaaaaaaagcgggttacaaaatataaccaatataatctcagaactggttaaaaaacatgctttatacaatcccaattttacgaaaaggaaacacacacagtaggtggtcgggaagggaacttagagaaaagaaaatataaatgaccaataaatttaagaaaatacaagttggctatttgaagttgcaaagatgtaaaaggctgataaaccccatttcttaagagtagtttcataaatgttgagattctacatttggaaaaactactttggagagcaggctagcaatattataagtgtgggccaggtgtggtaactcatacctgtaatcgtatcactttgggagtctggggtgggaggatcacttaagctcaggagttccagaccagcctgaacaacacagtgagatcccatctctacaaaaagtttttagaagttagccaggtgtggtagtgtgtacctgtagtcccagctacttgggaggctaaggcagggggatcgctcgaacccaggagtttgaggctgcaatgagctatgattgcatcactgcactccagcctgggtgacaaggtgagaccctgtctgttacatatatacatattgtgtaagtccacatatcttttgatctagcaattcctaaagaagtattcccacaaagccatgaagacctttgcacaagtgtggcacatcgcaacattgtaatggagagtagaaaaaattccccatggaggacacacctaggttggttaaataaattgcagttcgtctgtaaaggaaaatagtgttgaaaatgtcatgtgcataatatgatcctattttacataaaaagcagcataaatatgtacatatatacacataaaaagtctggaaggatatgcaccaagtttaatcatggttgcctctggggattaggatttcagtacagaagagagaaagagatgatcacctcccacacctgtgtggcttaattttttattagtatgttgggctttactttttattttttatttatttatttttttgagatagggtcttgctctgtcacaccggctgacattggctcactgcaaccgccacctcccaggctcaagccagcctctcaggtagctgggactacaggtgtacatcaccacacccagataatttttgtatttttttgtagagacaggattttgccacgttgcccaggctggtcttgaacttttgagctcaaggatccacccgcctctgcctcccaaaatgctgggattattaaagagatttaaagaatacaaattataatattactagtgattttccttgggttgtgggataatgataaccttgattttcttctccattctcatctgtgttttccaaatgtaaaaacaaatgaacatgtcatcctgattactttaatatcacaatggatttgatttgccttttccttaaaaacatgcaacagaaataatgcctgtaagtgtaatgaagactgttataagcattaaaatcataacatacttgaactgagggagtcagttatgatttcagattaatcttccttttcttctagatgaagcatgtgatgaaagttctagaaaaacatgaaattcagccctatgaaatcgcactggtacactgggaaaatgaagaacttaactacataaaaatagagtaagcaacttttcatcaaatttatgaaaggggcacttggaataaattaggtaaagcaatagaggagacaaattattatgcatatggaaactttttttttttttttgagacggagtctcactctgtcgcccaggatggagtgcagtggcacaatctcggctcactgcaacctctgcctcccgggttcaagcaattctcctgcctcagcctcctgagtaagtgggactacaggtgtgcaccaccacgcccagctaattttttgtatttttagtagagacagggtttcaccatgttggccaggatggtctggatctcgacctggtgatccgcccacctcagcctctcaaagtgctgggattacaggcgtgagccactggacctggcctggaaacttacttttaagaaaaaagtggccaggcgtggtagctcacacctgtaatcccagcactttgggaggctgaggcaggtggattacctgaggtcaggagttcaggaccagcctggccaacatggtgaaaccccatctctactaaaaaatacaaaaattagctggttatggtggcgggtgcttgtaatcccagctactcgggaggctgagacaggagaattgcttgaacctgggaggcggaggttgcagtgagccgagatcacgccattgcactccagccagggtgacaagagtgaaactccgtctcaaaaaaaaagaggaaaaagattactggtacaaatacaaagtctaaaccatataataaatattagaagataaacataattttttgaacttctcaggctatccacaagttaaaacaagtcagtagtatagccccaaaatggaaatgttaagtttctaatcagcctaatccaataaaatagtatgcatttatcaaatgaacctatcaaattattccagtaaatttttctcttaatccagttttttcctattgattttggggggtgggggtatgaaaaggaagtatagtgaggggtcaatctaagagacccacttgtagaagtgtgggtgctggaagaagtgggacctggtgtaccagtttcactaagataaatgggtaggcaacagactagctgattttcctgactcagccagagggaaaaaatgaagagatgttagggccgagacagaggcagtatgaacaagatggtagtgtctttttcctcatggagttacctgtctagtgaaatatgagtctttgcaggttcttaagaaaggtagtgttagccagatttggtggctcacacctgtaatctcagcactttgggaggccagggtgggaggatcaactgagtcaggagttcaagacagcttggccaacatggcgaaaccccatctctactaaaaatacaaaaattacccgggcatagtggcgagtgtctgtgatcccagctacttgggaggcggaggcggaggcagagaattgcttgaacctgggaggcagaggttgccatgacctgagatcgcaccactgcactccagcctgtgcaacagagtgagactctgtctcaaaaaaaaaaaaaaagcgttaaaagcagagctttgggaagacttggaagagagacagagactagctatagaaagaccagatggggataagagctgagtaatcagcgctcaccaccaatagggccagtcacggttttctaagtaagtgccttccatgtattatttcatttaatcctggggaaaaccctataattgcagctaactggctttccgatgagatttattgaatcctgtcttgccaaagggcacctgactgtgagtcagcctgagcccagtggtggctgcagtcagaggtaaggatataaacctgagagagacagcaaatgagcagcctgtagttttattatctttagtagttactcagcccttggcctgcagatacagctcctgtgaatcccctttctgtgttctattaggtttacattaaaatggcaaaaaccgcgattacttttgcaccaaccaaatacttccatatccaactactgctagacccttgtgtgtgtgtgtgtgtacgcttatccacacacacacacacacgttactgtacagtctgtgaggagtaaaatcctcagtgcttaggatcccagagtcagttattttgtttcgtcagaaagactgtcctggctgccacctacatggttattatgtgagttctgccatgattccagggatctgctcagctctgtggcatgggcccagtttactcataaagcatcttgtgaccaagcacagtggctcatgcctgtaatcccaacactttgagaggccaaggcgggcagatcacttgaggtcaggagttcaagaccagcctggccaacatggtgaagccctgtctgtactacaaatataaaaattagctggatgtggtggtgcactcctgtaatcccagctactcaggaggctgaggcaggagaatcgctggaacccaggaggcggaggttgcagtgagcgaagatcacgccactacactccagtctgggtgacagagcaagactccgtctcaaaaaaaaagacctcttgtgactgctgtctttgctttccttcctccatctgaggctgtcatagcagatgccgccctccatcaggccccttgtccccctccctttggccgtcacttcttgtctgacatcttttgtgaaggtttaccctgtcttttttccatttgcttgtgatgtttatattcacacattccgctcttcccctgtcccctgtctaggattctccacagtcacatactcatttttcacaacttccttgcctccctccccaaccccatcatgtcagtgtgattttagattacactccatatatagttttatatgcagcattttttcacatagaaatttactgtgaacgttctcctttttattaactatccttccaaaacacacttttaagtttttcttgtgtggagtgactattactgagccaacccctactgaacatttggtttatttcctaattttttactcttaaacactgaccttttttttttttttggagacagagtcttgctcagtctcccaggctggagtgcagtggcgtgatttcggcttactgcaagctccgcctcccgggttcactccattctcctgcctcagcctcccgagtagctgggactacaggcgcccgccaccacacccggctaattttattttgtgttttgagtagagacggggtttcaccatgttagccaggatggtctcaatctcctgacctcgtgatccacctgcctcggcctcccggagtgctggggttacaggcgtgagccaccgtgcccagccaacactgaccatttttttaaaagttttcagctgggcaaggtggctcgcacctgtagtcgcaccactttgggaggccgaggtgggtggatcatttgaggtcaggaattcaagaccagcctggccaacatggtgaaactctatctctattaaaaatacaaaaaaaattagctgggtgtggttacgcatgcctgtaatcccagctactagggaggctgaggcaggagaatcgcttgaacctaggagactgaggttgcagtgagctgagatcgcaccactgcactctagcctgggcggcagagtgagactgtctcaaaaaaaaaaaaaaaagttttcttgtatacaaatttttctttgcatcttagattatttccttaggataaactcctagaaagggaattacctggaccaaaggatatgagaacatttgtaacactcttgatacaaattgtcaaaatgacctccagaaagatgatatggtgtctttttcaaaggaaaagttaaagtgctttttaagatttagaaggtattatctttttgcttttcacaggggacagtcaaaacttcacaggggggaaatcaagttaaattcagagctggatttagatgatgccattctagagaagtttgctttctccaatgctctatgcctttctggtaagttactactgcttatgggatagggtactacagttgtcatttcactgagggaagtttaaatagtcacgattttggtatattttcagaatactcaacaaagccttagcattccttttcctttttttccctccatcagaaaaaatatctagtataaaagatagtactgtgctgaagttactcattccttattaattgtattaataaagcttaacctctccaaaagtattttttagatgatgattatattagcctttgtttttttctcttctctctatgcgattgttattcttagatagtctctaatccagacagagaagcccagccttgtgtgactgggcacaggtcccagtgtagaaaaacatactctagtgttccataggaatgggacccagagtcacagtggctataagtttgttctgaaagatccacatcccgaataaaactatacaagttctttaagaatttcttttgccagcagtctaccttaggtggctgctgcagcgtcctgtccatcccactctgaggggcttcggagatttctgaggtttactcttagtcctgaggagtgaaggggaggccaggaaagtcttagtcgcgccctatctgcagagctacccatggtatcaaggtgtaccctaccctcctcagtttccaagatgtaatactagaaaatcaagagttctactaaatgtagctttggtcttccaatagggcatggaaagcgattcagtttcctctatccactttaattctgtcctttatgataattaactattcttaaattatattttcaaggttttagtactttttcttaaactattactgaaatagtagtgaagatgctgtgcaattatgtattttatatacatgtgaatatgatgataaagaaatgttccattattaatttttttcccagtaaaactggcaatttgggaagcatcactggataaatttattgaatctattcagtcaattcctgaggtaattatatcaattttatgcttattcaaggattgatttttatatgtaaaaaatatgaatttcccaatataacaatatatagctatccatcagtatccatgggagatttgttccaagaccccactggataccagaatctaccagtgtccaaatccctgatataaaatggtatatatttgcatataacctatgcatatcctcatgtatactttcaaccatctctagattacctaaaatacctaatataatgtaaatactatgtaaatagttgttatactgtattatttaggaaataataacaagaaaaaacagtttgtacatgttcggtacagatgcaaccattcttttttctcaaaatactgtcaatttgcagttggttgaatctgcagttgcagaacttatagagggccgattgtttaggagtacaacaacattattacaaacaataagaaaactacagtaaacttaagaactcccagttacatataaaatgacaaattaagaaacttcatattgattactttttactttttaaaacttcaaattgtttcctctgttggtgcagtattttttttttaatattaatataattgaaatggggtctggccatgttgcccaggctggtcttgaactcctgggctcaagcgatcctcctgcctcggcctcccaaagttctagcattacaggccacgagccaccatgcccgtcagttgcagtatttttaatgtaactgaattaaagaaaaaagtgaaatgtttctctctgagaatggaaattatgaccacttttcctgatttaagaaagtgttttgctaaattatgagaaaaatagtggtatgaaaaatacatataaagttatattgaaatttcagtatacattaaaaatcatcatattgtaattaactgtgtctttattgtgaaagagtaatctaattatacttcggaaaggaggccctgcttttctactaagagattaggaatgtatatatcattgaaaatgctgatgagaagggaaatgaaaaaagagaatatacaatttctacctaataaaattatgaaatttcaaggtgagttaagacattaatctgggagacagccatcctaaaaaatatttacataggatccaaattatgccacttcagattttgccctgttgacctaatgcttattagaaagagagatacatggttttttggtttttccgattccctctcaactaggctttaaaagctgggaagaaagtgaaactatctcatgaagaagttatgcagaaaatcggtgaactctttgctctaaggtaaaagttttctctctaaataaaatatttcatatatttaacaatctcaagaaaacattcccatagttctgtggtgaagagcaaacatttacacgtttatgggaactgtagctgttttcatttcattgattataagcagggagaactcttacccattagaagtagttgggctgtgttaagactgtactgaaagaaatcacgcatgtgcaaaagagatcacgattcatctacattaaacccacattaaggagcacagtaggtgttctttgaaggtagaaagacatattcctgaatttggttaatgggaattctctgtaaaaatatatcactgcatcataatgctaaataggcttaattgctacagaaaagtttctttgaatctgagacaccaagatgccactggagagaaaaactgctgccagttaaactatgacaatactttttttatcagaggattaaaattttacacttactgaaatatcttttaatcttagctggatataaattatatcacattccctcttgggcatatatgaaaaggaaagcataagaaaataaattatttaaggcaaagacaagtaagtctcaagtgccacctgtcagacaccattaattttaagatgcctcgagatgttaaaatgggaataactatgtctaaaaactgatgaatcattttaaataagtatctggaaaggttttcagcttttattattcttgtagttgtcccaggatttacggaatgaaacatcccggatgttggtgtttttctcacaggcagcattgtccagtttatcccttctagcatgtggaatgagttaccagagctcactgcaaatgttcacctaagacttgtttttccatattctccttagatgctctgcctggagagaagtgatacagtgtttcattgtctgtgtatctctcatagctcaggacctatagttcagggtaccaacaaaacttaaaaacccatccatcaggagcatcctgcagcatatctgaagcctcaaattctctgagaagtagggtagagagattcttctctcctgttctcttggtcatgcaagcagaaattgatgtagtgaattataatatccaaactgaatagttaggactaaatatacgtaggtttgtgaatagtttctataaaggcttacttttactatcctgtttccttacctgtacaataaaaatgcttatttgttaatataaggaatgtgatacatctgtgaaaataaacatggcagataatattagattaaaaaactaaatctaaatttatatagggtatgatcccatttgtgtaagcaaataaaaatattcatgtttatctttatatgcatacacatgtacatgtgtttgcttgcacacacatgcatgtatgaatacagaaagatctggaagtacacagcaaagtgtctctacaggcctgtccttggggagaataaaggatttaagtagtgtggtagcataagagagcctaccatttttctgaatccttctctaggatattttccttttttttttaatcgtgaacaggtatgtatgtgttactttttttttttttttttttaaacagggtcttgcttgtcacccagactagagtgcagtggcatgatcatagctcaccaaagccttgatctcctgggctcagggattcctcctgcctcaccctcctgggtagctgggaccacaggagtgctccaccacacccagctaattttaaaaataatttgtagagacagggtctcaaacccttgctcaagcaatcctcctccctaggcctcccaaagtgctgggattacaggtgtgagccaccacatcagtttatgtgtactttcataacttagatttttatttagttaaacatctaagtgtaaggccaggcacggtggctcacacctgtaatgccagcactttgggaggctgagacaggtggattgcttgaggctgggagctcgagaccagcctggctaacatgatgaaaccccatctctaccaaaaatacaaaaattagccaggaatggtggtgtgcgcctgtaatcccagcttcttgggaggctgaggcatgagaattggttgaacccaggaggcgaaggttgcagtggagccaggatcatgccactgcactccagcctgggcgacagagcaagattctgtctcaaaaaagaaaaaggctgggcacggtggctcacatctgtaatcccaacactttgggaggccgaggccagtggatcatctgaggtcaggagttcaagaccagcctgaccaacatggagaaaccccatctttactaaaaatacaaaattagccgggcgtggtggcacatgcctgtaatcctagctactcgggaggctgaggcaggagaattgcttgaacccaagaggtggaggttgtggtgagccaagatcgcgccaatacactccagcctgggcaacaagaacaaaactctgtctcagaaaaaaaagtaagcacagacttcttatattaaaatgtagaaattaagagagagagtgtgtatgtttatgcttgcttgtctagtgtttgcataaacactggaaggatacagcggaaactagaagggattactgatagggaaagatacagataagaataagagttaagatttatcaatttttacctgtttatatcttgatctgctcaggaggctgaggcaggaagatcacttgagcccaggagtttgaggctgcggtaagctatgattgtgtcactgcaccccaaactgggtgacatatgaagacattatctctaaaaaaattttttaaataaaaaacaaaaaagtgtggacatattaaattttttttttatttgagatggggtctcactatgttgcctaggctggagtacagtgtcacagtcttggctcactgcagcctctgcctccgaggttcacatgatcctcccacctcagcctcccaagtagctgggactacaggcatacaccaccacacctggctagttcttgtattttttgtagagatagggtttcgctgtgctgtccaggttggtcttgaactcacagactcgagcaatctgcccgccttggccttccaaagtgctgggattacaggcatgaaccaccatgcctggccctaaaatttttaataaaaaaagtttaggctgggaatggtggctcacacctgtaatcccagcactttgggaggctgaggtaggcagatcacgtgaggtcaggagttcgagaccagcctggccaacttggtaaaaccctttactaaaaatacaaaaaattagccaggtgtgatggtaggcacctgtaatcccagctacttgggaggctgaggcaggagaattgcttaaatctgggaggcagaggttgcagtgagctgagatcatgccattgtactccagcctgggtgacaagagtgactctgtctcaaaaaaaaaaaaaaaattgaaaacaaaatgagtttttttctgtgtacttcataaataatgttggtattaaagattgaattaatttggttcagaagtttgaaactcatttgtaaattttatttacatgtttgttggcagtattttgcaaaggtcagcattaacaaatgttttcagccacatgcaatgccacatgcctgtagttccagctacatgggaggctgaggcaggagaacagcttgagcccaggagttcagtttgcagtgagttgtgatcacaccactgcactccatcccgggtaacatagcaagaccctctctcttaccaaaaaaaaaaaagttttcataaagcactatgtaaatattaaatacaatagaaacaatgatttttaattcaagataaataaaaagttataattttcctttttaaaggcaccgtataaacttgagttcagacttcctgattactcctgatttctactgggacagagaaaacctggaaggactttacgataaaacgtgtcaattccttagcattggccgaagagttaaggtacgtattttgcacttctaatgagagaaaaagacacgttgtcgcctataagttgaatatgtttaactgcttgcagagaaatatcttgtttgacttccattcaaatctctttatatttccccttcttgtcctctgtacagtcacttcaattttttgtgtcaaaggatcttctgatattagctctacagactagataaggttggtgaataagatgagagtttggaagcctaatggtccatcagtaagttcttgtcaagtttcaagcaagagttcatgactgcttctgatctgtcatggtgacagtgagaatagaaataaatttaagaaagaatcatgtaagacaaatcaagtgatgggtaataagaggccatggagaagaaagaataaaggatgactgatgtttgcctggaggtgacaagtagaaaggtggaaaaacaataatgagaggtcagagaggggaggtgacagactaaatctaagatatgctgagattagagtagcaacaagatatccaattagctccgtcatgcaggcatttagaagggcagaagcaaagtcgggaaaagagacgtgtattaagaaatcccagcactttgggaggctgaggcggatggatcacctgaggttgggagtttgagaccagcctggccaacatggcgaaaccctgtctctactaaaaatacaaaaattagccaggcatggtggcattctcctatagtccgagctactcgagaggctgaggcaggagaatcacttgaacccaggaggtggaggttgcagtgagccaaggtcgagccagtgcactccagcctggatgacagagtgagactccgtctcaaaaaaaaaaaaaaaaaaaaagctgtagtgatggaggtagaccacatggggaaagagcatagaaaacagaaaattgacattagtacaatgtgtgcacatagttctgtgacattttgccacatctatagatccatgcaaccacatgatcaagacacaaaactgtgccaggtgcggtggctcatgcctgtaaccccagcactttgtgaggctagaggtgggcagatcacttgaggtcaagagttcgagacctgcctggccaatatggtaaaacgctgtctctactaaaaatacaaaaattagctgggtgtggtggcgcgtgcctgtagtcccagctactcgggaggctgaggcagcagaatcgcttgaacccaggaagtggaggttgcagtgagctgaggtcatgccattgcactccagcctgggcgttgcagcgagactccatctcaaaaaaaacaaaacaaaaagacacaaaactgttttatcacttttcctcatgctaccctgtatagtcacactgccctccccctacccggactgtccctaacccctggcagtgagtaatctcttctccatctccataattttgtcattttgaggatgttatatagatagtcatacagtatgtgactttttttttttttttttttttgagacggagtcttgctctgttgcccaggctggagtgcagtggctcaatcttggctcattgcaagctctgcctcccgggttcacgccattctcctgcctcagcctcctgagtaggtgggactacaggcacccgccaccaagcccagctaatttttttttgtatttttagtagagatggggtttcactgtgtttagccaggatggtctcgatctgtatgtgactttttaactggcttttttcacagagcataatgccctcaacttggatccatccaaattgttgcttgtatcaaagttcctgtcttcctgtggttactgaaacaattttttggtatttcattttgatgttactttttaatatatctcgttgcatagatatttagtagttgctctggttattacatcttacgtatataacttattacaatctactgatttcaacatcttgcagattaaatgaagtatagaatctttatttccctaatggatgattggatgcagaaaaaaaaaaagaattcttatttcttttatattcctttacccttccgtatttataattttcttaactattcttctgcagacatagaaaacttcatcagataatgttataatttttgcttcaaccatcaaacataatttagaaaactaagaaaagcaaagtctgttgtatgtgcccatgtttttattctttctgttcttttctccttctgatcttctaagatttcttttactgtttttttttttcaagaactttatttagccattcttttaaggtaagtctagtgagacaaattctcttagtttgtcttcatctgagagtgtattaattttctcttcattcttgcaggatattttcctagaaataggattctaggtagacagttttctttctttcagcacctgaaaaatgccatgccacttccttctgacctccatggtttctgacggaaatctgccataattctatgacatctacattttatcttttattatcatttcacaaggtctttgaggctctgttcacttcttttccagtatattttgtctctgttaagattgggtaatgtcctttgtttcatcttctagttgattgattccttcctctgttacattcgttctgctgcccaacattgagtttatttcatttattatatttttcagttctaaaatttccatgtttttttatttgtatcttctgtttctttgcagagacttcctgctttttcgtttgtttcaaatgtgttcagaattgcttgttgaatcatttttatgatggttgctctaacatcatctaataatacctaacctcagatacctcttgatattagtgtctactgattgtcttttctgattccctccaactaattttaatacctccagtttccctcattgcctcaagtgttctggcttgatatacaaggtccttcctattgtttctgtttttcaatcatatttcctaccaatccccacattcaccttgtatcacatcaaaaataagtgattagcctgggaaacacaatgagacctcatttctactaaccttttttttaaaaaaattagccaggtataatggcatgtgcctgtagtctcagctaccctgggaggttgaggcaggaggattgctttagcccaggagtttgaggctgcagtgagccatgatcacgccactacatcccagtctaggtgacagagtgagaccctgtctcaaaaaaataaaaataaaaaatacatgatttataatttcaaaaacctaccatggcttattgaatgctatgttccactttagtgtctacatttttttcctctaagctagacaccgccccttgcaaaaccacatcaaagctatctgcagttgtcactgatcttggcaccacctattcctctgtaggtgtcttccagcacaggacagtagagatcatcaccactcggcaagaaaaccaagctatgttgcttttagctgacacagaaagattgattagtgatggtttaggaatcaaattcagtggactccatcaacacagttttagataacagaggtgtaattagacaccgatttgacagtccaactgtctggtcaaacatgaaaagcactggactttcctggttgtcgactgtgcacacaggctgaagatccagaggaggaaagggagggatactaaaagctttatacagttgaggtatttcctgtggttgtgttagctattgctgtgtaacaaattaccccaaaacttggtggactgaaacaccacttactggctgggcacggtggctcacgcctgttaccccagcactttggtaggccaaggcaggcaggtcacatgaggccaggagttcaagaccagcctggccaacatggtgaaaccccataaattagtcgggcatggtggcatgcacctgtagtcccaagtagctgactctggaggctgaggcatgagaatcacttgaacccaggaggcagaggttggactgagctgagactgcaccactgcactccagcctgggtgacagagtgagactgtctcaaaaaataaaaagaaaaaagaaacaccacttactatttaagtttttgtgggtcaggaatcagtgcagcttagctgggtcctctgattctgtgtttctcacaaggctgcagtcatctcagagattcacttcctagttcactcgtggttattggctggatttggttcctctcaggctattagattgaggcctcagttcctcataagctgatgtccagaagcttctccatagagcatctcacaacatggcagtgtgcttcatcagatgaacaagtaggggagtgatatggtttagatctgtatccctgcccaaatcttgtgtcgaatggtaatgcccgtgttggaggtgggtcctggtgggggggtgactggatcatcagggtagatttctcatgagtggtttggcaccatccccttggtgctgttcttgtgacagtgagttctcgtgaggttgtttaaaagtgtgtagcacctgcatctccccttgttcgctcttcttcgcttctgccatgtaaggtacctgctctcccttcaccttccactatgattgtaagtttctggaggcttccccagaagccaagcacatgccagcatcatgcttcctgtagaacagtgcagaaccatgagccaattaggcctcttttctttataaattaccccgtctcaggtatttctttatagcagtgagagactggactaatacagagagcaagagagactgtcaggaagagaatgctagtaaaacagaagtcacagtcttttgcaacctaatcacagaagtgatttttgctgtgctctctttgttaaaaacaagttagggccaggcacagtggctcatgcttataatcctagccctttgggaggctgagatgggagggtcacttgaggccaggagttcaagaccagcctggtcaacatagtgatacccccgcccatctctttaaaaaaaaaaaaaaattaaaaagcaagttatggccagtcgtggtggctcacacctgtaatcccagcacttcgggaggccgaggtgagtggatcacctgaggtcaggagttcaaggccagcgtggctaacatggtgaaaccctgtctctactaaaaatacaaaaattagctgggcatggtggtggacgcctgtaatcccagtcacttgggaggctgaggcaggaaaatcgcttgaacctaaggggggcagaggttgcagtgagccaagatcagcctggatgaaacagcaaaacttcgtctcaagaaaaaaaaaggcaagttattagactgagcctacgctcgagggtaggggatgacacaaaagtgaacaccaggaggtggggagtctttgggtggcatcttagaaatctgcctaccacattggttttgaaaaagatggagaaaattctggaaacctactttatgacccctgacctacacgatcctcatactaccagttactttaatggttgccagcttcaggccatcaaagttggtggaaccattactgatctcattgtgttctgaattgtcagcaagccaaatgccgctggtctcagcttagacgagaacgttaatgccaaatttaatgatctgatcttttacctgggtggcattttttatctgtccatcctcagtattcaagatggaattactgaagtcaagtctgcaactgaggatacccacctgagtgaagagtaccttgacaactaagtggtcagctgtttcatggctgagatcaactgcagttatagaaaggacacccgttgagaacaagcaggctgcccaagccccttctgcctctactgaatgtgctcttcattctggtatcgaggccaatttgagattgagtccctccatgaaggggttcacatctatacctctgtgcacatgagcagctggaagaatcaaaagccaccccagtccctggcaccctacacctgtggagaaagccataagcaatgtcacccagacatatcaccagtccttcacgggtggctctatttatatccccaagatttaaaatctcttatagggccgggcatggtggctcacacctgtaatcccagcactttgggaggccaaggtgggaggatcgcttgaggccaggagttcaagaccagcctggccaacatggtgaaacctgtctctactaaaaatacaaaaattagccgggcctggtggtgcatgcctgtgatcccaggtacttgaggggctgaggcactagaatcacttgaacttgggaggcaaaggttccgatgagctgagattgcaccactgcactccagcctgggtgacagagtgagacttatctccaaaaaaataattaataaataagataaagtctcctacaggaagaactagaactgaatttatttacaggcagtatgatcttgtatgtagaagacctggaagaatctacaaagaagctaccagaataagtgagtttatcaaggtctcaagatcaatgtataaaaacggttatctttcgttatactgcaaatacacaattggaaaatgaaattttaaaacttctgtttatagtagcacccaaaacttgaattactcaggtttgaattgagtgattcaactattccagaataatattaattaatcaattggagtaatctgagcaagtaattgttctttatttcattccccagtctcactgtgggacatcttttttggtgttaagtcttctgcatgagttatgaagcatacctaaaaggtctcaaactacctttctcagagttttttctcagcatcccgaaggcagttcagactcgttggattatgtcaaggttatttagaaggggttgagagttcaccctgccttaggctcagcatagtgctggcattatacataatacaaaagaaaagtaagaattggtcctgcccttcagccagctttacagtcttctaagaaaacagatggaacaggccgggtgcggtggctcatgcctgtaatcccagcattttgggaggccaaggagggcggatcacaaggtcaggagatccagaccatcctggctaacatggtgagaccccgtctctactaaaaatacaaaaaaattagctgggcgtggtggcgggcgtctgtagtcccagctactcgggaggctgaggcaggagaatggcgtgaacccgggagggagagcttgcagtgagcggagattgtgccactgcagtccagcctgggtgacagagcaagactccgcctcaaaaaaaaaaaaaaatggaacaaagagtagcggggttttttattccccctcaaaaagtagaagaaagggtcttgagaaaataggggtgagtaggcataagacatgctaaaaagttgagtacagaggtccagatgcagagagcagttacacagtgtcatgggacagaaactagttggcagtggatccctcgctccattttctcacgtcagtatcccctgaagtcctgtcgctgaggcttctgtccccatgccaccttctccgtgaacacttgtttgttgtcgtgacttctaatcccaccttctcctggggattttcaaatgtctctctcatcccagtctcttgtctgccttccagacttttccagttgcccctcaatctcacagatcttcctcatttacatatctcgtcgcatccttttaaaaattgtgtgtaccattttccactagaatgtaagccccatgagatcggagaccatgattattttcttgcctgttcttggcaaaggcctcacatacagtatgtccgcaagaaatatttgtagaattagtcaatgattaaaatttcaaaatgaaacttttgaaattcccccccaccccagaaaatggtaaaccttttcagttctctatttcagctcatgggaggaccttctagcctcacctatctagtcattcaaccagaaacttaaaagtcatctgggtgtcctttttctccttcaccttccatatccagtcaaacaatctttttagttccctctaagtatcatggattcattagcaaacatttattgaaagcctgtatgataggccctaggctggtgaaacaggggaataccatactgacccgtcttcaagcccccaactattaatgttcatccacacagcccctcatcttcctttcccacctggacttgtctgattccttcttgactctctcagtctccagactggaccttttcccagtctctctgcaccctttggctgcaagacagacacatgtctatttcaccattctgtctcctctgcccagcgtagtacagtaaatgttaaaacaagtacttccagactgaacaaaggcctccccattacctgcagaatgaagttcagatattctagcatgacatgctactttcctactgctgcttaacagaaatttgtcatcttactgttctgtaggtcagaagtctggcatggcctaaagttaagatgttgattcctctttggagactgcgagtggaatccatttcctcaccttttccagtgactggaggccacccatattccttgctcatggccccctcctccatctagcaaaggcctgtggaatcctcatattgtatcattctgaactcttctgccccgcatttccacttttaaggacccttgtgattacattgggcttacccagataatctaggattatctcatcttaaggtcagctaattaataactttaatttcttatacaatcttaattctcctttgccatattatattcacaggttccaagaattaggacataaatctctttggggtgggggacatggttctgcctataccatatgtagtacacagtacctctcacaatctggtactaacttctttttttctgagatggagttcaatgccgtggtcttggctcactgcaaccaccgactcctgggttcaagtgattctcctgcctcagcctcccaaatagctgggattacaggtgcctgccaccacacccagctaatttttctatttttagtagagacggggtttcgctatgttggccatgctggtcttaaactgacctcaagtgatccgcctgccttggcctcccaaaatgctgagattacagatgggagccaccgcccccagctgacttaccttcttaacctcacttccaagcactttcttctaggttgtccacaatctagctatgcttgtctgtatgctgtttcctatgcttgacatgctcccttcatcccccaataaccccaccagcatcccaccttttcttcatgtccactgccttttaaagcctaattcacatttcctacctctgtgaagcctctcctggttttttctttgctcccttaatctgcatgctcgacgcgtacatgcctctatacctaaataaatagaaagcatgctgtggtaatagtgacttttttttgtgtgtgtgacggagtctcgctctgtcgcccaggctggagtgcagtggcgcgatcttggctcactgcaagctccacctcccggctgggttcacactattctcctgcctcagcctcctgactggctgggacaacaggggccgccacaacacccggataatttttttgtatttttagtagagatggggttttaccctgttagccaggatggtcttgatctcctgacctcgtgatcctcctgccccagcctcccgaagtgttgtgattataggcaagagccactgcacccggccatagggactcttgcttgcacatttcagtgtgttgtcagatgcttggattgaggttcgaagctaagttgttagacttaataatagactttgggacgtttaggagagttgtggtaatataaactaaaggaataaattggatgatgatgaggtagtggaggaagaaaatgttgcctgttttttggcccaagttgaaagaaaatgcaagaggctgaatcagtagtctgaagagagaagcaagcttaaggatgaacattaaagaccaagatcaagcagccaatagaaacagacattaagaaagggcaagaggaaaggaaaacagggaggggaaaggaagagggaagaggcatgctctacacatctatacagattagaaactacagggtgaccataacgcctggaaataggggcaaatggtggagtgtggttcagtcagttagtcctgtggttctgtgagtaagacagtttttttttggagacaggatctcactttggcacccaggctggagtgcagtggcatgatcttggctcattgcagccttgaccacctgagctcaagcaatcctcccacctcatccctgccaagtagctagaactacaggcacacaccaccatgcctggctaatttttttgtagagacagggtttcactgtgttgcccaggctggtctccaactcctgagctcaagtgcgcctcctgcctcagcctcccaaaatgctaggattacaggcataagccaccgagcccagcctagtaaggcagtttaatgctatgtgcaaaaatcgtaacatggtgcagttaacgcattccaatcaacccctgaacacgtacctgtgattcatctcttaatgttcactgaccaaacctgtaacttcagcatacccatgagacaaactgttttaaaattttgctttcaggatttccagtagcaagtgatatataaagatattaggtaggtatttaacagttatcacatccaggcctggcacggtggctcacgcctgtaatcccagcactttgggaggccgaggcgggcggatcacaaggtcaggagatcgagaccatcctggctaacatcatctctactaaaaatacaaaaattagccgggcgtggtggcgggcacctgtagtcccagctatttgggaggctgaggcaggagaatggcgtgatcccaggaggcagagcttgcagtgagccgagatccgccattacactccggcctgggcgacagagggagactccatcccaaaaaacaacaacaacaacaaaaaaaaaagttgtcacatccaaattttgaattcagggactttattttctttgaacccccacagccagcttgtttggaggcatcggaatgcagaactgttgcagttcagttgaaagcaatgccatctagtggtgtgtgtacagcaggtcaaatgttaagcgtagattttctagtagaaagtaaattatctttaggtcttgctaaaaaacattatgtttcaagtttgcctcttttaactgctaaaaagggcagctactaaaaactaggactcaaaaacctatttttagttcttccatcaaaatcttacaaatagaagagcttcagtatgcaaagtatttcttgcagttaaatttgtacattacaaaatgtctctggacggattcacaagaaactgataatgttggtggctgcctttggggagaggactgaggagcaggatttttcactgtatagctatagaatttttatgtgtatgaccgtattaaattgtttaaatacatgttactgaaatttttcttacataggtcatgaatgaaaaacttcagcactgcatggaactaacagatctaatgcggaatcacctgaatgagaagagggcactccgcttggagtggatgattgtcatcctcattaccatagaggtaagatggaaatgctctgtactatgatcagttaccatcttttcacaaatacaggggctatgctaataagatagtttgagatagaaaattattagcagaaaagaggctgactttgttatcattactaactctatttggaagtttcaaattactatttgcaaatgcattaaaagtaattcttgaaaaggttccactttttaaaatttgagagtagacctcaaggttctgcttttaaagacagcatttggaaaaagttctagctgtaaatttataatgtacagctcaacatcaaatcaagcacccgtacctccaattcataggttgccacgtgagaaagggcaaacatttaccttacttcaggagcatttctcattaatcacaatcttggaagtcattttagtttgtacccataatttgcccgtcatgaaataattctcactttctattctaaggtaatgtttgagctgggacgagtatttttctgatcaagtgataaccaaagtgtcactgcaagagatattcaagttctacaatcaaaaattaaatgttcggcccggcgcggtgcctcatgcctgtaatcccagcactttcggaggccaagaagggtggcttgagatgagatcaggagctcaagacaagcctggccaacatggtgaaaccccatctc

SEQ ID NO: 15774 - DNA, 31440 bp, Homo sapiens
tgggcgggagcgcccttccaggagatgggttggctgcagtagtgagaggctgggggtgcggctctttccctgcagtcctgccgaggaagcgtgcgtccctggcgcttccttcttctcttccggcggagaggttagtgtattgccttttctttagcagctcgagtggtccggcttggaggtctgcgccctggctcctggccgcccggaacgtgtacagttacgggttacgccagtgcggctgtgaccctttgcctcttaccgtgatctttggtcagcttagctgggagtaaaaagcactcaattaatgaaccctttttttgagccagtgcaccgcggtaactgtagaaatcgataaaataattttgagtttgaggaattgaacggcatactcccaaagatgagcgccacttagctctcgaatcgtagcctagctgtaatcgattttcttaattggtgtaattgttctctaaaagttgaaatgtgcccgggaactgagtaactgccttgtatttcattttaaaaattcgatcgaatgcctactatgtgctgggcgctattgtcaggagatataataggaaaaaacacaaatccgtatcctcagggagcttccattctggaaggaagacacaaaaatctgccctttcctcttatttttttcctttagctttgtgtctcacgtattttactgatttacctcgttttgtctgtcactcccaatgcaaggttcaaaagattcaaaagataggatttttgtctattttattttcagctgtattgtcagcaactaggacaatacctggcacatgataagaactgagttcgtttgcagtatgaattaataaactaaaaattaaaggtgtgcaagtgatgttaaacaatggagaaatgcaaagtggaggaagataagagaatggatgctggttgtgtttttttttttttttttttttattgatcattcttgggtgtttctcgcagagggggatttggcagggtcataggacaatagtggagggaaggtcagcagataaacaagtgcacaaaggtctctggttttcctaggcagaggaccctgcggccttccgcagtgtttgtgtccctgggtacttgagattagggagtggtgatgactcttaaccagcacgctgccttcaagcatctgtttaacaaagcacatcttgcaccgcccttaatccattcaactctgagtggacacagcacatgtttcagagagcacagggttgggggtaaggtcaccgattagcaggatcccaaggcagaagaatttttcttagtatggaacaaaatgaaaagtctcccatgtctacttctttctacacagacacggcaaccatccgatttctcaatcttttccccccctttcccccctttctattacacaaaaccgccattgtcatcccgtcccgttctcaatgagctgttgagtacacctcccagacggggtggtggccgggcagaggggctcctcacatcccagtaggggcggccgggcagaggcgcccctcacctcccggacggggcggctggccgggcggggggctgacccccccacctccctcccggacggggcggctggccgggcggggggctgaccccccacctccctcccggacggggcggctggccgggcggggggctgacaccccaccttcctcccggacgggggctggcccccccacctccctcccagacggggtggctggccgggcggggggctgacccccacctccctcccggatggggtggctggcctggcgggggctgacccccacctccctcccggatggggtggctgccgggcggagggtctcctcacttctcagatggggcggccgggcagaggcgctcctcacatcccagacggggcggcggggcagaggtgctccccacatctcagacgatgggcggccgggcagagactcccctcacttcctagatgggatggcggccgggaagaggtgctcctcacttcctagatgggatggcggccgggcagagacgctcctcactttccagactgggcagccaggcagaggggctcctcacgtcccagacgatggggggccaggcagaggctgcaatctcggcactttgggaggccaaggcaggcggctgggaggtggaggttgtagcgagcctcgatcacgccactgcactccagcctgtgcaccattgagcactgagtgaaccagactccgtctgcaaacccggcacctcgggaggccgaggctggcagatcactcgcggttaggagctgcagaccagcccggccaacacagcgaaaccccgtctccaccaaaaaagtacgaaaaccagtcaggcgtggcggcatgcgcctgtaatcgcaggcactcggcaggctgaggcaggagaatcaggcagggaggttgcagtgagccgagatggcagcagtacagtccagcttcggctcggcatcagagggagaccgtggggagagggggaccgtggggagagggagaggagggagagggagagggctggttgtgtgtttttaatgtagtggttggggaaggcttcactgggtagaagacattttagcaaacatctgaaggaggtgagggtgtgagcctttcagatccctgggagaagagcgtaaggaacagcaagtgcacagatccagagaccagaatgaggagcaaaataagcaaaggagagtgctgtcaaagtggtgataaaggacagataatgtagtgccatgcaggccattctgaggggtttagcttttttttttttttttcgttacagaatctcactctgtcgcccagactttagtgcagtggcgcgatctcggctcactgcaacctccacctcccgggttcaggcgattctcctgccttggcctcccgagtaactgggattacaggcacccgccgccacgctcagctaatttttttgtatttttagtagagacgaggtttcaccatgttggccaggctggcctcgaacatctgaccttgtgaatcacccgcctcggcctcccaaaatgctggggttacaggcgtgagccaccgcgccaggctttttttttttttttttttttttttttgagacagagtctcgctttgttgctcattctggagtgcagtggcgcaatctccgcctcccagattcaagccattctcgtgcctcagcctcccaagtaactgggattataggcccatgccaccatgcccggctgatttttgtatttttagtagacacggggtttcgccgtgttggccaggctggtctggaactcctgaccccaagtgatccctcccaaagtgctgagattacaggcgtgagccgccatgcctggttggagggctttggcttttattaagtgaaccgtgaagccacagctagatttcgcgttgagattcaacttcaaaggatcactttggttgctgtgttgagaagaaactgtagggggcccaaaacagaatcaggaaaactggttaagaagctattataataatccatgggaaggatagcagtttggatcaggtagtattattactgatgatgagcagtggtccctagaaggcccttgggatttactgagaagttggatatggagaataaagagtcaagctggaccccacgtttttggcttagcagttataaagatacttattactgctcatgaatgggaaagactgggaagaaagggatgcaagggattctaggggtataagggagaggttagaatggtagaccatggagtgtaaactggatatggaggaagtgaagtcatggggagtgagagacagtgaaaaggtggttggatcattgacttgtgggtcctgttggggttgaagaattattggaattgggtaatagaaggagtgagatgcaaagataggaggtggtgcttagagagtaaaatggatgaaactgagatgaggaggtccgatgtattgataatgacaatagggccctgtctgatagaaaaacagtgtaaggcacaaatgtaatcttaggctttctagaaggtgcagtgataaaaatgggctgggtccggtggctcacgcctgtaatcccaacactttaggaggccaaggcaggtggatcacctgaggtcaggatttcaagaccagcctggccaacataatgaaaccccgtctctactaaaaatacaaaaaaattaactaggcatggtggcagacacctgtaatcccagctactcgggaggctgaggcaggagaatcgcttgaaccggggaggcggaggttgcagtgagctgaggtggcaccactgcactccagcctgagtgacagagcgagactcccatctcaaaaaaaaaaaaaaaaaaaagaatttactcaaagagaataaaaagaatccaggactgtagacaaacttctaaaatattttatagtttcttcaaaattaagtggttcaactggcatggcatagtactaattaaaggtgaactacagtagccaattggactagaatgaagcacagaatgcgagcttttgaagggattttggaagcagcaggttctacctcctaaatatcactgtgaatcatctttgtccttatcctgaagagaggtagtaaatacaaggtagtgggtaagagtgttgactttggaattgggaaagcctgggttttattttagttacatctctgcagcttcttaacggtgagcacttagcctctttaaacctcagtttcctaatcagtgaaatgggatcattatgaggtgaagccgagcacttagcatgtagaaagcgctcagagtgatgtcagagtctgtcttgtttcctcctacatatcatcaccaaaaatttgtttcatgaacatgcatttgaccgtgtgactctgagttaaaagctcagctttctccccacctgtagaaactttttaggatgactttatatatcctttggtgatctggccatcggctcttttggtccttacctcctgcagctcactcctacctccccgagatggggagatgaataggactccatgcctggggtgtttaacttgctgatccttctgccctttcaagactcagttcaaatgtcacctctgtgacaatgccacactcttcacatgctcctttctctggactagagcaatttgtgcatctcgttcattttcctctgctagactttgaattctgagatcattgattcatctatctctagcacctaacatattatttttaaaaaaagaattattgattactacggtctaacttttttttttttttgagacagagtctcattctgtcgcccaggctggagtgcagtggggcaatcctggctcactgcaacctctccctccctggtttgaacgattctatatctcagccacctgagtagctgggattaaagccactatgcttggctaatttttttttgtatttttagtagagatggggttttgccatgttggccaggctggttttgaactcctggcctcaagtgatccccccagcctttagcctcccagagtgctgggattacaggcgtgagccaccatgtgtggcctactataggctaactttaaaataacacatttcatactgtaaataagggggaaattctgtttaccttgtctggaatgttcatgtgtgtatctgacatgcctcgcactcccatgcccagccccaagctgaaaagcaccttcgccttctagaatcagcttagatctttctgggaacctttcctgattttttttttttttttcctgagacagaaaaagggctggaatgcagtggtacaatcatgactcactgcagcctcagtcttctgggctcaagtgatcctcccacctcagcctgtgagtagctgggactacaggcatgagctgccatcacacccagctaatttttaaatttttgtcatttttgtagagatgaggtttcaccatgttgcctcagctggtctggaactcttggactcaagcgatccacctgcctcagcctcccagtgtgctgggattacaagtgtgagctacagtgcctggccagcacagatttttatatacttgatatgctaatgaagtaaatgaagtggtcccatcactattttttttaaggttcttgttatgtcagtagctttataatcttgtaatcttccaggaagaaggccaaatgttgctaaaggcaaagtggcagaaacactgtacttatatttttaaccttgttcttttactagaattaacttagaatgtatctgttttacaaatttttctaacagaaatatgcctgctacctagggaaatattatatatgttttaaacattaatttaaaaacttgaactttgaattccttttcttttagcttgggatgtggtaatgccagccacactcctcagagccgtggccagatctcatcatatattatcaaaagcacatcagtgccgaagaatcggtcatctaatgttaaaaccacttaaggaatttgaaaatacaacatgcagcacactgacaatacgtcaaagcttggatttgttccttcctgataaaacagctagtggtttgaataagtctcagatcctggaaatgaaccaaaaaaagtcagataccagcatgctgtctccattaaatgctgctcgttgccaagatgaaaaggcacaccttccaaccatgaaatcctttggtactcacaggagagtgacccacaaaccaaatctgttgggttctaaatggtttataaaaatattaaagaggcatttctcatctgtatcaacggaaacatttgttccaaaacaagacttcccacaggtgaagagaccactaaaagcatccaggaccagacagccatccaggaccaaccttccagttctgtctgtgaacgaggtaaagtaggggtggccgtggctctcgtgcttagtgatcattgctcatgctaaaccagtgtgcgttgcaccccagccttaccgccaacgtaagagaactagcagtcactcagacttcttcatcaaggtctttgaagcctaataaatatccaaagggattcagaatcttaatttttaacaattaatgatacatataaaaacaaaatacaggtgataacacatgaaaatagagtttataaaagatttggttattggtctaaggaaactgaaaaagaggaccaatattaagtccagtctaagaatgggactgtaaaaaaaaataaaataaaaaaaaacaaactagaaattcttcatcaagttaaaaaaaattgtaactctgcagacagataagcctttattaggctgtggcagttgcatggggcggtgaaatgacacggtagggtggactccaaaagcagcaggagaggagggcccagcttttttatcctcttaaggtttaagggggtattttttattcatccttaaggggtttctgggaatttttctgctacaatttgcatttctccttcagtaacaacttaagggtcaagatcaagcccttgataacctttgtatcttgcataatacctagaactgtaccttgtacttaaatgtttataagaggatctttaatgccgatagtcatcaactttaaagatattttaaacttgatgaagacttctgaatctatcagaaaacaggttagaatgtctgtcttcaagtcttgattctgaaaagtagcccctgagcctgtttcattttggctgtgtttttattactgtgcagctgacaccccttggaaaggtatacatacatacctttactcatcctctgattctgaatctagcaatgaatgaatggtttttgtgttggattctggaatgctttcaattcttgtgtggttactctgaactcaggacgtgaaggatgaagtgttgtgcagctactgtttcccctttccttttgctggagctttggggtaacctgggaaattcagtatttaagtgtccgagatggcattaagtgtaaaaacctgaattcatggcagctccaaaaaagagaaagctcaactcactttgttcatttgtaacgtctagcagcacagtgcatcaggtttcttaggaagaagctgataggtcagagatgtccctaggctatttctttgggccatccttagacttggaagcaattttcctaaataccgtatctatttttctttagatttttttttctacttccttccaggaaagaatttgaagtagattttcaacattcaacatagtttcaaatgagataataaatactttcacatattagagcaaatagttgacatgaacagagaaatgttatgaagtacctgaaatgaataatctagttgaacattttgttttgagaagcgcagtaattaaaagaggaactcctcctgggatttagtgtttgttgtttattgttgtgggagagggcagagtaaaaacataaaaatatcttcagagaaataactttttccagcactgaaattaaggagttagttatttcatggattctgttataggagacattatgtaacatgatagacaatgacttcagttggagtttggcaagagcaagtcgcatgctgtctttctgaaagcacagggaaataatagaaaatcagatgtttctggctgggcggtggctcacagctgtaatcccaacactttgggaggcccaggcaggcgattacttgaggtcaggagttcgagaccagcctagccaatatggtgaaaccctgtctctacaaatatacaaaaattagccaggcgtagtggtgcacacctgtaatcccagcggctcgggaggctgaggcaggagaatctcttgaactcgggaggtggaggttgcagtgagctgagatcatgccactgcactccagcctgggtgacagagtgagactctgtctcaaaaaaagagaagaaaatcatgtttctaaagtggtctgagataatgtaattttggaacatcattttttgaagattttacttttcatagagaaagcagtcttggcatgactaggtaatatgtccccaggaccaaagactgactttcctctgcccgaaattgagggccactccatttttatacggccatcatagtggtaaaccctttataccactttataccatcaaaatggtaaaccctttataccattcttgactgagacaaggaaaagactctgctttgtgtcagaaagcatgtggactttattttgttcccatagttgcacccagctcatcttttcagctctgcagaacagcgtgcatctggagttggctgaatgaggtttcagtcaccctgtctgttggaattaaatctttacctggtctcattttcagagatcataatctgagatactcaacccacatccctttggcttacaattcctaaaagcaatagtggatccagtggcttatgcctataatttcagtgctttgggaggctgacacagaaagaccacttgaggccaggagttgaagaccagcctggcaacatagcaagactcccatttctaaaagacttggaaaaaaaaaaaaaaaaaagccgggcttgctggtgcgcagctgtagtcctagctactcaagaggctgaggtgggaggatcgcttgagctccagggttccaggctgcagtgagtcgtgactgcacctcgctccgtccagcctgggcgacagagtgaggccctgtcactaaacaaacaagaaaacaataatagcagtgcttcttgttaatgtccagtctttgaagagaacagcagaggatgggaacggcaggtctgagtggcatggagcccgacaccagggagaatgttttcaggctaatagcactgtgttacagaatcactggtggactgttaaccatttttttgaaaaatgaaatagaatagaaaataacagaatacattgctcatgataaacgtaaatactggtttgtgaagcttttgtggcaattggtgtgtaagcatatatgtgtatatgtactatgtttaatgatttataggttgtagtcagaaaaacttacaggataaagcgtgatcttggtaacgtaaaatgtatctgtgtttttatagctttaatctccaatcagtatgttacaggagaaaaggcatttttccttagtatgatctatctactcacagtacttctgacatcaaatatatggggacctcttcctcctcctaccagccagttctccaattctccagacactaacaaggtgtcctgcaattcagttcaattccagcactagccagagttagtgcagacgccagttagttaagctcagccccacaagactgccctcccagttgacacctgtgcttctgaccaaccagctctatgacaaccatcccctcttcaggtttgattatttgctagaatggcccacagaactcagggaatcattttatttatgtttactgggttttttatataaagtatgcaaatgaacaaccagatgtagaggtgcacagagtgaagtcaagaagggcctggaacttaggagcttctgttcctcatagaactgggctgtgccaccctcctggcacatggatgcattgatcaacccaggagttctccagaccccatcatctgggtgtttttaatggaggtttcattgtgtaagccatgattaatgattaactcaatctccagcccctctccgtccaccagaagttaagggtgaggctgaaagttctaagcttctaatcaaagtttggtctttctggtaaccaccccccatcctgaagctgtccaggacccactgagagtcacctcattaaaacaaaagatgttcccatcactcgtgaaattccaagggatttttagaagctctgtgttagtaactgaaggcaaagagcaaatactacaaccaaaaatgcccctgtcacttagaaaattacaggggtttttaggagtctgtactgggaaccaaggacaaagaccaaatgtaaatgtattatatcactatagaagcaacattgctgtaacacactaattttcttcagtaatacagtgtaaatgaaagtataatttttaaaaaaatgttctgatcagagcatgcgatgctcctaaaacaagaatcatatgtagatttctagccccatctgctggaacatgtcttctttggccagaaaaacaaaacatactaaaatacagtggtttggggtttttgctttttgggttttttaaaacattttgaagtagaaaagccctgaatatcataactattatcggttggtttgacacatctatttaacaggaaggtgtagatccccatcctgaaacccaaaatatgctttacatatatatgtagctaatgcttaataaggattcactgtaaaaatccagaaaaggatgtataaaaatgaaagctgctcagaaaacaacagcatctttaataaagaaaaaaaagcagacaagacattccatgattctctttccttttaccaaataggctaaaataaaaaaagcaaagaaaacaaaaccaaaacaaagtgtctaaaacgtcaagttcatctattaatagaagaaacccacaactaagactcagagctaagaagtttaaggagaatacagaaagtagtgtagcaaaccatataagctgagtgacattggatagaactttgagccaaactaaatgggagatcccaagagaaggaaaggggacagttgacagtctggaaaacctacaacaaagatccttaggatggccaagtgaaaacagattgtgtttaaagatttattcataatttatttggagcttagaatatattttctcataaaaatagtgattgacttgtcctgtccttgagagttgaaaatagtacacattctcaatttgccgttagtgtcggaatattcacataatttgggataccagattgcccaaaactcagttctgaatatattgagccttttatttttatctccaagtggcggtttttaaaactgaccttttaccttgatttaaaataatagtgcctggctgggcatggtggctcacgcctgtaatcccagcacttgaggccgaggtgggcagattaccagaggtcaggagtttgagaccagcctggccaacatgaagaaacaccgtctctactaaaaatacaaaaattagccaggtgtggtggtgcatgcctgtaatcctagctactcgggaggttgaggcgggataatcacttgaatccagggggtagaggttgcagtgagctgagatcgcaccactgccctcacgcctgggcgacagaggaagactccgtctcaaaaaataataaataggccgggtgcggtcactgatgcctgtaatcccagcactgtgggaggccgaggcgggaggatcagatgaggtcgggagtttgaggccagcctgaccaacatggagaaaccccgtctctactaaaaatacaaaaattagctgggcgtggtggcgcatgcctgtgatcccagcaactcgagaggctgcggcaggagaatcgcttgaaccggggaggcagaggttgtgatgagccaagattgcaccattgcactccagcctgggcaacaagagtgaaactgtctcaaaaatataataataataaagtaaaaaacagaataaaataataatgcctgccaccgccattaacagaccttgtactctaatgccaagctgtatatgggacagttgccagcatgtcttcactggcactataaaatatagccaagaagataggctctgagagtaagaagtctgtgttggttaggagtaattttgtcctggctctctggtataaagctctcaaatgtaaatccgggtgggataatggactcagctctgtctgcaacatgccactgtgcagagaagcactctcatgcataagctttttatgctgtaaactatagtagctgaaattaaatgccactttttcagaggtgaattaatggagagcctggtgaaattcaaagctttttgatgtataaaacttgataaatggaactattccatcaataggcgaagtataacaacctgtctacatagatagtatgtaatttctgcacaggtctctgtttagttaatacatcactgtatatcaatctagaatcttgctccaataaaggaacataaagttgtgttttggttttgtttttgtttgaaacggagtcttgctgtgtcgcccagagtgcagtggtgcaattttggctcactgcaacctcggcctcctggattcaagggattctcctgccttggcctcccaagtagctgggattacaggtgtgtgccaccacgcctggctaatttttgtatttttaatagagccagggtttcaccacgttgaccaggctcgtctcgaactcctgacctcaagtgatccatccgcctcagcctcccaaagttctgggattacagacgtgagtcattgggccttgccaaggtttttgggttttttttggaaaaaaaaaaaaaagtagtacacattcttagtgcagatgggcttggccagtaccacatgatggtgaagcagacgtgagacaacagggagaggcagggacagtgtgggctggagaccctgggcccccctactctatcctagtccattattatagccagatcttccactcggtcagatgatgatggaaatctggattttgtgtgaaatctctcagtttattgttgacaagtcaatttgaattttagaaacgtgatgtaggtcaactcttgagttggatggttctccgagctgccagtttacaactccgattctagcaaaagagacagcctctgccattttcagtacagctacaggaagatccttcagtggactagcttgtgacctgcttatctcctttttgtgcctcttgctcttcccacttcagcccaaactaagcacatgagctgtagccatcacagaagtaattctgacatccaacctaatgtactgtgatttcacctagcaagcttgagtgaatttgccaggtcttgcagagtggagcctacccgatgtctcgcctgatgccccttgctaggattcctttctttcagctggccgaatctttacacacatcgtacatcagctagttttaactccatgaagccttaaaaagaactagtgctcacaggtctaaaccttaagcacgtgcctgttccctgtactctggtaactcctgatacatttttatttgtatatccccgtgttcctactttcatatgtgactatgggaattagctaatttggaaggaattagcagttatctgctcataattagggtactacatccatttatccccacattccccagtaatttcagcttgtctgactttttttctaattggattagtctcattttgtttatgagtagatactttattgattttggatttttcagtttgcatggatcctcaggttctctgttattcctctacctttaaaccacgcatcagagctgtggaacagattgaggaagggcaaatggggtcaggccatttcatgagaaagagccaggagatacagaatggaggtgggaggaaggaatgaattaatatatacttctctagaatttcataccaggaatatacagaatgggaaagaattggggagctgagaggagtaaatcctaagaataaatgttgatttagtgactcataaacttgttttggccaactagaatctaacaactactgaacagttgtgttagccacagtcctgagcactttgtttattagcttatttaaactttacaacaaccccataaagtaggcattattgttattctgatactcttttaaaattgtaaccaacttctgtgcctaaaatcttaactcttatgccaatagctttcaaactttattgaccacatcttatagtgagaaatatatttaacattttacatacatagcgacctagagtagatacatagatacatgtaagtgacagaaaacttcataaaatagcatttcctgtgaataatgcactgtaatattttctatttagttttattaaaaaagctgttttgggccaactaaattggtatcagaactcactaatgtgttgtgacttacagtttgaaaaaacacagcattgagccatagtgcttaccatctgtattttatatagacacaagatgactttcctcatgtgtgcaaaggcaagatggggcatgagacaaagtacaaaccaaaccaagacacatgctcagatttacagacctttttgttaaatgttaaccagtgtaaaaatactgtaattcctttggggatttaaaggaatctgcctgtacaagagtagttacaaattaggaaatgacctcaaatactaatgttgctttgaaaaagagtcatggaaactcagggttggagagacttaaacattccatccagtcacccatgtgatgccttaatcatctctattttgcattcaatctgtgcttgagatactaccagttgagtgtggcttccctttcagaataatccattccatctttttgcctggcgggagggagcaagttcttttcaagattgagctgaaatttgcctcccagtaacttcattctcttcatcttcatcccatcccttgtatcacccttggagatgtttgaagaaaattctggagttctagctttgcagaatggagtccagtagggtgctcagcagccgtcacagatgcttcagcctcttggtaacccatgttatgctcatttccctggaacaggacctaatgcactgcacagcatttgcaacggcagatgagtatcatctgggaaatctgtctcaagatctggcctcccacggatatgttgaagtaacaagcttgcctagaggtacttcttcttgaacctggggccaagtatgttaaaatgtattggataattttcctatgatactatcttaagtatgtatttgtttgcaattcattttcttttgaaaggattgtatcataaaagtggatgttgaatctctttataaagatgacaaagttaagaattaaaatgtatttacagagaactcattaaaatcagtatgatttattaagattatttataggatcattattacttgaggtggtcagaggtcatactacttcatttctagcacattaagaagttattttagtttgtgtgtgtctgtgtgtgttttgtgttttttttttttttgttttttgggatggagtttcactcttgttgcccaggctggagtgcaatggcgcgatctcagctcactacaacttccgcctcccaggttcaagcgattttcctgcctcagcctccggagtagctaggattacaggcatgcgccaccacacctggctaatttttgtatttttagtagagatggtgtttctccatgttggtcaggctggcctcgaactcccaacctcatctaatcctcccgcctcggcctcccaaagtgctgggattacaggtttgagccaccacacccagcccgttattttagtcttatagaagaaccatgaagttgatagacatggggagagcctttaaaaaaaaaatttaccagctcaatctaatactttaaaacaattagttagccgggtgcagtagctcacgcctgtaattgcagcactttgggaggccgaggcgggcagatcacctgaggttgggagtttgagaccaacctgaccaacatagagaaacccctgtctctactaaaaatacaaataataataataataaaacgattagttagaagataaaaatgaaaaagaagaaaattaaaatgaacttaattgaggatttttatggtgaaatcaggaaggattcttgagaaatggcttgctttacattaattaaaaataatttaggccagccatggtggctcaggcctgtaatcccagcactttgggaggctgaggtgggtggatcatttgaggtcaggagttcgagaccagcctggccaacatggtgaaaccccatctctactaaaaatacaaaaattagccaggtatggtggcacgagcctgtagtcccagctacttgggagactgagacacaagaattgcttgaacctggagggtggaggttgcagtgagctgagatcatgccactgcactccaacctgggcgacagagtgagactctgtcttaaaaaataaataaataggccgggcgtgatgcctcatacctgtaatcctgcactctgggagactgagacaggcagatcacctgaggtcaggagtttcagaccagcctgtccaacatggtgaaaccccacctttactaaaaatacaaaaattagctgggcgtggtggtacgtgcctgtaatcccagctactcaggaggctgaggcaggacaatcacttgaacctgggaggtggaggttgcaatgagccaagatcgtgccactgcactccagcctgggtgacagagcgagactctgtctcaaaaataaataagttacttagaacattttgataaacttttacagtgaaactcaggatagctcaatacccagaacatttattaatttacctaagagtagcaaaaataggttgaaagccttcctataacagtggaaattcttaagactcaatcccatagaagatagttgaaatatcattgtgataatccaaacagaccgtttgtgtgattaggtgacaaaaacaagcatagttgacttagaaagacagagctatgtctagagccccttggtatgaaaatttgcctggaggtattgttggctgatgctgaaggctgccagctgtgtggtctgtgcttcacagaattgcaggcttcactgccctgggttgtttcagtcgattttattttgcttttggctgtgtaggcaaactctgtcctatgtaggatgtagtaattaacaatttagaaaaaaaaaaaaaatcacagttttggtctgtgtctgaattgcccatcacccagcctttaccagaaatttctgaagctttgaggatcctaattttatgttaattccgttaagacatacaaccttttgcaaattaatagtatattttttaattgatatattaacattggttgtaatttatattatggaatatatgcttatgataaatatcactatactaatatataaagcaacttcttatgatgaatattggtatattagtatatgttttaacaatacttaggccaggccccgtggctcatgcttgtaatgcactttgggaggccaaggcaggcagatggcttgagctgaggagttcacgaccagcctgggcaacatagtgagacctcatctctacaaaacataaacaaaaacttagccaggtgcggtggcacatgcctgtagtctaagctacttgggaggctgaggtgggtggggcgggggggggtcccttgagttcaggaggttgaggctgcattgagctgagatcatggcactgcgcttcagcctgggagacagagcaagaccctgtctcaaaaaaaacaaacaaacaaaaaaaaaactttttttttaaatagttgcaggtggctgcagtggtagcccctgtagtgattaaccttgaaatcacatatgttttgaagtggtcagtatctttatttctgtgtattttctattgccctactttttatactttaaaattcagcaggagtagtagtttgggaatgttaaaattgcattattaatgaaatggtatttataggaagagaatatattaatacttcttcaaattttatttttaattttgtagaaagaagtttaattcttgacacttagttgtatggaacctaagactttattaattatctggactagtgattattgaatcaaaatgggcatgaatgagctctaatattaatatcacaggttgttgaatgttttataaaagtaattgctgatctttttttggtggtcgtatttgcatttttatatattaaatcctttcagaggccttagtagaaagatggtgattgtgttacagagcactccatggtatataaagaaatgatcttaagtactttattacagtgtttataggtgactcttacaacttgtgttaccttgacatagcttttttgttcgtttattttaaatcacagatgcagcaaatattttggtgatgggtgtggaaaattctgcaaaagaaggtgatcctggaacaatattcttcttcaggtaagacaggaaagaaaccccattaggtgatgatgggtttgggtcaagtaattgtggtctttaaaggtgcaggcatacctttcttaacagtaaatgtgttcaaaatgtatttgtgatttaaatttatcatttaattcttatttaatctaggagagtttgtcacttttaggaattctctggtaaaccctcttataaagtaaagaatatttcaaacaagtgaatgatcttccccggggtgtctttctttgtaaattcggattttcatggactaaatttctggaaagcagccaatttcccattcatctttagtgccccttgtcagactcctgccccagggaaactcccgctacctccctgctgtctcttcttgccattttcttttttttctcccttcccctttggtagctctttaaagttttagcttacctctccagaggttttagactaggagactcacatacacacttattccttttatctaaaggccgactcaatactaaatactccacagtagctgcctgggaatgataacatgatagaaccgtgtgaaataatctcatttatcctcagcacaccgatgaaggtctattttgcacctgaggaaactgagggtcatagggattgagttacccatagtcatgagactaatacgtgacagaacagaaacacatggaccatctgtaggaatccaaagttgagtaaagttcttgtggtcataatccttatagttgatgataagtggaagttcttttttcctttcaatgcctaccttccttttgaccccatctttagagagaatcaagattccaacatttaattcaagtagagtaatagcatccctgttgttccgagtgaggaatttagatttgtgagggactctacatcagcactgtctagcagaaatacagtgcaagcctcggctgggcacggtggcttatgcctgtaatcccagcactttgggaggctgaggcaggcagatcacaaggtcaggagtttgagaccagcctggccaacatggtgaaaccctgtctctactaaaaatacaaaaaattagccaggcacatggtggagggtgcctgtaatcccagctactcaggaggctgaggcaggagattcacttgaatgcgggaggcgatggttgtggtcagctgagatcgtgccattgcactccagcctagtgacagagtgagactctgcctcaaagaaaaaaaaaaaaagaaagaaagaaatataatgcaagcctcatatgtaatgatacattttccagtaaccacattttaaatatttttaaaaagataaaattaattttgaacaacacaaatatgtttcttaacatattaacatgaaattaatttaacaatgtattttattcaacccagcatatctaaaatattatcatttcaacatgtaattaataatgatattttttcacttgtcatactaagtctttgaattttgctgtgtattgtacacttacagcgcatctcagtttgcaccaggcatgtttcaagcactcaatagccacatgtggcctctgagtaccacattgcacagcacagtgcattcctctggttggaggaatatgcagttcaccagacctctcttctgcctggaagggattctctgaactgatactgtggctgtggcttgaaatacctctcaaatccgtatcctgaaaccttatccctgcctattgtaacagcttattgtctccctgcctgcctgctcacccaccaccagtctgtttgtctattgtaagcagggtcattcttcagtggccatttctgaccactacactctcctgcctaaatttccacggactatgaacaaattctctatcactgcataaagttcccttctggattgtcccctgcttgcctctttatcctgcttgcccactgcttgaccacatctgcagccacgcagctactggctgtttattctgagatgctgctctgctccgtcccacctcctctctgagcctgtgtgtcccctctgctatgttgtctcctcttgttttctcatttggctgcctctgctagtcctttagcaaaggggtccctctggtgtacatctcatggtatactctgcatactcttgtagcactgatcacacactattgtaattggtggtctaagtgtcagtcccagtcttttctagattgaggataggaatgaaatcatacttatgtttctatcacaaatactaagcatggacccacacatatactaagtactttagaaatgtttcaagaataacgtggagccattaatatttttacctttcttttatttcctcctttccttcctccagtgcactgaccctgagctatagctcctgtttttatttactacctgaaacagcttcaacacgtcaaacttgagaaatcaaaacaaatgcattcgtagttttagaccctaaataatgttaaagccataatcggattcagagggcctcctgtggtgtcactgtagttctgttccaagcactgtgagcgtggggagcattattccatagaggcctttaaccatctgatgcttaaattaaccaccatctctttattccacaaaaatccaggcatagccctttattccttgcacatagtagagtctgcctaatgagagctaagacaaggtctcaaaaaatttccttattctgatttctgtggatcagaattgaaccaggtatgaaagagtctacatacgtgaagttatatagtattacaataatggctatttgtttggcaaaccatgtgagaaatcataaattttgaggaggtcaggttttatcaagaattttattttagctcttattgtaggaagttcacctaaggaccataatatcaaattagtaagtaccatcatattttgaaaaatcgcatcctgtatacattctagaagttacatggttttatatacgaccctaaagaatgtattccatctgtatcttagttgtttcttttatttttttaaatcagggaaggagctgctgtgttttggaatgtgaaagacaaaactgtaagtgtaaataaaaatgtgaaaatataaaaatttagttttgtgagaatgaattgttaattagcacatactgaaacattagaagggaaattaatagattatgcacaacttatttgctctgcattacatgatacttatcagtttcatcttccaaaatatattgtattttgggttaagatttcctgctttttcctttctctagacacacactaatttgtggagaatcagaaccatcctaactatactgcagacagaagtactgtagactttgcatgttgtactatacaaaatgtatgcagttaattggaagctggttgcattgagtgttcttttaagtcaagttgtctagaacttactactcatgggaaataattttttcaagatccaaatcaagatttgtttaatacaaccattttagaggcaaattggtaatctacattaaagctttatatttaacccagtaattttacacctagaaatttatccaaaggaaataatcataactattcgtgatgatttttgtacaaaaatgttcatcagagcaatatttataatggcaaaaattagaaattaccaaaatacacaataatagtttgttaaatcatccatatactacagatatactatagatccccttagaaatcatgtaaaaaaatatctatttctgggagattgcctatatatataatacagttacattaaaagagcagattatacggccaggcatggtggctcacgcctgtaatcccagcactttgggagaccaaggccggcaggtatcttgaggccaggagttcgagaccagcctggccaacatggtgaaccccatgtctactaaaaatacaaaaattagctgggcgtggtggtgcacacctgtaatcccagctactcgggtagctgaggcacaagaatcgcttaaaccttggaggcagaggttgcagtgagccaaggtcagaccattgcactccagcctgggagacagaggcatactcttgtcttcaaaaaaaaaaaaaagcgggttacaaaatataaccaatataatctcagaactggttaaaaaacatgctttatacaatcccaattttacgaaaaggaaacacacacagtaggtggtcgggaagggaacttagagaaaagaaaatataaatgaccaataaatttaagaaaatacaagttggctatttgaagttgcaaagatgtaaaaggctgataaaccccatttcttaagagtagtttcataaatgttgagattctacatttggaaaaactactttggagagcaggctagcaatattataagtgtgggccaggtgtggtaactcatacctgtaatcgtatcactttgggagtctggggtgggaggatcacttaagctcaggagttccagaccagcctgaacaacacagtgagatcccatctctacaaaaagtttttagaagttagccaggtgtggtagtgtgtacctgtagtcccagctacttgggaggctaaggcagggggatcgctcgaacccaggagtttgaggctgcaatgagctatgattgcatcactgcactccagcctgggtgacaaggtgagaccctgtctgttacatatatacatattgtgtaagtccacatatcttttgatctagcaattcctaaagaagtattcccacaaagccatgaagacctttgcacaagtgtggcacatcgcaacattgtaatggagagtagaaaaaattccccatggaggacacacctaggttggttaaataaattgcagttcgtctgtaaaggaaaatagtgttgaaaatgtcatgtgcataatatgatcctattttacataaaaagcagcataaatatgtacatatatacacataaaaagtctggaaggatatgcaccaagtttaatcatggttgcctctggggattaggatttcagtacagaagagagaaagagatgatcacctcccacacctgtgtggcttaattttttattagtatgttgggctttactttttattttttatttatttatttttttgagatagggtcttgctctgtcacaccggctgacattggctcactgcaaccgccacctcccaggctcaagccagcctctcaggtagctgggactacaggtgtacatcaccacacccagataatttttgtatttttttgtagagacaggattttgccacgttgcccaggctggtcttgaacttttgagctcaaggatccacccgcctctgcctcccaaaatgctgggattattaaagagatttaaagaatacaaattataatattactagtgattttccttgggttgtgggataatgataaccttgattttcttctccattctcatctgtgttttccaaatgtaaaaacaaatgaacatgtcatcctgattactttaatatcacaatggatttgatttgccttttccttaaaaacatgcaacagaaataatgcctgtaagtgtaatgaagactgttataagcattaaaatcataacatacttgaactgagggagtcagttatgatttcagattaatcttccttttcttctagatgaagcatgtgatgaaagttctagaaaaacatgaaattcagccctatgaaatcgcactggtacactgggaaaatgaagaacttaactacataaaaatagagtaagcaacttttcatcaaatttatgaaaggggcacttggaataaattaggtaaagcaatagaggagacaaattattatgcatatggaaactttttttttttttttgagacggagtctcactctgtcgcccaggatggagtgcagtggcacaatctcggctcactgcaacctctgcctcccgggttcaagcaattctcctgcctcagcctcctgagtaagtgggactacaggtgtgcaccaccacgcccagctaattttttgtatttttagtagagacagggtttcaccatgttggccaggatggtctggatctcgacctggtgatccgcccacctcagcctctcaaagtgctgggattacaggcgtgagccactggacctggcctggaaacttacttttaagaaaaaagtggccaggcgtggtagctcacacctgtaatcccagcactttgggaggctgaggcaggtggattacctgaggtcaggagttcaggaccagcctggccaacatggtgaaaccccatctctactaaaaaatacaaaaattagctggttatggtggcgggtgcttgtaatcccagctactcgggaggctgagacaggagaattgcttgaacctgggaggcggaggttgcagtgagccgagatcacgccattgcactccagccagggtgacaagagtgaaactccgtctcaaaaaaaaagaggaaaaagattactggtacaaatacaaagtctaaaccatataataaatattagaagataaacataattttttgaacttctcaggctatccacaagttaaaacaagtcagtagtatagccccaaaatggaaatgttaagtttctaatcagcctaatccaataaaatagtatgcatttatcaaatgaacctatcaaattattccagtaaatttttctcttaatccagttttttcctattgattttggggggtgggggtatgaaaaggaagtatagtgaggggtcaatctaagagacccacttgtagaagtgtgggtgctggaagaagtgggacctggtgtaccagtttcactaagataaatgggtaggcaacagactagctgattttcctgactcagccagagggaaaaaatgaagagatgttagggccgagacagaggcagtatgaacaagatggtagtgtctttttcctcatggagttacctgtctagtgaaatatgagtctttgcaggttcttaagaaaggtagtgttagccagatttggtggctcacacctgtaatctcagcactttgggaggccagggtgggaggatcaactgagtcaggagttcaagacagcttggccaacatggcgaaaccccatctctactaaaaatacaaaaattacccgggcatagtggcgagtgtctgtgatcccagctacttgggaggcggaggcggaggcagagaattgcttgaacctgggaggcagaggttgccatgacctgagatcgcaccactgcactccagcctgtgcaacagagtgagactctgtctcaaaaaaaaaaaaaaagcgttaaaagcagagctttgggaagacttggaagagagacagagactagctatagaaagaccagatggggataagagctgagtaatcagcgctcaccaccaatagggccagtcacggttttctaagtaagtgccttccatgtattatttcatttaatcctggggaaaaccctataattgcagctaactggctttccgatgagatttattgaatcctgtcttgccaaagggcacctgactgtgagtcagcctgagcccagtggtggctgcagtcagaggtaaggatataaacctgagagagacagcaaatgagcagcctgtagttttattatctttagtagttactcagcccttggcctgcagatacagctcctgtgaatcccctttctgtgttctattaggtttacattaaaatggcaaaaaccgcgattacttttgcaccaaccaaatacttccatatccaactactgctagacccttgtgtgtgtgtgtgtgtacgcttatccacacacacacacacacgttactgtacagtctgtgaggagtaaaatcctcagtgcttaggatcccagagtcagttattttgtttcgtcagaaagactgtcctggctgccacctacatggttattatgtgagttctgccatgattccagggatctgctcagctctgtggcatgggcccagtttactcataaagcatcttgtgaccaagcacagtggctcatgcctgtaatcccaacactttgagaggccaaggcgggcagatcacttgaggtcaggagttcaagaccagcctggccaacatggtgaagccctgtctgtactacaaatataaaaattagctggatgtggtggtgcactcctgtaatcccagctactcaggaggctgaggcaggagaatcgctggaacccaggaggcggaggttgcagtgagcgaagatcacgccactacactccagtctgggtgacagagcaagactccgtctcaaaaaaaaagacctcttgtgactgctgtctttgctttccttcctccatctgaggctgtcatagcagatgccgccctccatcaggccccttgtccccctccctttggccgtcacttcttgtctgacatcttttgtgaaggtttaccctgtcttttttccatttgcttgtgatgtttatattcacacattccgctcttcccctgtcccctgtctaggattctccacagtcacatactcatttttcacaacttccttgcctccctccccaaccccatcatgtcagtgtgattttagattacactccatatatagttttatatgcagcattttttcacatagaaatttactgtgaacgttctcctttttattaactatccttccaaaacacacttttaagtttttcttgtgtggagtgactattactgagccaacccctactgaacatttggtttatttcctaattttttactcttaaacactgaccttttttttttttttggagacagagtcttgctcagtctcccaggctggagtgcagtggcgtgatttcggcttactgcaagctccgcctcccgggttcactccattctcctgcctcagcctcccgagtagctgggactacaggcgcccgccaccacacccggctaattttattttgtgttttgagtagagacggggtttcaccatgttagccaggatggtctcaatctcctgacctcgtgatccacctgcctcggcctcccggagtgctggggttacaggcgtgagccaccgtgcccagccaacactgaccatttttttaaaagttttcagctgggcaaggtggctcgcacctgtagtcgcaccactttgggaggccgaggtgggtggatcatttgaggtcaggaattcaagaccagcctggccaacatggtgaaactctatctctattaaaaatacaaaaaaaattagctgggtgtggttacgcatgcctgtaatcccagctactagggaggctgaggcaggagaatcgcttgaacctaggagactgaggttgcagtgagctgagatcgcaccactgcactctagcctgggcggcagagtgagactgtctcaaaaaaaaaaaaaaaagttttcttgtatacaaatttttctttgcatcttagattatttccttaggataaactcctagaaagggaattacctggaccaaaggatatgagaacatttgtaacactcttgatacaaattgtcaaaatgacctccagaaagatgatatggtgtctttttcaaaggaaaagttaaagtgctttttaagatttagaaggtattatctttttgcttttcacaggggacagtcaaaacttcacaggggggaaatcaagttaaattcagagctggatttagatgatgccattctagagaagtttgctttctccaatgctctatgcctttctggtaagttactactgcttatgggatagggtactacagttgtcatttcactgagggaagtttaaatagtcacgattttggtatattttcagaatactcaacaaagccttagcattccttttcctttttttccctccatcagaaaaaatatctagtataaaagatagtactgtgctgaagttactcattccttattaattgtattaataaagcttaacctctccaaaagtattttttagatgatgattatattagcctttgtttttttctcttctctctatgcgattgttattcttagatagtctctaatccagacagagaagcccagccttgtgtgactgggcacaggtcccagtgtagaaaaacatactctagtgttccataggaatgggacccagagtcacagtggctataagtttgttctgaaagatccacatcccgaataaaactatacaagttctttaagaatttcttttgccagcagtctaccttaggtggctgctgcagcgtcctgtccatcccactctgaggggcttcggagatttctgaggtttactcttagtcctgaggagtgaaggggaggccaggaaagtcttagtcgcgccctatctgcagagctacccatggtatcaaggtgtaccctaccctcctcagtttccaagatgtaatactagaaaatcaagagttctactaaatgtagctttggtcttccaatagggcatggaaagcgattcagtttcctctatccactttaattctgtcctttatgataattaactattcttaaattatattttcaaggttttagtactttttcttaaactattactgaaatagtagtgaagatgctgtgcaattatgtattttatatacatgtgaatatgatgataaagaaatgttccattattaatttttttcccagtaaaactggcaatttgggaagcatcactggataaatttattgaatctattcagtcaattcctgaggtaattatatcaattttatgcttattcaaggattgatttttatatgtaaaaaatatgaatttcccaatataacaatatatagctatccatcagtatccatgggagatttgttccaagaccccactggataccagaatctaccagtgtccaaatccctgatataaaatggtatatatttgcatataacctatgcatatcctcatgtatactttcaaccatctctagattacctaaaatacctaatataatgtaaatactatgtaaatagttgttatactgtattatttaggaaataataacaagaaaaaacagtttgtacatgttcggtacagatgcaaccattcttttttctcaaaatactgtcaatttgcagttggttgaatctgcagttgcagaacttatagagggccgattgtttaggagtacaacaacattattacaaacaataagaaaactacagtaaacttaagaactcccagttacatataaaatgacaaattaagaaacttcatattgattactttttactttttaaaacttcaaattgtttcctctgttggtgcagtattttttttttaatattaatataattgaaatggggtctggccatgttgcccaggctggtcttgaactcctgggctcaagcgatcctcctgcctcggcctcccaaagttctagcattacaggccacgagccaccatgcccgtcagttgcagtatttttaatgtaactgaattaaagaaaaaagtgaaatgtttctctctgagaatggaaattatgaccacttttcctgatttaagaaagtgttttgctaaattatgagaaaaatagtggtatgaaaaatacatataaagttatattgaaatttcagtatacattaaaaatcatcatattgtaattaactgtgtctttattgtgaaagagtaatctaattatacttcggaaaggaggccctgcttttctactaagagattaggaatgtatatatcattgaaaatgctgatgagaagggaaatgaaaaaagagaatatacaatttctacctaataaaattatgaaatttcaaggtgagttaagacattaatctgggagacagccatcctaaaaaatatttacataggatccaaattatgccacttcagattttgccctgttgacctaatgcttattagaaagagagatacatggttttttggtttttccgattccctctcaactaggctttaaaagctgggaagaaagtgaaactatctcatgaagaagttatgcagaaaatcggtgaactctttgctctaaggtaaaagttttctctctaaataaaatatttcatatatttaacaatctcaagaaaacattcccatagttctgtggtgaagagcaaacatttacacgtttatgggaactgtagctgttttcatttcattgattataagcagggagaactcttacccattagaagtagttgggctgtgttaagactgtactgaaagaaatcacgcatgtgcaaaagagatcacgattcatctacattaaacccacattaaggagcacagtaggtgttctttgaaggtagaaagacatattcctgaatttggttaatgggaattctctgtaaaaatatatcactgcatcataatgctaaataggcttaattgctacagaaaagtttctttgaatctgagacaccaagatgccactggagagaaaaactgctgccagttaaactatgacaatactttttttatcagaggattaaaattttacacttactgaaatatcttttaatcttagctggatataaattatatcacattccctcttgggcatatatgaaaa

SEQ ID NO: 15775 - DNA, 35502 bp, Homo sapiens
gggtgcggctctttccctgcagtcctgccgaggaagcgtgcgtccctggcgcttccttcttctcttccggcggagaggttagtgtattgccttttctttagcagctcgagtggtccggcttggaggtctgcgccctggctcctggccgcccggaacgtgtacagttacgggttacgccagtgcggctgtgaccctttgcctcttaccgtgatctttggtcagcttagctgggagtaaaaagcactcaattaatgaaccctttttttgagccagtgcaccgcggtaactgtagaaatcgataaaataattttgagtttgaggaattgaacggcatactcccaaagatgagcgccacttagctctcgaatcgtagcctagctgtaatcgattttcttaattggtgtaattgttctctaaaagttgaaatgtgcccgggaactgagtaactgccttgtatttcattttaaaaattcgatcgaatgcctactatgtgctgggcgctattgtcaggagatataataggaaaaaacacaaatccgtatcctcagggagcttccattctggaaggaagacacaaaaatctgccctttcctcttatttttttcctttagctttgtgtctcacgtattttactgatttacctcgttttgtctgtcactcccaatgcaaggttcaaaagattcaaaagataggatttttgtctattttattttcagctgtattgtcagcaactaggacaatacctggcacatgataagaactgagttcgtttgcagtatgaattaataaactaaaaattaaaggtgtgcaagtgatgttaaacaatggagaaatgcaaagtggaggaagataagagaatggatgctggttgtgtttttttttttttttttttttattgatcattcttgggtgtttctcgcagagggggatttggcagggtcataggacaatagtggagggaaggtcagcagataaacaagtgcacaaaggtctctggttttcctaggcagaggaccctgcggccttccgcagtgtttgtgtccctgggtacttgagattagggagtggtgatgactcttaaccagcacgctgccttcaagcatctgtttaacaaagcacatcttgcaccgcccttaatccattcaactctgagtggacacagcacatgtttcagagagcacagggttgggggtaaggtcaccgattagcaggatcccaaggcagaagaatttttcttagtatggaacaaaatgaaaagtctcccatgtctacttctttctacacagacacggcaaccatccgatttctcaatcttttccccccctttcccccctttctattacacaaaaccgccattgtcatcccgtcccgttctcaatgagctgttgagtacacctcccagacggggtggtggccgggcagaggggctcctcacatcccagtaggggcggccgggcagaggcgcccctcacctcccggacggggcggctggccgggcggggggctgacccccccacctccctcccggacggggcggctggccgggcggggggctgaccccccacctccctcccggacggggcggctggccgggcggggggctgacaccccaccttcctcccggacgggggctggcccccccacctccctcccagacggggtggctggccgggcggggggctgacccccacctccctcccggatggggtggctggcctggcgggggctgacccccacctccctcccggatggggtggctgccgggcggagggtctcctcacttctcagatggggcggccgggcagaggcgctcctcacatcccagacggggcggcggggcagaggtgctccccacatctcagacgatgggcggccgggcagagactcccctcacttcctagatgggatggcggccgggaagaggtgctcctcacttcctagatgggatggcggccgggcagagacgctcctcactttccagactgggcagccaggcagaggggctcctcacgtcccagacgatggggggccaggcagaggctgcaatctcggcactttgggaggccaaggcaggcggctgggaggtggaggttgtagcgagcctcgatcacgccactgcactccagcctgtgcaccattgagcactgagtgaaccagactccgtctgcaaacccggcacctcgggaggccgaggctggcagatcactcgcggttaggagctgcagaccagcccggccaacacagcgaaaccccgtctccaccaaaaaagtacgaaaaccagtcaggcgtggcggcatgcgcctgtaatcgcaggcactcggcaggctgaggcaggagaatcaggcagggaggttgcagtgagccgagatggcagcagtacagtccagcttcggctcggcatcagagggagaccgtggggagagggggaccgtggggagagggagaggagggagagggagagggctggttgtgtgtttttaatgtagtggttggggaaggcttcactgggtagaagacattttagcaaacatctgaaggaggtgagggtgtgagcctttcagatccctgggagaagagcgtaaggaacagcaagtgcacagatccagagaccagaatgaggagcaaaataagcaaaggagagtgctgtcaaagtggtgataaaggacagataatgtagtgccatgcaggccattctgaggggtttagcttttttttttttttttcgttacagaatctcactctgtcgcccagactttagtgcagtggcgcgatctcggctcactgcaacctccacctcccgggttcaggcgattctcctgccttggcctcccgagtaactgggattacaggcacccgccgccacgctcagctaatttttttgtatttttagtagagacgaggtttcaccatgttggccaggctggcctcgaacatctgaccttgtgaatcacccgcctcggcctcccaaaatgctggggttacaggcgtgagccaccgcgccaggctttttttttttttttttttttttttttgagacagagtctcgctttgttgctcattctggagtgcagtggcgcaatctccgcctcccagattcaagccattctcgtgcctcagcctcccaagtaactgggattataggcccatgccaccatgcccggctgatttttgtatttttagtagacacggggtttcgccgtgttggccaggctggtctggaactcctgaccccaagtgatccctcccaaagtgctgagattacaggcgtgagccgccatgcctggttggagggctttggcttttattaagtgaaccgtgaagccacagctagatttcgcgttgagattcaacttcaaaggatcactttggttgctgtgttgagaagaaactgtagggggcccaaaacagaatcaggaaaactggttaagaagctattataataatccatgggaaggatagcagtttggatcaggtagtattattactgatgatgagcagtggtccctagaaggcccttgggatttactgagaagttggatatggagaataaagagtcaagctggaccccacgtttttggcttagcagttataaagatacttattactgctcatgaatgggaaagactgggaagaaagggatgcaagggattctaggggtataagggagaggttagaatggtagaccatggagtgtaaactggatatggaggaagtgaagtcatggggagtgagagacagtgaaaaggtggttggatcattgacttgtgggtcctgttggggttgaagaattattggaattgggtaatagaaggagtgagatgcaaagataggaggtggtgcttagagagtaaaatggatgaaactgagatgaggaggtccgatgtattgataatgacaatagggccctgtctgatagaaaaacagtgtaaggcacaaatgtaatcttaggctttctagaaggtgcagtgataaaaatgggctgggtccggtggctcacgcctgtaatcccaacactttaggaggccaaggcaggtggatcacctgaggtcaggatttcaagaccagcctggccaacataatgaaaccccgtctctactaaaaatacaaaaaaattaactaggcatggtggcagacacctgtaatcccagctactcgggaggctgaggcaggagaatcgcttgaaccggggaggcggaggttgcagtgagctgaggtggcaccactgcactccagcctgagtgacagagcgagactcccatctcaaaaaaaaaaaaaaaaaaaagaatttactcaaagagaataaaaagaatccaggactgtagacaaacttctaaaatattttatagtttcttcaaaattaagtggttcaactggcatggcatagtactaattaaaggtgaactacagtagccaattggactagaatgaagcacagaatgcgagcttttgaagggattttggaagcagcaggttctacctcctaaatatcactgtgaatcatctttgtccttatcctgaagagaggtagtaaatacaaggtagtgggtaagagtgttgactttggaattgggaaagcctgggttttattttagttacatctctgcagcttcttaacggtgagcacttagcctctttaaacctcagtttcctaatcagtgaaatgggatcattatgaggtgaagccgagcacttagcatgtagaaagcgctcagagtgatgtcagagtctgtcttgtttcctcctacatatcatcaccaaaaatttgtttcatgaacatgcatttgaccgtgtgactctgagttaaaagctcagctttctccccacctgtagaaactttttaggatgactttatatatcctttggtgatctggccatcggctcttttggtccttacctcctgcagctcactcctacctccccgagatggggagatgaataggactccatgcctggggtgtttaacttgctgatccttctgccctttcaagactcagttcaaatgtcacctctgtgacaatgccacactcttcacatgctcctttctctggactagagcaatttgtgcatctcgttcattttcctctgctagactttgaattctgagatcattgattcatctatctctagcacctaacatattatttttaaaaaaagaattattgattactacggtctaacttttttttttttttgagacagagtctcattctgtcgcccaggctggagtgcagtggggcaatcctggctcactgcaacctctccctccctggtttgaacgattctatatctcagccacctgagtagctgggattaaagccactatgcttggctaatttttttttgtatttttagtagagatggggttttgccatgttggccaggctggttttgaactcctggcctcaagtgatccccccagcctttagcctcccagagtgctgggattacaggcgtgagccaccatgtgtggcctactataggctaactttaaaataacacatttcatactgtaaataagggggaaattctgtttaccttgtctggaatgttcatgtgtgtatctgacatgcctcgcactcccatgcccagccccaagctgaaaagcaccttcgccttctagaatcagcttagatctttctgggaacctttcctgattttttttttttttttcctgagacagaaaaagggctggaatgcagtggtacaatcatgactcactgcagcctcagtcttctgggctcaagtgatcctcccacctcagcctgtgagtagctgggactacaggcatgagctgccatcacacccagctaatttttaaatttttgtcatttttgtagagatgaggtttcaccatgttgcctcagctggtctggaactcttggactcaagcgatccacctgcctcagcctcccagtgtgctgggattacaagtgtgagctacagtgcctggccagcacagatttttatatacttgatatgctaatgaagtaaatgaagtggtcccatcactattttttttaaggttcttgttatgtcagtagctttataatcttgtaatcttccaggaagaaggccaaatgttgctaaaggcaaagtggcagaaacactgtacttatatttttaaccttgttcttttactagaattaacttagaatgtatctgttttacaaatttttctaacagaaatatgcctgctacctagggaaatattatatatgttttaaacattaatttaaaaacttgaactttgaattccttttcttttagcttgggatgtggtaatgccagccacactcctcagagccgtggccagatctcatcatatattatcaaaagcacatcagtgccgaagaatcggtcatctaatgttaaaaccacttaaggaatttgaaaatacaacatgcagcacactgacaatacgtcaaagcttggatttgttccttcctgataaaacagctagtggtttgaataagtctcagatcctggaaatgaaccaaaaaaagtcagataccagcatgctgtctccattaaatgctgctcgttgccaagatgaaaaggcacaccttccaaccatgaaatcctttggtactcacaggagagtgacccacaaaccaaatctgttgggttctaaatggtttataaaaatattaaagaggcatttctcatctgtatcaacggaaacatttgttccaaaacaagacttcccacaggtgaagagaccactaaaagcatccaggaccagacagccatccaggaccaaccttccagttctgtctgtgaacgaggtaaagtaggggtggccgtggctctcgtgcttagtgatcattgctcatgctaaaccagtgtgcgttgcaccccagccttaccgccaacgtaagagaactagcagtcactcagacttcttcatcaaggtctttgaagcctaataaatatccaaagggattcagaatcttaatttttaacaattaatgatacatataaaaacaaaatacaggtgataacacatgaaaatagagtttataaaagatttggttattggtctaaggaaactgaaaaagaggaccaatattaagtccagtctaagaatgggactgtaaaaaaaaataaaataaaaaaaaacaaactagaaattcttcatcaagttaaaaaaaattgtaactctgcagacagataagcctttattaggctgtggcagttgcatggggcggtgaaatgacacggtagggtggactccaaaagcagcaggagaggagggcccagcttttttatcctcttaaggtttaagggggtattttttattcatccttaaggggtttctgggaatttttctgctacaatttgcatttctccttcagtaacaacttaagggtcaagatcaagcccttgataacctttgtatcttgcataatacctagaactgtaccttgtacttaaatgtttataagaggatctttaatgccgatagtcatcaactttaaagatattttaaacttgatgaagacttctgaatctatcagaaaacaggttagaatgtctgtcttcaagtcttgattctgaaaagtagcccctgagcctgtttcattttggctgtgtttttattactgtgcagctgacaccccttggaaaggtatacatacatacctttactcatcctctgattctgaatctagcaatgaatgaatggtttttgtgttggattctggaatgctttcaattcttgtgtggttactctgaactcaggacgtgaaggatgaagtgttgtgcagctactgtttcccctttccttttgctggagctttggggtaacctgggaaattcagtatttaagtgtccgagatggcattaagtgtaaaaacctgaattcatggcagctccaaaaaagagaaagctcaactcactttgttcatttgtaacgtctagcagcacagtgcatcaggtttcttaggaagaagctgataggtcagagatgtccctaggctatttctttgggccatccttagacttggaagcaattttcctaaataccgtatctatttttctttagatttttttttctacttccttccaggaaagaatttgaagtagattttcaacattcaacatagtttcaaatgagataataaatactttcacatattagagcaaatagttgacatgaacagagaaatgttatgaagtacctgaaatgaataatctagttgaacattttgttttgagaagcgcagtaattaaaagaggaactcctcctgggatttagtgtttgttgtttattgttgtgggagagggcagagtaaaaacataaaaatatcttcagagaaataactttttccagcactgaaattaaggagttagttatttcatggattctgttataggagacattatgtaacatgatagacaatgacttcagttggagtttggcaagagcaagtcgcatgctgtctttctgaaagcacagggaaataatagaaaatcagatgtttctggctgggcggtggctcacagctgtaatcccaacactttgggaggcccaggcaggcgattacttgaggtcaggagttcgagaccagcctagccaatatggtgaaaccctgtctctacaaatatacaaaaattagccaggcgtagtggtgcacacctgtaatcccagcggctcgggaggctgaggcaggagaatctcttgaactcgggaggtggaggttgcagtgagctgagatcatgccactgcactccagcctgggtgacagagtgagactctgtctcaaaaaaagagaagaaaatcatgtttctaaagtggtctgagataatgtaattttggaacatcattttttgaagattttacttttcatagagaaagcagtcttggcatgactaggtaatatgtccccaggaccaaagactgactttcctctgcccgaaattgagggccactccatttttatacggccatcatagtggtaaaccctttataccactttataccatcaaaatggtaaaccctttataccattcttgactgagacaaggaaaagactctgctttgtgtcagaaagcatgtggactttattttgttcccatagttgcacccagctcatcttttcagctctgcagaacagcgtgcatctggagttggctgaatgaggtttcagtcaccctgtctgttggaattaaatctttacctggtctcattttcagagatcataatctgagatactcaacccacatccctttggcttacaattcctaaaagcaatagtggatccagtggcttatgcctataatttcagtgctttgggaggctgacacagaaagaccacttgaggccaggagttgaagaccagcctggcaacatagcaagactcccatttctaaaagacttggaaaaaaaaaaaaaaaaaagccgggcttgctggtgcgcagctgtagtcctagctactcaagaggctgaggtgggaggatcgcttgagctccagggttccaggctgcagtgagtcgtgactgcacctcgctccgtccagcctgggcgacagagtgaggccctgtcactaaacaaacaagaaaacaataatagcagtgcttcttgttaatgtccagtctttgaagagaacagcagaggatgggaacggcaggtctgagtggcatggagcccgacaccagggagaatgttttcaggctaatagcactgtgttacagaatcactggtggactgttaaccatttttttgaaaaatgaaatagaatagaaaataacagaatacattgctcatgataaacgtaaatactggtttgtgaagcttttgtggcaattggtgtgtaagcatatatgtgtatatgtactatgtttaatgatttataggttgtagtcagaaaaacttacaggataaagcgtgatcttggtaacgtaaaatgtatctgtgtttttatagctttaatctccaatcagtatgttacaggagaaaaggcatttttccttagtatgatctatctactcacagtacttctgacatcaaatatatggggacctcttcctcctcctaccagccagttctccaattctccagacactaacaaggtgtcctgcaattcagttcaattccagcactagccagagttagtgcagacgccagttagttaagctcagccccacaagactgccctcccagttgacacctgtgcttctgaccaaccagctctatgacaaccatcccctcttcaggtttgattatttgctagaatggcccacagaactcagggaatcattttatttatgtttactgggttttttatataaagtatgcaaatgaacaaccagatgtagaggtgcacagagtgaagtcaagaagggcctggaacttaggagcttctgttcctcatagaactgggctgtgccaccctcctggcacatggatgcattgatcaacccaggagttctccagaccccatcatctgggtgtttttaatggaggtttcattgtgtaagccatgattaatgattaactcaatctccagcccctctccgtccaccagaagttaagggtgaggctgaaagttctaagcttctaatcaaagtttggtctttctggtaaccaccccccatcctgaagctgtccaggacccactgagagtcacctcattaaaacaaaagatgttcccatcactcgtgaaattccaagggatttttagaagctctgtgttagtaactgaaggcaaagagcaaatactacaaccaaaaatgcccctgtcacttagaaaattacaggggtttttaggagtctgtactgggaaccaaggacaaagaccaaatgtaaatgtattatatcactatagaagcaacattgctgtaacacactaattttcttcagtaatacagtgtaaatgaaagtataatttttaaaaaaatgttctgatcagagcatgcgatgctcctaaaacaagaatcatatgtagatttctagccccatctgctggaacatgtcttctttggccagaaaaacaaaacatactaaaatacagtggtttggggtttttgctttttgggttttttaaaacattttgaagtagaaaagccctgaatatcataactattatcggttggtttgacacatctatttaacaggaaggtgtagatccccatcctgaaacccaaaatatgctttacatatatatgtagctaatgcttaataaggattcactgtaaaaatccagaaaaggatgtataaaaatgaaagctgctcagaaaacaacagcatctttaataaagaaaaaaaagcagacaagacattccatgattctctttccttttaccaaataggctaaaataaaaaaagcaaagaaaacaaaaccaaaacaaagtgtctaaaacgtcaagttcatctattaatagaagaaacccacaactaagactcagagctaagaagtttaaggagaatacagaaagtagtgtagcaaaccatataagctgagtgacattggatagaactttgagccaaactaaatgggagatcccaagagaaggaaaggggacagttgacagtctggaaaacctacaacaaagatccttaggatggccaagtgaaaacagattgtgtttaaagatttattcataatttatttggagcttagaatatattttctcataaaaatagtgattgacttgtcctgtccttgagagttgaaaatagtacacattctcaatttgccgttagtgtcggaatattcacataatttgggataccagattgcccaaaactcagttctgaatatattgagccttttatttttatctccaagtggcggtttttaaaactgaccttttaccttgatttaaaataatagtgcctggctgggcatggtggctcacgcctgtaatcccagcacttgaggccgaggtgggcagattaccagaggtcaggagtttgagaccagcctggccaacatgaagaaacaccgtctctactaaaaatacaaaaattagccaggtgtggtggtgcatgcctgtaatcctagctactcgggaggttgaggcgggataatcacttgaatccagggggtagaggttgcagtgagctgagatcgcaccactgccctcacgcctgggcgacagaggaagactccgtctcaaaaaataataaataggccgggtgcggtcactgatgcctgtaatcccagcactgtgggaggccgaggcgggaggatcagatgaggtcgggagtttgaggccagcctgaccaacatggagaaaccccgtctctactaaaaatacaaaaattagctgggcgtggtggcgcatgcctgtgatcccagcaactcgagaggctgcggcaggagaatcgcttgaaccggggaggcagaggttgtgatgagccaagattgcaccattgcactccagcctgggcaacaagagtgaaactgtctcaaaaatataataataataaagtaaaaaacagaataaaataataatgcctgccaccgccattaacagaccttgtactctaatgccaagctgtatatgggacagttgccagcatgtcttcactggcactataaaatatagccaagaagataggctctgagagtaagaagtctgtgttggttaggagtaattttgtcctggctctctggtataaagctctcaaatgtaaatccgggtgggataatggactcagctctgtctgcaacatgccactgtgcagagaagcactctcatgcataagctttttatgctgtaaactatagtagctgaaattaaatgccactttttcagaggtgaattaatggagagcctggtgaaattcaaagctttttgatgtataaaacttgataaatggaactattccatcaataggcgaagtataacaacctgtctacatagatagtatgtaatttctgcacaggtctctgtttagttaatacatcactgtatatcaatctagaatcttgctccaataaaggaacataaagttgtgttttggttttgtttttgtttgaaacggagtcttgctgtgtcgcccagagtgcagtggtgcaattttggctcactgcaacctcggcctcctggattcaagggattctcctgccttggcctcccaagtagctgggattacaggtgtgtgccaccacgcctggctaatttttgtatttttaatagagccagggtttcaccacgttgaccaggctcgtctcgaactcctgacctcaagtgatccatccgcctcagcctcccaaagttctgggattacagacgtgagtcattgggccttgccaaggtttttgggttttttttggaaaaaaaaaaaaaagtagtacacattcttagtgcagatgggcttggccagtaccacatgatggtgaagcagacgtgagacaacagggagaggcagggacagtgtgggctggagaccctgggcccccctactctatcctagtccattattatagccagatcttccactcggtcagatgatgatggaaatctggattttgtgtgaaatctctcagtttattgttgacaagtcaatttgaattttagaaacgtgatgtaggtcaactcttgagttggatggttctccgagctgccagtttacaactccgattctagcaaaagagacagcctctgccattttcagtacagctacaggaagatccttcagtggactagcttgtgacctgcttatctcctttttgtgcctcttgctcttcccacttcagcccaaactaagcacatgagctgtagccatcacagaagtaattctgacatccaacctaatgtactgtgatttcacctagcaagcttgagtgaatttgccaggtcttgcagagtggagcctacccgatgtctcgcctgatgccccttgctaggattcctttctttcagctggccgaatctttacacacatcgtacatcagctagttttaactccatgaagccttaaaaagaactagtgctcacaggtctaaaccttaagcacgtgcctgttccctgtactctggtaactcctgatacatttttatttgtatatccccgtgttcctactttcatatgtgactatgggaattagctaatttggaaggaattagcagttatctgctcataattagggtactacatccatttatccccacattccccagtaatttcagcttgtctgactttttttctaattggattagtctcattttgtttatgagtagatactttattgattttggatttttcagtttgcatggatcctcaggttctctgttattcctctacctttaaaccacgcatcagagctgtggaacagattgaggaagggcaaatggggtcaggccatttcatgagaaagagccaggagatacagaatggaggtgggaggaaggaatgaattaatatatacttctctagaatttcataccaggaatatacagaatgggaaagaattggggagctgagaggagtaaatcctaagaataaatgttgatttagtgactcataaacttgttttggccaactagaatctaacaactactgaacagttgtgttagccacagtcctgagcactttgtttattagcttatttaaactttacaacaaccccataaagtaggcattattgttattctgatactcttttaaaattgtaaccaacttctgtgcctaaaatcttaactcttatgccaatagctttcaaactttattgaccacatcttatagtgagaaatatatttaacattttacatacatagcgacctagagtagatacatagatacatgtaagtgacagaaaacttcataaaatagcatttcctgtgaataatgcactgtaatattttctatttagttttattaaaaaagctgttttgggccaactaaattggtatcagaactcactaatgtgttgtgacttacagtttgaaaaaacacagcattgagccatagtgcttaccatctgtattttatatagacacaagatgactttcctcatgtgtgcaaaggcaagatggggcatgagacaaagtacaaaccaaaccaagacacatgctcagatttacagacctttttgttaaatgttaaccagtgtaaaaatactgtaattcctttggggatttaaaggaatctgcctgtacaagagtagttacaaattaggaaatgacctcaaatactaatgttgctttgaaaaagagtcatggaaactcagggttggagagacttaaacattccatccagtcacccatgtgatgccttaatcatctctattttgcattcaatctgtgcttgagatactaccagttgagtgtggcttccctttcagaataatccattccatctttttgcctggcgggagggagcaagttcttttcaagattgagctgaaatttgcctcccagtaacttcattctcttcatcttcatcccatcccttgtatcacccttggagatgtttgaagaaaattctggagttctagctttgcagaatggagtccagtagggtgctcagcagccgtcacagatgcttcagcctcttggtaacccatgttatgctcatttccctggaacaggacctaatgcactgcacagcatttgcaacggcagatgagtatcatctgggaaatctgtctcaagatctggcctcccacggatatgttgaagtaacaagcttgcctagaggtacttcttcttgaacctggggccaagtatgttaaaatgtattggataattttcctatgatactatcttaagtatgtatttgtttgcaattcattttcttttgaaaggattgtatcataaaagtggatgttgaatctctttataaagatgacaaagttaagaattaaaatgtatttacagagaactcattaaaatcagtatgatttattaagattatttataggatcattattacttgaggtggtcagaggtcatactacttcatttctagcacattaagaagttattttagtttgtgtgtgtctgtgtgtgttttgtgttttttttttttttgttttttgggatggagtttcactcttgttgcccaggctggagtgcaatggcgcgatctcagctcactacaacttccgcctcccaggttcaagcgattttcctgcctcagcctccggagtagctaggattacaggcatgcgccaccacacctggctaatttttgtatttttagtagagatggtgtttctccatgttggtcaggctggcctcgaactcccaacctcatctaatcctcccgcctcggcctcccaaagtgctgggattacaggtttgagccaccacacccagcccgttattttagtcttatagaagaaccatgaagttgatagacatggggagagcctttaaaaaaaaaatttaccagctcaatctaatactttaaaacaattagttagccgggtgcagtagctcacgcctgtaattgcagcactttgggaggccgaggcgggcagatcacctgaggttgggagtttgagaccaacctgaccaacatagagaaacccctgtctctactaaaaatacaaataataataataataaaacgattagttagaagataaaaatgaaaaagaagaaaattaaaatgaacttaattgaggatttttatggtgaaatcaggaaggattcttgagaaatggcttgctttacattaattaaaaataatttaggccagccatggtggctcaggcctgtaatcccagcactttgggaggctgaggtgggtggatcatttgaggtcaggagttcgagaccagcctggccaacatggtgaaaccccatctctactaaaaatacaaaaattagccaggtatggtggcacgagcctgtagtcccagctacttgggagactgagacacaagaattgcttgaacctggagggtggaggttgcagtgagctgagatcatgccactgcactccaacctgggcgacagagtgagactctgtcttaaaaaataaataaataggccgggcgtgatgcctcatacctgtaatcctgcactctgggagactgagacaggcagatcacctgaggtcaggagtttcagaccagcctgtccaacatggtgaaaccccacctttactaaaaatacaaaaattagctgggcgtggtggtacgtgcctgtaatcccagctactcaggaggctgaggcaggacaatcacttgaacctgggaggtggaggttgcaatgagccaagatcgtgccactgcactccagcctgggtgacagagcgagactctgtctcaaaaataaataagttacttagaacattttgataaacttttacagtgaaactcaggatagctcaatacccagaacatttattaatttacctaagagtagcaaaaataggttgaaagccttcctataacagtggaaattcttaagactcaatcccatagaagatagttgaaatatcattgtgataatccaaacagaccgtttgtgtgattaggtgacaaaaacaagcatagttgacttagaaagacagagctatgtctagagccccttggtatgaaaatttgcctggaggtattgttggctgatgctgaaggctgccagctgtgtggtctgtgcttcacagaattgcaggcttcactgccctgggttgtttcagtcgattttattttgcttttggctgtgtaggcaaactctgtcctatgtaggatgtagtaattaacaatttagaaaaaaaaaaaaaatcacagttttggtctgtgtctgaattgcccatcacccagcctttaccagaaatttctgaagctttgaggatcctaattttatgttaattccgttaagacatacaaccttttgcaaattaatagtatattttttaattgatatattaacattggttgtaatttatattatggaatatatgcttatgataaatatcactatactaatatataaagcaacttcttatgatgaatattggtatattagtatatgttttaacaatacttaggccaggccccgtggctcatgcttgtaatgcactttgggaggccaaggcaggcagatggcttgagctgaggagttcacgaccagcctgggcaacatagtgagacctcatctctacaaaacataaacaaaaacttagccaggtgcggtggcacatgcctgtagtctaagctacttgggaggctgaggtgggtggggcgggggggggtcccttgagttcaggaggttgaggctgcattgagctgagatcatggcactgcgcttcagcctgggagacagagcaagaccctgtctcaaaaaaaacaaacaaacaaaaaaaaaactttttttttaaatagttgcaggtggctgcagtggtagcccctgtagtgattaaccttgaaatcacatatgttttgaagtggtcagtatctttatttctgtgtattttctattgccctactttttatactttaaaattcagcaggagtagtagtttgggaatgttaaaattgcattattaatgaaatggtatttataggaagagaatatattaatacttcttcaaattttatttttaattttgtagaaagaagtttaattcttgacacttagttgtatggaacctaagactttattaattatctggactagtgattattgaatcaaaatgggcatgaatgagctctaatattaatatcacaggttgttgaatgttttataaaagtaattgctgatctttttttggtggtcgtatttgcatttttatatattaaatcctttcagaggccttagtagaaagatggtgattgtgttacagagcactccatggtatataaagaaatgatcttaagtactttattacagtgtttataggtgactcttacaacttgtgttaccttgacatagcttttttgttcgtttattttaaatcacagatgcagcaaatattttggtgatgggtgtggaaaattctgcaaaagaaggtgatcctggaacaatattcttcttcaggtaagacaggaaagaaaccccattaggtgatgatgggtttgggtcaagtaattgtggtctttaaaggtgcaggcatacctttcttaacagtaaatgtgttcaaaatgtatttgtgatttaaatttatcatttaattcttatttaatctaggagagtttgtcacttttaggaattctctggtaaaccctcttataaagtaaagaatatttcaaacaagtgaatgatcttccccggggtgtctttctttgtaaattcggattttcatggactaaatttctggaaagcagccaatttcccattcatctttagtgccccttgtcagactcctgccccagggaaactcccgctacctccctgctgtctcttcttgccattttcttttttttctcccttcccctttggtagctctttaaagttttagcttacctctccagaggttttagactaggagactcacatacacacttattccttttatctaaaggccgactcaatactaaatactccacagtagctgcctgggaatgataacatgatagaaccgtgtgaaataatctcatttatcctcagcacaccgatgaaggtctattttgcacctgaggaaactgagggtcatagggattgagttacccatagtcatgagactaatacgtgacagaacagaaacacatggaccatctgtaggaatccaaagttgagtaaagttcttgtggtcataatccttatagttgatgataagtggaagttcttttttcctttcaatgcctaccttccttttgaccccatctttagagagaatcaagattccaacatttaattcaagtagagtaatagcatccctgttgttccgagtgaggaatttagatttgtgagggactctacatcagcactgtctagcagaaatacagtgcaagcctcggctgggcacggtggcttatgcctgtaatcccagcactttgggaggctgaggcaggcagatcacaaggtcaggagtttgagaccagcctggccaacatggtgaaaccctgtctctactaaaaatacaaaaaattagccaggcacatggtggagggtgcctgtaatcccagctactcaggaggctgaggcaggagattcacttgaatgcgggaggcgatggttgtggtcagctgagatcgtgccattgcactccagcctagtgacagagtgagactctgcctcaaagaaaaaaaaaaaaagaaagaaagaaatataatgcaagcctcatatgtaatgatacattttccagtaaccacattttaaatatttttaaaaagataaaattaattttgaacaacacaaatatgtttcttaacatattaacatgaaattaatttaacaatgtattttattcaacccagcatatctaaaatattatcatttcaacatgtaattaataatgatattttttcacttgtcatactaagtctttgaattttgctgtgtattgtacacttacagcgcatctcagtttgcaccaggcatgtttcaagcactcaatagccacatgtggcctctgagtaccacattgcacagcacagtgcattcctctggttggaggaatatgcagttcaccagacctctcttctgcctggaagggattctctgaactgatactgtggctgtggcttgaaatacctctcaaatccgtatcctgaaaccttatccctgcctattgtaacagcttattgtctccctgcctgcctgctcacccaccaccagtctgtttgtctattgtaagcagggtcattcttcagtggccatttctgaccactacactctcctgcctaaatttccacggactatgaacaaattctctatcactgcataaagttcccttctggattgtcccctgcttgcctctttatcctgcttgcccactgcttgaccacatctgcagccacgcagctactggctgtttattctgagatgctgctctgctccgtcccacctcctctctgagcctgtgtgtcccctctgctatgttgtctcctcttgttttctcatttggctgcctctgctagtcctttagcaaaggggtccctctggtgtacatctcatggtatactctgcatactcttgtagcactgatcacacactattgtaattggtggtctaagtgtcagtcccagtcttttctagattgaggataggaatgaaatcatacttatgtttctatcacaaatactaagcatggacccacacatatactaagtactttagaaatgtttcaagaataacgtggagccattaatatttttacctttcttttatttcctcctttccttcctccagtgcactgaccctgagctatagctcctgtttttatttactacctgaaacagcttcaacacgtcaaacttgagaaatcaaaacaaatgcattcgtagttttagaccctaaataatgttaaagccataatcggattcagagggcctcctgtggtgtcactgtagttctgttccaagcactgtgagcgtggggagcattattccatagaggcctttaaccatctgatgcttaaattaaccaccatctctttattccacaaaaatccaggcatagccctttattccttgcacatagtagagtctgcctaatgagagctaagacaaggtctcaaaaaatttccttattctgatttctgtggatcagaattgaaccaggtatgaaagagtctacatacgtgaagttatatagtattacaataatggctatttgtttggcaaaccatgtgagaaatcataaattttgaggaggtcaggttttatcaagaattttattttagctcttattgtaggaagttcacctaaggaccataatatcaaattagtaagtaccatcatattttgaaaaatcgcatcctgtatacattctagaagttacatggttttatatacgaccctaaagaatgtattccatctgtatcttagttgtttcttttatttttttaaatcagggaaggagctgctgtgttttggaatgtgaaagacaaaactgtaagtgtaaataaaaatgtgaaaatataaaaatttagttttgtgagaatgaattgttaattagcacatactgaaacattagaagggaaattaatagattatgcacaacttatttgctctgcattacatgatacttatcagtttcatcttccaaaatatattgtattttgggttaagatttcctgctttttcctttctctagacacacactaatttgtggagaatcagaaccatcctaactatactgcagacagaagtactgtagactttgcatgttgtactatacaaaatgtatgcagttaattggaagctggttgcattgagtgttcttttaagtcaagttgtctagaacttactactcatgggaaataattttttcaagatccaaatcaagatttgtttaatacaaccattttagaggcaaattggtaatctacattaaagctttatatttaacccagtaattttacacctagaaatttatccaaaggaaataatcataactattcgtgatgatttttgtacaaaaatgttcatcagagcaatatttataatggcaaaaattagaaattaccaaaatacacaataatagtttgttaaatcatccatatactacagatatactatagatccccttagaaatcatgtaaaaaaatatctatttctgggagattgcctatatatataatacagttacattaaaagagcagattatacggccaggcatggtggctcacgcctgtaatcccagcactttgggagaccaaggccggcaggtatcttgaggccaggagttcgagaccagcctggccaacatggtgaaccccatgtctactaaaaatacaaaaattagctgggcgtggtggtgcacacctgtaatcccagctactcgggtagctgaggcacaagaatcgcttaaaccttggaggcagaggttgcagtgagccaaggtcagaccattgcactccagcctgggagacagaggcatactcttgtcttcaaaaaaaaaaaaaagcgggttacaaaatataaccaatataatctcagaactggttaaaaaacatgctttatacaatcccaattttacgaaaaggaaacacacacagtaggtggtcgggaagggaacttagagaaaagaaaatataaatgaccaataaatttaagaaaatacaagttggctatttgaagttgcaaagatgtaaaaggctgataaaccccatttcttaagagtagtttcataaatgttgagattctacatttggaaaaactactttggagagcaggctagcaatattataagtgtgggccaggtgtggtaactcatacctgtaatcgtatcactttgggagtctggggtgggaggatcacttaagctcaggagttccagaccagcctgaacaacacagtgagatcccatctctacaaaaagtttttagaagttagccaggtgtggtagtgtgtacctgtagtcccagctacttgggaggctaaggcagggggatcgctcgaacccaggagtttgaggctgcaatgagctatgattgcatcactgcactccagcctgggtgacaaggtgagaccctgtctgttacatatatacatattgtgtaagtccacatatcttttgatctagcaattcctaaagaagtattcccacaaagccatgaagacctttgcacaagtgtggcacatcgcaacattgtaatggagagtagaaaaaattccccatggaggacacacctaggttggttaaataaattgcagttcgtctgtaaaggaaaatagtgttgaaaatgtcatgtgcataatatgatcctattttacataaaaagcagcataaatatgtacatatatacacataaaaagtctggaaggatatgcaccaagtttaatcatggttgcctctggggattaggatttcagtacagaagagagaaagagatgatcacctcccacacctgtgtggcttaattttttattagtatgttgggctttactttttattttttatttatttatttttttgagatagggtcttgctctgtcacaccggctgacattggctcactgcaaccgccacctcccaggctcaagccagcctctcaggtagctgggactacaggtgtacatcaccacacccagataatttttgtatttttttgtagagacaggattttgccacgttgcccaggctggtcttgaacttttgagctcaaggatccacccgcctctgcctcccaaaatgctgggattattaaagagatttaaagaatacaaattataatattactagtgattttccttgggttgtgggataatgataaccttgattttcttctccattctcatctgtgttttccaaatgtaaaaacaaatgaacatgtcatcctgattactttaatatcacaatggatttgatttgccttttccttaaaaacatgcaacagaaataatgcctgtaagtgtaatgaagactgttataagcattaaaatcataacatacttgaactgagggagtcagttatgatttcagattaatcttccttttcttctagatgaagcatgtgatgaaagttctagaaaaacatgaaattcagccctatgaaatcgcactggtacactgggaaaatgaagaacttaactacataaaaatagagtaagcaacttttcatcaaatttatgaaaggggcacttggaataaattaggtaaagcaatagaggagacaaattattatgcatatggaaactttttttttttttttgagacggagtctcactctgtcgcccaggatggagtgcagtggcacaatctcggctcactgcaacctctgcctcccgggttcaagcaattctcctgcctcagcctcctgagtaagtgggactacaggtgtgcaccaccacgcccagctaattttttgtatttttagtagagacagggtttcaccatgttggccaggatggtctggatctcgacctggtgatccgcccacctcagcctctcaaagtgctgggattacaggcgtgagccactggacctggcctggaaacttacttttaagaaaaaagtggccaggcgtggtagctcacacctgtaatcccagcactttgggaggctgaggcaggtggattacctgaggtcaggagttcaggaccagcctggccaacatggtgaaaccccatctctactaaaaaatacaaaaattagctggttatggtggcgggtgcttgtaatcccagctactcgggaggctgagacaggagaattgcttgaacctgggaggcggaggttgcagtgagccgagatcacgccattgcactccagccagggtgacaagagtgaaactccgtctcaaaaaaaaagaggaaaaagattactggtacaaatacaaagtctaaaccatataataaatattagaagataaacataattttttgaacttctcaggctatccacaagttaaaacaagtcagtagtatagccccaaaatggaaatgttaagtttctaatcagcctaatccaataaaatagtatgcatttatcaaatgaacctatcaaattattccagtaaatttttctcttaatccagttttttcctattgattttggggggtgggggtatgaaaaggaagtatagtgaggggtcaatctaagagacccacttgtagaagtgtgggtgctggaagaagtgggacctggtgtaccagtttcactaagataaatgggtaggcaacagactagctgattttcctgactcagccagagggaaaaaatgaagagatgttagggccgagacagaggcagtatgaacaagatggtagtgtctttttcctcatggagttacctgtctagtgaaatatgagtctttgcaggttcttaagaaaggtagtgttagccagatttggtggctcacacctgtaatctcagcactttgggaggccagggtgggaggatcaactgagtcaggagttcaagacagcttggccaacatggcgaaaccccatctctactaaaaatacaaaaattacccgggcatagtggcgagtgtctgtgatcccagctacttgggaggcggaggcggaggcagagaattgcttgaacctgggaggcagaggttgccatgacctgagatcgcaccactgcactccagcctgtgcaacagagtgagactctgtctcaaaaaaaaaaaaaaagcgttaaaagcagagctttgggaagacttggaagagagacagagactagctatagaaagaccagatggggataagagctgagtaatcagcgctcaccaccaatagggccagtcacggttttctaagtaagtgccttccatgtattatttcatttaatcctggggaaaaccctataattgcagctaactggctttccgatgagatttattgaatcctgtcttgccaaagggcacctgactgtgagtcagcctgagcccagtggtggctgcagtcagaggtaaggatataaacctgagagagacagcaaatgagcagcctgtagttttattatctttagtagttactcagcccttggcctgcagatacagctcctgtgaatcccctttctgtgttctattaggtttacattaaaatggcaaaaaccgcgattacttttgcaccaaccaaatacttccatatccaactactgctagacccttgtgtgtgtgtgtgtgtacgcttatccacacacacacacacacgttactgtacagtctgtgaggagtaaaatcctcagtgcttaggatcccagagtcagttattttgtttcgtcagaaagactgtcctggctgccacctacatggttattatgtgagttctgccatgattccagggatctgctcagctctgtggcatgggcccagtttactcataaagcatcttgtgaccaagcacagtggctcatgcctgtaatcccaacactttgagaggccaaggcgggcagatcacttgaggtcaggagttcaagaccagcctggccaacatggtgaagccctgtctgtactacaaatataaaaattagctggatgtggtggtgcactcctgtaatcccagctactcaggaggctgaggcaggagaatcgctggaacccaggaggcggaggttgcagtgagcgaagatcacgccactacactccagtctgggtgacagagcaagactccgtctcaaaaaaaaagacctcttgtgactgctgtctttgctttccttcctccatctgaggctgtcatagcagatgccgccctccatcaggccccttgtccccctccctttggccgtcacttcttgtctgacatcttttgtgaaggtttaccctgtcttttttccatttgcttgtgatgtttatattcacacattccgctcttcccctgtcccctgtctaggattctccacagtcacatactcatttttcacaacttccttgcctccctccccaaccccatcatgtcagtgtgattttagattacactccatatatagttttatatgcagcattttttcacatagaaatttactgtgaacgttctcctttttattaactatccttccaaaacacacttttaagtttttcttgtgtggagtgactattactgagccaacccctactgaacatttggtttatttcctaattttttactcttaaacactgaccttttttttttttttggagacagagtcttgctcagtctcccaggctggagtgcagtggcgtgatttcggcttactgcaagctccgcctcccgggttcactccattctcctgcctcagcctcccgagtagctgggactacaggcgcccgccaccacacccggctaattttattttgtgttttgagtagagacggggtttcaccatgttagccaggatggtctcaatctcctgacctcgtgatccacctgcctcggcctcccggagtgctggggttacaggcgtgagccaccgtgcccagccaacactgaccatttttttaaaagttttcagctgggcaaggtggctcgcacctgtagtcgcaccactttgggaggccgaggtgggtggatcatttgaggtcaggaattcaagaccagcctggccaacatggtgaaactctatctctattaaaaatacaaaaaaaattagctgggtgtggttacgcatgcctgtaatcccagctactagggaggctgaggcaggagaatcgcttgaacctaggagactgaggttgcagtgagctgagatcgcaccactgcactctagcctgggcggcagagtgagactgtctcaaaaaaaaaaaaaaaagttttcttgtatacaaatttttctttgcatcttagattatttccttaggataaactcctagaaagggaattacctggaccaaaggatatgagaacatttgtaacactcttgatacaaattgtcaaaatgacctccagaaagatgatatggtgtctttttcaaaggaaaagttaaagtgctttttaagatttagaaggtattatctttttgcttttcacaggggacagtcaaaacttcacaggggggaaatcaagttaaattcagagctggatttagatgatgccattctagagaagtttgctttctccaatgctctatgcctttctggtaagttactactgcttatgggatagggtactacagttgtcatttcactgagggaagtttaaatagtcacgattttggtatattttcagaatactcaacaaagccttagcattccttttcctttttttccctccatcagaaaaaatatctagtataaaagatagtactgtgctgaagttactcattccttattaattgtattaataaagcttaacctctccaaaagtattttttagatgatgattatattagcctttgtttttttctcttctctctatgcgattgttattcttagatagtctctaatccagacagagaagcccagccttgtgtgactgggcacaggtcccagtgtagaaaaacatactctagtgttccataggaatgggacccagagtcacagtggctataagtttgttctgaaagatccacatcccgaataaaactatacaagttctttaagaatttcttttgccagcagtctaccttaggtggctgctgcagcgtcctgtccatcccactctgaggggcttcggagatttctgaggtttactcttagtcctgaggagtgaaggggaggccaggaaagtcttagtcgcgccctatctgcagagctacccatggtatcaaggtgtaccctaccctcctcagtttccaagatgtaatactagaaaatcaagagttctactaaatgtagctttggtcttccaatagggcatggaaagcgattcagtttcctctatccactttaattctgtcctttatgataattaactattcttaaattatattttcaaggttttagtactttttcttaaactattactgaaatagtagtgaagatgctgtgcaattatgtattttatatacatgtgaatatgatgataaagaaatgttccattattaatttttttcccagtaaaactggcaatttgggaagcatcactggataaatttattgaatctattcagtcaattcctgaggtaattatatcaattttatgcttattcaaggattgatttttatatgtaaaaaatatgaatttcccaatataacaatatatagctatccatcagtatccatgggagatttgttccaagaccccactggataccagaatctaccagtgtccaaatccctgatataaaatggtatatatttgcatataacctatgcatatcctcatgtatactttcaaccatctctagattacctaaaatacctaatataatgtaaatactatgtaaatagttgttatactgtattatttaggaaataataacaagaaaaaacagtttgtacatgttcggtacagatgcaaccattcttttttctcaaaatactgtcaatttgcagttggttgaatctgcagttgcagaacttatagagggccgattgtttaggagtacaacaacattattacaaacaataagaaaactacagtaaacttaagaactcccagttacatataaaatgacaaattaagaaacttcatattgattactttttactttttaaaacttcaaattgtttcctctgttggtgcagtattttttttttaatattaatataattgaaatggggtctggccatgttgcccaggctggtcttgaactcctgggctcaagcgatcctcctgcctcggcctcccaaagttctagcattacaggccacgagccaccatgcccgtcagttgcagtatttttaatgtaactgaattaaagaaaaaagtgaaatgtttctctctgagaatggaaattatgaccacttttcctgatttaagaaagtgttttgctaaattatgagaaaaatagtggtatgaaaaatacatataaagttatattgaaatttcagtatacattaaaaatcatcatattgtaattaactgtgtctttattgtgaaagagtaatctaattatacttcggaaaggaggccctgcttttctactaagagattaggaatgtatatatcattgaaaatgctgatgagaagggaaatgaaaaaagagaatatacaatttctacctaataaaattatgaaatttcaaggtgagttaagacattaatctgggagacagccatcctaaaaaatatttacataggatccaaattatgccacttcagattttgccctgttgacctaatgcttattagaaagagagatacatggttttttggtttttccgattccctctcaactaggctttaaaagctgggaagaaagtgaaactatctcatgaagaagttatgcagaaaatcggtgaactctttgctctaaggtaaaagttttctctctaaataaaatatttcatatatttaacaatctcaagaaaacattcccatagttctgtggtgaagagcaaacatttacacgtttatgggaactgtagctgttttcatttcattgattataagcagggagaactcttacccattagaagtagttgggctgtgttaagactgtactgaaagaaatcacgcatgtgcaaaagagatcacgattcatctacattaaacccacattaaggagcacagtaggtgttctttgaaggtagaaagacatattcctgaatttggttaatgggaattctctgtaaaaatatatcactgcatcataatgctaaataggcttaattgctacagaaaagtttctttgaatctgagacaccaagatgccactggagagaaaaactgctgccagttaaactatgacaatactttttttatcagaggattaaaattttacacttactgaaatatcttttaatcttagctggatataaattatatcacattccctcttgggcatatatgaaaaggaaagcataagaaaataaattatttaaggcaaagacaagtaagtctcaagtgccacctgtcagacaccattaattttaagatgcctcgagatgttaaaatgggaataactatgtctaaaaactgatgaatcattttaaataagtatctggaaaggttttcagcttttattattcttgtagttgtcccaggatttacggaatgaaacatcccggatgttggtgtttttctcacaggcagcattgtccagtttatcccttctagcatgtggaatgagttaccagagctcactgcaaatgttcacctaagacttgtttttccatattctccttagatgctctgcctggagagaagtgatacagtgtttcattgtctgtgtatctctcatagctcaggacctatagttcagggtaccaacaaaacttaaaaacccatccatcaggagcatcctgcagcatatctgaagcctcaaattctctgagaagtagggtagagagattcttctctcctgttctcttggtcatgcaagcagaaattgatgtagtgaattataatatccaaactgaatagttaggactaaatatacgtaggtttgtgaatagtttctataaaggcttacttttactatcctgtttccttacctgtacaataaaaatgcttatttgttaatataaggaatgtgatacatctgtgaaaataaacatggcagataatattagattaaaaaactaaatctaaatttatatagggtatgatcccatttgtgtaagcaaataaaaatattcatgtttatctttatatgcatacacatgtacatgtgtttgcttgcacacacatgcatgtatgaatacagaaagatctggaagtacacagcaaagtgtctctacaggcctgtccttggggagaataaaggatttaagtagtgtggtagcataagagagcctaccatttttctgaatccttctctaggatattttccttttttttttaatcgtgaacaggtatgtatgtgttactttttttttttttttttttaaacagggtcttgcttgtcacccagactagagtgcagtggcatgatcatagctcaccaaagccttgatctcctgggctcagggattcctcctgcctcaccctcctgggtagctgggaccacaggagtgctccaccacacccagctaattttaaaaataatttgtagagacagggtctcaaacccttgctcaagcaatcctcctccctaggcctcccaaagtgctgggattacaggtgtgagccaccacatcagtttatgtgtactttcataacttagatttttatttagttaaacatctaagtgtaaggccaggcacggtggctcacacctgtaatgccagcactttgggaggctgagacaggtggattgcttgaggctgggagctcgagaccagcctggctaacatgatgaaaccccatctctaccaaaaatacaaaaattagccaggaatggtggtgtgcgcctgtaatcccagcttcttgggaggctgaggcatgagaattggttgaacccaggaggcgaaggttgcagtggagccaggatcatgccactgcactccagcctgggcgacagagcaagattctgtctcaaaaaagaaaaaggctgggcacggtggctcacatctgtaatcccaacactttgggaggccgaggccagtggatcatctgaggtcaggagttcaagaccagcctgaccaacatggagaaaccccatctttactaaaaatacaaaattagccgggcgtggtggcacatgcctgtaatcctagctactcgggaggctgaggcaggagaattgcttgaacccaagaggtggaggttgtggtgagccaagatcgcgccaatacactccagcctgggcaacaagaacaaaactctgtctcagaaaaaaaagtaagcacagacttcttatattaaaatgtagaaattaagagagagagtgtgtatgtttatgcttgcttgtctagtgtttgcataaacactggaaggatacagcggaaactagaagggattactgatagggaaagatacagataagaataagagttaagatttatcaatttttacctgtttatatcttgatctgctcaggaggctgaggcaggaagatcacttgagcccaggagtttgaggctgcggtaagctatgattgtgtcactgcaccccaaactgggtgacatatgaagacattatctctaaaaaaattttttaaataaaaaacaaaaaagtgtggacatattaaattttttttttatttgagatggggtctcactatgttgcctaggctggagtacagtgtcacagtcttggctcactgcagcctctgcctccgaggttcacatgatcctcccacctcagcctcccaagtagctgggactacaggcatacaccaccacacctggctagttcttgtattttttgtagagatagggtttcgctgtgctgtccaggttggtcttgaactcacagactcgagcaatctgcccgccttggccttccaaagtgctgggattacaggcatgaaccaccatgcctggccctaaaatttttaataaaaaaagtttaggctgggaatggtggctcacacctgtaatcccagcactttgggaggctgaggtaggcagatcacgtgaggtcaggagttcgagaccagcctggccaacttggtaaaaccctttactaaaaatacaaaaaattagccaggtgtgatggtaggcacctgtaatcccagctacttgggaggctgaggcaggagaattgcttaaatctgggaggcagaggttgcagtgagctgagatcatgccattgtactccagcctgggtgacaagagtgactctgtctcaaaaaaaaaaaaaaaattgaaaacaaaatgagtttttttctgtgtacttcataaataatgttggtattaaagattgaattaatttggttcagaagtttgaaactcatttgtaaattttatttacatgtttgttggcagtattttgcaaaggtcagcattaacaaatgttttcagccacatgcaatgccacatgcctgtagttccagctacatgggaggctgaggcaggagaacagcttgagcccaggagttcagtttgcagtgagttgtgatcacaccactgcactccatcccgggtaacatagcaagaccctctctcttaccaaaaaaaaaaaagttttcataaagcactatgtaaatattaaatacaatagaaacaatgatttttaattcaagataaataaaaagttataattttcctttttaaaggcaccgtataaacttgagttcagacttcctgattactcctgatttctactgggacagagaaaacctggaaggactttacgataaaacgtgtcaattccttagcattggccgaagagttaaggtacgtattttgcacttctaatgagagaaaaagacacgttgtcgcctataagttgaatatgtttaactgcttgcagagaaatatcttgtttgacttccattcaaatctctttatatttccccttcttgtcctctgtacagtcacttcaattttttgtgtcaaaggatcttctgatattagctctacagactagataaggttggtgaataagatgagagtttggaagcctaatggtccatcagtaagttcttgtcaagtttcaagcaagagttcatgactgcttctgatctgtcatggtgacagtgagaatagaaataaatttaagaaagaatcatgtaagacaaatcaagtgatgggtaataagaggccatggagaagaaagaataaaggatgactgatgtttgcctggaggtgacaagtagaaaggtggaaaaacaataatgagaggtcagagaggggaggtgacagactaaatctaagatatgctgagattagagtagcaacaagatatccaattagctccgtcatgcaggcatttagaagggcagaagcaaagtcgggaaaagagacgtgtattaagaaatcccagcactttgggaggctgaggcggatggatcacctgaggttgggagtttgagaccagcctggccaacatggcgaaaccctgtctctactaaaaatacaaaaa

SEQ ID NO: 15776 - DNA, 31566 bp, Homo sapiens
aagtaacaagcttgcctagaggtacttcttcttgaacctggggccaagtatgttaaaatgtattggataattttcctatgatactatcttaagtatgtatttgtttgcaattcattttcttttgaaaggattgtatcataaaagtggatgttgaatctctttataaagatgacaaagttaagaattaaaatgtatttacagagaactcattaaaatcagtatgatttattaagattatttataggatcattattacttgaggtggtcagaggtcatactacttcatttctagcacattaagaagttattttagtttgtgtgtgtctgtgtgtgttttgtgttttttttttttttgttttttgggatggagtttcactcttgttgcccaggctggagtgcaatggcgcgatctcagctcactacaacttccgcctcccaggttcaagcgattttcctgcctcagcctccggagtagctaggattacaggcatgcgccaccacacctggctaatttttgtatttttagtagagatggtgtttctccatgttggtcaggctggcctcgaactcccaacctcatctaatcctcccgcctcggcctcccaaagtgctgggattacaggtttgagccaccacacccagcccgttattttagtcttatagaagaaccatgaagttgatagacatggggagagcctttaaaaaaaaaatttaccagctcaatctaatactttaaaacaattagttagccgggtgcagtagctcacgcctgtaattgcagcactttgggaggccgaggcgggcagatcacctgaggttgggagtttgagaccaacctgaccaacatagagaaacccctgtctctactaaaaatacaaataataataataataaaacgattagttagaagataaaaatgaaaaagaagaaaattaaaatgaacttaattgaggatttttatggtgaaatcaggaaggattcttgagaaatggcttgctttacattaattaaaaataatttaggccagccatggtggctcaggcctgtaatcccagcactttgggaggctgaggtgggtggatcatttgaggtcaggagttcgagaccagcctggccaacatggtgaaaccccatctctactaaaaatacaaaaattagccaggtatggtggcacgagcctgtagtcccagctacttgggagactgagacacaagaattgcttgaacctggagggtggaggttgcagtgagctgagatcatgccactgcactccaacctgggcgacagagtgagactctgtcttaaaaaataaataaataggccgggcgtgatgcctcatacctgtaatcctgcactctgggagactgagacaggcagatcacctgaggtcaggagtttcagaccagcctgtccaacatggtgaaaccccacctttactaaaaatacaaaaattagctgggcgtggtggtacgtgcctgtaatcccagctactcaggaggctgaggcaggacaatcacttgaacctgggaggtggaggttgcaatgagccaagatcgtgccactgcactccagcctgggtgacagagcgagactctgtctcaaaaataaataagttacttagaacattttgataaacttttacagtgaaactcaggatagctcaatacccagaacatttattaatttacctaagagtagcaaaaataggttgaaagccttcctataacagtggaaattcttaagactcaatcccatagaagatagttgaaatatcattgtgataatccaaacagaccgtttgtgtgattaggtgacaaaaacaagcatagttgacttagaaagacagagctatgtctagagccccttggtatgaaaatttgcctggaggtattgttggctgatgctgaaggctgccagctgtgtggtctgtgcttcacagaattgcaggcttcactgccctgggttgtttcagtcgattttattttgcttttggctgtgtaggcaaactctgtcctatgtaggatgtagtaattaacaatttagaaaaaaaaaaaaaatcacagttttggtctgtgtctgaattgcccatcacccagcctttaccagaaatttctgaagctttgaggatcctaattttatgttaattccgttaagacatacaaccttttgcaaattaatagtatattttttaattgatatattaacattggttgtaatttatattatggaatatatgcttatgataaatatcactatactaatatataaagcaacttcttatgatgaatattggtatattagtatatgttttaacaatacttaggccaggccccgtggctcatgcttgtaatgcactttgggaggccaaggcaggcagatggcttgagctgaggagttcacgaccagcctgggcaacatagtgagacctcatctctacaaaacataaacaaaaacttagccaggtgcggtggcacatgcctgtagtctaagctacttgggaggctgaggtgggtggggcgggggggggtcccttgagttcaggaggttgaggctgcattgagctgagatcatggcactgcgcttcagcctgggagacagagcaagaccctgtctcaaaaaaaacaaacaaacaaaaaaaaaactttttttttaaatagttgcaggtggctgcagtggtagcccctgtagtgattaaccttgaaatcacatatgttttgaagtggtcagtatctttatttctgtgtattttctattgccctactttttatactttaaaattcagcaggagtagtagtttgggaatgttaaaattgcattattaatgaaatggtatttataggaagagaatatattaatacttcttcaaattttatttttaattttgtagaaagaagtttaattcttgacacttagttgtatggaacctaagactttattaattatctggactagtgattattgaatcaaaatgggcatgaatgagctctaatattaatatcacaggttgttgaatgttttataaaagtaattgctgatctttttttggtggtcgtatttgcatttttatatattaaatcctttcagaggccttagtagaaagatggtgattgtgttacagagcactccatggtatataaagaaatgatcttaagtactttattacagtgtttataggtgactcttacaacttgtgttaccttgacatagcttttttgttcgtttattttaaatcacagatgcagcaaatattttggtgatgggtgtggaaaattctgcaaaagaaggtgatcctggaacaatattcttcttcaggtaagacaggaaagaaaccccattaggtgatgatgggtttgggtcaagtaattgtggtctttaaaggtgcaggcatacctttcttaacagtaaatgtgttcaaaatgtatttgtgatttaaatttatcatttaattcttatttaatctaggagagtttgtcacttttaggaattctctggtaaaccctcttataaagtaaagaatatttcaaacaagtgaatgatcttccccggggtgtctttctttgtaaattcggattttcatggactaaatttctggaaagcagccaatttcccattcatctttagtgccccttgtcagactcctgccccagggaaactcccgctacctccctgctgtctcttcttgccattttcttttttttctcccttcccctttggtagctctttaaagttttagcttacctctccagaggttttagactaggagactcacatacacacttattccttttatctaaaggccgactcaatactaaatactccacagtagctgcctgggaatgataacatgatagaaccgtgtgaaataatctcatttatcctcagcacaccgatgaaggtctattttgcacctgaggaaactgagggtcatagggattgagttacccatagtcatgagactaatacgtgacagaacagaaacacatggaccatctgtaggaatccaaagttgagtaaagttcttgtggtcataatccttatagttgatgataagtggaagttcttttttcctttcaatgcctaccttccttttgaccccatctttagagagaatcaagattccaacatttaattcaagtagagtaatagcatccctgttgttccgagtgaggaatttagatttgtgagggactctacatcagcactgtctagcagaaatacagtgcaagcctcggctgggcacggtggcttatgcctgtaatcccagcactttgggaggctgaggcaggcagatcacaaggtcaggagtttgagaccagcctggccaacatggtgaaaccctgtctctactaaaaatacaaaaaattagccaggcacatggtggagggtgcctgtaatcccagctactcaggaggctgaggcaggagattcacttgaatgcgggaggcgatggttgtggtcagctgagatcgtgccattgcactccagcctagtgacagagtgagactctgcctcaaagaaaaaaaaaaaaagaaagaaagaaatataatgcaagcctcatatgtaatgatacattttccagtaaccacattttaaatatttttaaaaagataaaattaattttgaacaacacaaatatgtttcttaacatattaacatgaaattaatttaacaatgtattttattcaacccagcatatctaaaatattatcatttcaacatgtaattaataatgatattttttcacttgtcatactaagtctttgaattttgctgtgtattgtacacttacagcgcatctcagtttgcaccaggcatgtttcaagcactcaatagccacatgtggcctctgagtaccacattgcacagcacagtgcattcctctggttggaggaatatgcagttcaccagacctctcttctgcctggaagggattctctgaactgatactgtggctgtggcttgaaatacctctcaaatccgtatcctgaaaccttatccctgcctattgtaacagcttattgtctccctgcctgcctgctcacccaccaccagtctgtttgtctattgtaagcagggtcattcttcagtggccatttctgaccactacactctcctgcctaaatttccacggactatgaacaaattctctatcactgcataaagttcccttctggattgtcccctgcttgcctctttatcctgcttgcccactgcttgaccacatctgcagccacgcagctactggctgtttattctgagatgctgctctgctccgtcccacctcctctctgagcctgtgtgtcccctctgctatgttgtctcctcttgttttctcatttggctgcctctgctagtcctttagcaaaggggtccctctggtgtacatctcatggtatactctgcatactcttgtagcactgatcacacactattgtaattggtggtctaagtgtcagtcccagtcttttctagattgaggataggaatgaaatcatacttatgtttctatcacaaatactaagcatggacccacacatatactaagtactttagaaatgtttcaagaataacgtggagccattaatatttttacctttcttttatttcctcctttccttcctccagtgcactgaccctgagctatagctcctgtttttatttactacctgaaacagcttcaacacgtcaaacttgagaaatcaaaacaaatgcattcgtagttttagaccctaaataatgttaaagccataatcggattcagagggcctcctgtggtgtcactgtagttctgttccaagcactgtgagcgtggggagcattattccatagaggcctttaaccatctgatgcttaaattaaccaccatctctttattccacaaaaatccaggcatagccctttattccttgcacatagtagagtctgcctaatgagagctaagacaaggtctcaaaaaatttccttattctgatttctgtggatcagaattgaaccaggtatgaaagagtctacatacgtgaagttatatagtattacaataatggctatttgtttggcaaaccatgtgagaaatcataaattttgaggaggtcaggttttatcaagaattttattttagctcttattgtaggaagttcacctaaggaccataatatcaaattagtaagtaccatcatattttgaaaaatcgcatcctgtatacattctagaagttacatggttttatatacgaccctaaagaatgtattccatctgtatcttagttgtttcttttatttttttaaatcagggaaggagctgctgtgttttggaatgtgaaagacaaaactgtaagtgtaaataaaaatgtgaaaatataaaaatttagttttgtgagaatgaattgttaattagcacatactgaaacattagaagggaaattaatagattatgcacaacttatttgctctgcattacatgatacttatcagtttcatcttccaaaatatattgtattttgggttaagatttcctgctttttcctttctctagacacacactaatttgtggagaatcagaaccatcctaactatactgcagacagaagtactgtagactttgcatgttgtactatacaaaatgtatgcagttaattggaagctggttgcattgagtgttcttttaagtcaagttgtctagaacttactactcatgggaaataattttttcaagatccaaatcaagatttgtttaatacaaccattttagaggcaaattggtaatctacattaaagctttatatttaacccagtaattttacacctagaaatttatccaaaggaaataatcataactattcgtgatgatttttgtacaaaaatgttcatcagagcaatatttataatggcaaaaattagaaattaccaaaatacacaataatagtttgttaaatcatccatatactacagatatactatagatccccttagaaatcatgtaaaaaaatatctatttctgggagattgcctatatatataatacagttacattaaaagagcagattatacggccaggcatggtggctcacgcctgtaatcccagcactttgggagaccaaggccggcaggtatcttgaggccaggagttcgagaccagcctggccaacatggtgaaccccatgtctactaaaaatacaaaaattagctgggcgtggtggtgcacacctgtaatcccagctactcgggtagctgaggcacaagaatcgcttaaaccttggaggcagaggttgcagtgagccaaggtcagaccattgcactccagcctgggagacagaggcatactcttgtcttcaaaaaaaaaaaaaagcgggttacaaaatataaccaatataatctcagaactggttaaaaaacatgctttatacaatcccaattttacgaaaaggaaacacacacagtaggtggtcgggaagggaacttagagaaaagaaaatataaatgaccaataaatttaagaaaatacaagttggctatttgaagttgcaaagatgtaaaaggctgataaaccccatttcttaagagtagtttcataaatgttgagattctacatttggaaaaactactttggagagcaggctagcaatattataagtgtgggccaggtgtggtaactcatacctgtaatcgtatcactttgggagtctggggtgggaggatcacttaagctcaggagttccagaccagcctgaacaacacagtgagatcccatctctacaaaaagtttttagaagttagccaggtgtggtagtgtgtacctgtagtcccagctacttgggaggctaaggcagggggatcgctcgaacccaggagtttgaggctgcaatgagctatgattgcatcactgcactccagcctgggtgacaaggtgagaccctgtctgttacatatatacatattgtgtaagtccacatatcttttgatctagcaattcctaaagaagtattcccacaaagccatgaagacctttgcacaagtgtggcacatcgcaacattgtaatggagagtagaaaaaattccccatggaggacacacctaggttggttaaataaattgcagttcgtctgtaaaggaaaatagtgttgaaaatgtcatgtgcataatatgatcctattttacataaaaagcagcataaatatgtacatatatacacataaaaagtctggaaggatatgcaccaagtttaatcatggttgcctctggggattaggatttcagtacagaagagagaaagagatgatcacctcccacacctgtgtggcttaattttttattagtatgttgggctttactttttattttttatttatttatttttttgagatagggtcttgctctgtcacaccggctgacattggctcactgcaaccgccacctcccaggctcaagccagcctctcaggtagctgggactacaggtgtacatcaccacacccagataatttttgtatttttttgtagagacaggattttgccacgttgcccaggctggtcttgaacttttgagctcaaggatccacccgcctctgcctcccaaaatgctgggattattaaagagatttaaagaatacaaattataatattactagtgattttccttgggttgtgggataatgataaccttgattttcttctccattctcatctgtgttttccaaatgtaaaaacaaatgaacatgtcatcctgattactttaatatcacaatggatttgatttgccttttccttaaaaacatgcaacagaaataatgcctgtaagtgtaatgaagactgttataagcattaaaatcataacatacttgaactgagggagtcagttatgatttcagattaatcttccttttcttctagatgaagcatgtgatgaaagttctagaaaaacatgaaattcagccctatgaaatcgcactggtacactgggaaaatgaagaacttaactacataaaaatagagtaagcaacttttcatcaaatttatgaaaggggcacttggaataaattaggtaaagcaatagaggagacaaattattatgcatatggaaactttttttttttttttgagacggagtctcactctgtcgcccaggatggagtgcagtggcacaatctcggctcactgcaacctctgcctcccgggttcaagcaattctcctgcctcagcctcctgagtaagtgggactacaggtgtgcaccaccacgcccagctaattttttgtatttttagtagagacagggtttcaccatgttggccaggatggtctggatctcgacctggtgatccgcccacctcagcctctcaaagtgctgggattacaggcgtgagccactggacctggcctggaaacttacttttaagaaaaaagtggccaggcgtggtagctcacacctgtaatcccagcactttgggaggctgaggcaggtggattacctgaggtcaggagttcaggaccagcctggccaacatggtgaaaccccatctctactaaaaaatacaaaaattagctggttatggtggcgggtgcttgtaatcccagctactcgggaggctgagacaggagaattgcttgaacctgggaggcggaggttgcagtgagccgagatcacgccattgcactccagccagggtgacaagagtgaaactccgtctcaaaaaaaaagaggaaaaagattactggtacaaatacaaagtctaaaccatataataaatattagaagataaacataattttttgaacttctcaggctatccacaagttaaaacaagtcagtagtatagccccaaaatggaaatgttaagtttctaatcagcctaatccaataaaatagtatgcatttatcaaatgaacctatcaaattattccagtaaatttttctcttaatccagttttttcctattgattttggggggtgggggtatgaaaaggaagtatagtgaggggtcaatctaagagacccacttgtagaagtgtgggtgctggaagaagtgggacctggtgtaccagtttcactaagataaatgggtaggcaacagactagctgattttcctgactcagccagagggaaaaaatgaagagatgttagggccgagacagaggcagtatgaacaagatggtagtgtctttttcctcatggagttacctgtctagtgaaatatgagtctttgcaggttcttaagaaaggtagtgttagccagatttggtggctcacacctgtaatctcagcactttgggaggccagggtgggaggatcaactgagtcaggagttcaagacagcttggccaacatggcgaaaccccatctctactaaaaatacaaaaattacccgggcatagtggcgagtgtctgtgatcccagctacttgggaggcggaggcggaggcagagaattgcttgaacctgggaggcagaggttgccatgacctgagatcgcaccactgcactccagcctgtgcaacagagtgagactctgtctcaaaaaaaaaaaaaaagcgttaaaagcagagctttgggaagacttggaagagagacagagactagctatagaaagaccagatggggataagagctgagtaatcagcgctcaccaccaatagggccagtcacggttttctaagtaagtgccttccatgtattatttcatttaatcctggggaaaaccctataattgcagctaactggctttccgatgagatttattgaatcctgtcttgccaaagggcacctgactgtgagtcagcctgagcccagtggtggctgcagtcagaggtaaggatataaacctgagagagacagcaaatgagcagcctgtagttttattatctttagtagttactcagcccttggcctgcagatacagctcctgtgaatcccctttctgtgttctattaggtttacattaaaatggcaaaaaccgcgattacttttgcaccaaccaaatacttccatatccaactactgctagacccttgtgtgtgtgtgtgtgtacgcttatccacacacacacacacacgttactgtacagtctgtgaggagtaaaatcctcagtgcttaggatcccagagtcagttattttgtttcgtcagaaagactgtcctggctgccacctacatggttattatgtgagttctgccatgattccagggatctgctcagctctgtggcatgggcccagtttactcataaagcatcttgtgaccaagcacagtggctcatgcctgtaatcccaacactttgagaggccaaggcgggcagatcacttgaggtcaggagttcaagaccagcctggccaacatggtgaagccctgtctgtactacaaatataaaaattagctggatgtggtggtgcactcctgtaatcccagctactcaggaggctgaggcaggagaatcgctggaacccaggaggcggaggttgcagtgagcgaagatcacgccactacactccagtctgggtgacagagcaagactccgtctcaaaaaaaaagacctcttgtgactgctgtctttgctttccttcctccatctgaggctgtcatagcagatgccgccctccatcaggccccttgtccccctccctttggccgtcacttcttgtctgacatcttttgtgaaggtttaccctgtcttttttccatttgcttgtgatgtttatattcacacattccgctcttcccctgtcccctgtctaggattctccacagtcacatactcatttttcacaacttccttgcctccctccccaaccccatcatgtcagtgtgattttagattacactccatatatagttttatatgcagcattttttcacatagaaatttactgtgaacgttctcctttttattaactatccttccaaaacacacttttaagtttttcttgtgtggagtgactattactgagccaacccctactgaacatttggtttatttcctaattttttactcttaaacactgaccttttttttttttttggagacagagtcttgctcagtctcccaggctggagtgcagtggcgtgatttcggcttactgcaagctccgcctcccgggttcactccattctcctgcctcagcctcccgagtagctgggactacaggcgcccgccaccacacccggctaattttattttgtgttttgagtagagacggggtttcaccatgttagccaggatggtctcaatctcctgacctcgtgatccacctgcctcggcctcccggagtgctggggttacaggcgtgagccaccgtgcccagccaacactgaccatttttttaaaagttttcagctgggcaaggtggctcgcacctgtagtcgcaccactttgggaggccgaggtgggtggatcatttgaggtcaggaattcaagaccagcctggccaacatggtgaaactctatctctattaaaaatacaaaaaaaattagctgggtgtggttacgcatgcctgtaatcccagctactagggaggctgaggcaggagaatcgcttgaacctaggagactgaggttgcagtgagctgagatcgcaccactgcactctagcctgggcggcagagtgagactgtctcaaaaaaaaaaaaaaaagttttcttgtatacaaatttttctttgcatcttagattatttccttaggataaactcctagaaagggaattacctggaccaaaggatatgagaacatttgtaacactcttgatacaaattgtcaaaatgacctccagaaagatgatatggtgtctttttcaaaggaaaagttaaagtgctttttaagatttagaaggtattatctttttgcttttcacaggggacagtcaaaacttcacaggggggaaatcaagttaaattcagagctggatttagatgatgccattctagagaagtttgctttctccaatgctctatgcctttctggtaagttactactgcttatgggatagggtactacagttgtcatttcactgagggaagtttaaatagtcacgattttggtatattttcagaatactcaacaaagccttagcattccttttcctttttttccctccatcagaaaaaatatctagtataaaagatagtactgtgctgaagttactcattccttattaattgtattaataaagcttaacctctccaaaagtattttttagatgatgattatattagcctttgtttttttctcttctctctatgcgattgttattcttagatagtctctaatccagacagagaagcccagccttgtgtgactgggcacaggtcccagtgtagaaaaacatactctagtgttccataggaatgggacccagagtcacagtggctataagtttgttctgaaagatccacatcccgaataaaactatacaagttctttaagaatttcttttgccagcagtctaccttaggtggctgctgcagcgtcctgtccatcccactctgaggggcttcggagatttctgaggtttactcttagtcctgaggagtgaaggggaggccaggaaagtcttagtcgcgccctatctgcagagctacccatggtatcaaggtgtaccctaccctcctcagtttccaagatgtaatactagaaaatcaagagttctactaaatgtagctttggtcttccaatagggcatggaaagcgattcagtttcctctatccactttaattctgtcctttatgataattaactattcttaaattatattttcaaggttttagtactttttcttaaactattactgaaatagtagtgaagatgctgtgcaattatgtattttatatacatgtgaatatgatgataaagaaatgttccattattaatttttttcccagtaaaactggcaatttgggaagcatcactggataaatttattgaatctattcagtcaattcctgaggtaattatatcaattttatgcttattcaaggattgatttttatatgtaaaaaatatgaatttcccaatataacaatatatagctatccatcagtatccatgggagatttgttccaagaccccactggataccagaatctaccagtgtccaaatccctgatataaaatggtatatatttgcatataacctatgcatatcctcatgtatactttcaaccatctctagattacctaaaatacctaatataatgtaaatactatgtaaatagttgttatactgtattatttaggaaataataacaagaaaaaacagtttgtacatgttcggtacagatgcaaccattcttttttctcaaaatactgtcaatttgcagttggttgaatctgcagttgcagaacttatagagggccgattgtttaggagtacaacaacattattacaaacaataagaaaactacagtaaacttaagaactcccagttacatataaaatgacaaattaagaaacttcatattgattactttttactttttaaaacttcaaattgtttcctctgttggtgcagtattttttttttaatattaatataattgaaatggggtctggccatgttgcccaggctggtcttgaactcctgggctcaagcgatcctcctgcctcggcctcccaaagttctagcattacaggccacgagccaccatgcccgtcagttgcagtatttttaatgtaactgaattaaagaaaaaagtgaaatgtttctctctgagaatggaaattatgaccacttttcctgatttaagaaagtgttttgctaaattatgagaaaaatagtggtatgaaaaatacatataaagttatattgaaatttcagtatacattaaaaatcatcatattgtaattaactgtgtctttattgtgaaagagtaatctaattatacttcggaaaggaggccctgcttttctactaagagattaggaatgtatatatcattgaaaatgctgatgagaagggaaatgaaaaaagagaatatacaatttctacctaataaaattatgaaatttcaaggtgagttaagacattaatctgggagacagccatcctaaaaaatatttacataggatccaaattatgccacttcagattttgccctgttgacctaatgcttattagaaagagagatacatggttttttggtttttccgattccctctcaactaggctttaaaagctgggaagaaagtgaaactatctcatgaagaagttatgcagaaaatcggtgaactctttgctctaaggtaaaagttttctctctaaataaaatatttcatatatttaacaatctcaagaaaacattcccatagttctgtggtgaagagcaaacatttacacgtttatgggaactgtagctgttttcatttcattgattataagcagggagaactcttacccattagaagtagttgggctgtgttaagactgtactgaaagaaatcacgcatgtgcaaaagagatcacgattcatctacattaaacccacattaaggagcacagtaggtgttctttgaaggtagaaagacatattcctgaatttggttaatgggaattctctgtaaaaatatatcactgcatcataatgctaaataggcttaattgctacagaaaagtttctttgaatctgagacaccaagatgccactggagagaaaaactgctgccagttaaactatgacaatactttttttatcagaggattaaaattttacacttactgaaatatcttttaatcttagctggatataaattatatcacattccctcttgggcatatatgaaaaggaaagcataagaaaataaattatttaaggcaaagacaagtaagtctcaagtgccacctgtcagacaccattaattttaagatgcctcgagatgttaaaatgggaataactatgtctaaaaactgatgaatcattttaaataagtatctggaaaggttttcagcttttattattcttgtagttgtcccaggatttacggaatgaaacatcccggatgttggtgtttttctcacaggcagcattgtccagtttatcccttctagcatgtggaatgagttaccagagctcactgcaaatgttcacctaagacttgtttttccatattctccttagatgctctgcctggagagaagtgatacagtgtttcattgtctgtgtatctctcatagctcaggacctatagttcagggtaccaacaaaacttaaaaacccatccatcaggagcatcctgcagcatatctgaagcctcaaattctctgagaagtagggtagagagattcttctctcctgttctcttggtcatgcaagcagaaattgatgtagtgaattataatatccaaactgaatagttaggactaaatatacgtaggtttgtgaatagtttctataaaggcttacttttactatcctgtttccttacctgtacaataaaaatgcttatttgttaatataaggaatgtgatacatctgtgaaaataaacatggcagataatattagattaaaaaactaaatctaaatttatatagggtatgatcccatttgtgtaagcaaataaaaatattcatgtttatctttatatgcatacacatgtacatgtgtttgcttgcacacacatgcatgtatgaatacagaaagatctggaagtacacagcaaagtgtctctacaggcctgtccttggggagaataaaggatttaagtagtgtggtagcataagagagcctaccatttttctgaatccttctctaggatattttccttttttttttaatcgtgaacaggtatgtatgtgttactttttttttttttttttttaaacagggtcttgcttgtcacccagactagagtgcagtggcatgatcatagctcaccaaagccttgatctcctgggctcagggattcctcctgcctcaccctcctgggtagctgggaccacaggagtgctccaccacacccagctaattttaaaaataatttgtagagacagggtctcaaacccttgctcaagcaatcctcctccctaggcctcccaaagtgctgggattacaggtgtgagccaccacatcagtttatgtgtactttcataacttagatttttatttagttaaacatctaagtgtaaggccaggcacggtggctcacacctgtaatgccagcactttgggaggctgagacaggtggattgcttgaggctgggagctcgagaccagcctggctaacatgatgaaaccccatctctaccaaaaatacaaaaattagccaggaatggtggtgtgcgcctgtaatcccagcttcttgggaggctgaggcatgagaattggttgaacccaggaggcgaaggttgcagtggagccaggatcatgccactgcactccagcctgggcgacagagcaagattctgtctcaaaaaagaaaaaggctgggcacggtggctcacatctgtaatcccaacactttgggaggccgaggccagtggatcatctgaggtcaggagttcaagaccagcctgaccaacatggagaaaccccatctttactaaaaatacaaaattagccgggcgtggtggcacatgcctgtaatcctagctactcgggaggctgaggcaggagaattgcttgaacccaagaggtggaggttgtggtgagccaagatcgcgccaatacactccagcctgggcaacaagaacaaaactctgtctcagaaaaaaaagtaagcacagacttcttatattaaaatgtagaaattaagagagagagtgtgtatgtttatgcttgcttgtctagtgtttgcataaacactggaaggatacagcggaaactagaagggattactgatagggaaagatacagataagaataagagttaagatttatcaatttttacctgtttatatcttgatctgctcaggaggctgaggcaggaagatcacttgagcccaggagtttgaggctgcggtaagctatgattgtgtcactgcaccccaaactgggtgacatatgaagacattatctctaaaaaaattttttaaataaaaaacaaaaaagtgtggacatattaaattttttttttatttgagatggggtctcactatgttgcctaggctggagtacagtgtcacagtcttggctcactgcagcctctgcctccgaggttcacatgatcctcccacctcagcctcccaagtagctgggactacaggcatacaccaccacacctggctagttcttgtattttttgtagagatagggtttcgctgtgctgtccaggttggtcttgaactcacagactcgagcaatctgcccgccttggccttccaaagtgctgggattacaggcatgaaccaccatgcctggccctaaaatttttaataaaaaaagtttaggctgggaatggtggctcacacctgtaatcccagcactttgggaggctgaggtaggcagatcacgtgaggtcaggagttcgagaccagcctggccaacttggtaaaaccctttactaaaaatacaaaaaattagccaggtgtgatggtaggcacctgtaatcccagctacttgggaggctgaggcaggagaattgcttaaatctgggaggcagaggttgcagtgagctgagatcatgccattgtactccagcctgggtgacaagagtgactctgtctcaaaaaaaaaaaaaaaattgaaaacaaaatgagtttttttctgtgtacttcataaataatgttggtattaaagattgaattaatttggttcagaagtttgaaactcatttgtaaattttatttacatgtttgttggcagtattttgcaaaggtcagcattaacaaatgttttcagccacatgcaatgccacatgcctgtagttccagctacatgggaggctgaggcaggagaacagcttgagcccaggagttcagtttgcagtgagttgtgatcacaccactgcactccatcccgggtaacatagcaagaccctctctcttaccaaaaaaaaaaaagttttcataaagcactatgtaaatattaaatacaatagaaacaatgatttttaattcaagataaataaaaagttataattttcctttttaaaggcaccgtataaacttgagttcagacttcctgattactcctgatttctactgggacagagaaaacctggaaggactttacgataaaacgtgtcaattccttagcattggccgaagagttaaggtacgtattttgcacttctaatgagagaaaaagacacgttgtcgcctataagttgaatatgtttaactgcttgcagagaaatatcttgtttgacttccattcaaatctctttatatttccccttcttgtcctctgtacagtcacttcaattttttgtgtcaaaggatcttctgatattagctctacagactagataaggttggtgaataagatgagagtttggaagcctaatggtccatcagtaagttcttgtcaagtttcaagcaagagttcatgactgcttctgatctgtcatggtgacagtgagaatagaaataaatttaagaaagaatcatgtaagacaaatcaagtgatgggtaataagaggccatggagaagaaagaataaaggatgactgatgtttgcctggaggtgacaagtagaaaggtggaaaaacaataatgagaggtcagagaggggaggtgacagactaaatctaagatatgctgagattagagtagcaacaagatatccaattagctccgtcatgcaggcatttagaagggcagaagcaaagtcgggaaaagagacgtgtattaagaaatcccagcactttgggaggctgaggcggatggatcacctgaggttgggagtttgagaccagcctggccaacatggcgaaaccctgtctctactaaaaatacaaaaattagccaggcatggtggcattctcctatagtccgagctactcgagaggctgaggcaggagaatcacttgaacccaggaggtggaggttgcagtgagccaaggtcgagccagtgcactccagcctggatgacagagtgagactccgtctcaaaaaaaaaaaaaaaaaaaaagctgtagtgatggaggtagaccacatggggaaagagcatagaaaacagaaaattgacattagtacaatgtgtgcacatagttctgtgacattttgccacatctatagatccatgcaaccacatgatcaagacacaaaactgtgccaggtgcggtggctcatgcctgtaaccccagcactttgtgaggctagaggtgggcagatcacttgaggtcaagagttcgagacctgcctggccaatatggtaaaacgctgtctctactaaaaatacaaaaattagctgggtgtggtggcgcgtgcctgtagtcccagctactcgggaggctgaggcagcagaatcgcttgaacccaggaagtggaggttgcagtgagctgaggtcatgccattgcactccagcctgggcgttgcagcgagactccatctcaaaaaaaacaaaacaaaaagacacaaaactgttttatcacttttcctcatgctaccctgtatagtcacactgccctccccctacccggactgtccctaacccctggcagtgagtaatctcttctccatctccataattttgtcattttgaggatgttatatagatagtcatacagtatgtgactttttttttttttttttttttgagacggagtcttgctctgttgcccaggctggagtgcagtggctcaatcttggctcattgcaagctctgcctcccgggttcacgccattctcctgcctcagcctcctgagtaggtgggactacaggcacccgccaccaagcccagctaatttttttttgtatttttagtagagatggggtttcactgtgtttagccaggatggtctcgatctgtatgtgactttttaactggcttttttcacagagcataatgccctcaacttggatccatccaaattgttgcttgtatcaaagttcctgtcttcctgtggttactgaaacaattttttggtatttcattttgatgttactttttaatatatctcgttgcatagatatttagtagttgctctggttattacatcttacgtatataacttattacaatctactgatttcaacatcttgcagattaaatgaagtatagaatctttatttccctaatggatgattggatgcagaaaaaaaaaaagaattcttatttcttttatattcctttacccttccgtatttataattttcttaactattcttctgcagacatagaaaacttcatcagataatgttataatttttgcttcaaccatcaaacataatttagaaaactaagaaaagcaaagtctgttgtatgtgcccatgtttttattctttctgttcttttctccttctgatcttctaagatttcttttactgtttttttttttcaagaactttatttagccattcttttaaggtaagtctagtgagacaaattctcttagtttgtcttcatctgagagtgtattaattttctcttcattcttgcaggatattttcctagaaataggattctaggtagacagttttctttctttcagcacctgaaaaatgccatgccacttccttctgacctccatggtttctgacggaaatctgccataattctatgacatctacattttatcttttattatcatttcacaaggtctttgaggctctgttcacttcttttccagtatattttgtctctgttaagattgggtaatgtcctttgtttcatcttctagttgattgattccttcctctgttacattcgttctgctgcccaacattgagtttatttcatttattatatttttcagttctaaaatttccatgtttttttatttgtatcttctgtttctttgcagagacttcctgctttttcgtttgtttcaaatgtgttcagaattgcttgttgaatcatttttatgatggttgctctaacatcatctaataatacctaacctcagatacctcttgatattagtgtctactgattgtcttttctgattccctccaactaattttaatacctccagtttccctcattgcctcaagtgttctggcttgatatacaaggtccttcctattgtttctgtttttcaatcatatttcctaccaatccccacattcaccttgtatcacatcaaaaataagtgattagcctgggaaacacaatgagacctcatttctactaaccttttttttaaaaaaattagccaggtataatggcatgtgcctgtagtctcagctaccctgggaggttgaggcaggaggattgctttagcccaggagtttgaggctgcagtgagccatgatcacgccactacatcccagtctaggtgacagagtgagaccctgtctcaaaaaaataaaaataaaaaatacatgatttataatttcaaaaacctaccatggcttattgaatgctatgttccactttagtgtctacatttttttcctctaagctagacaccgccccttgcaaaaccacatcaaagctatctgcagttgtcactgatcttggcaccacctattcctctgtaggtgtcttccagcacaggacagtagagatcatcaccactcggcaagaaaaccaagctatgttgcttttagctgacacagaaagattgattagtgatggtttaggaatcaaattcagtggactccatcaacacagttttagataacagaggtgtaattagacaccgatttgacagtccaactgtctggtcaaacatgaaaagcactggactttcctggttgtcgactgtgcacacaggctgaagatccagaggaggaaagggagggatactaaaagctttatacagttgaggtatttcctgtggttgtgttagctattgctgtgtaacaaattaccccaaaacttggtggactgaaacaccacttactggctgggcacggtggctcacgcctgttaccccagcactttggtaggccaaggcaggcaggtcacatgaggccaggagttcaagaccagcctggccaacatggtgaaaccccataaattagtcgggcatggtggcatgcacctgtagtcccaagtagctgactctggaggctgaggcatgagaatcacttgaacccaggaggcagaggttggactgagctgagactgcaccactgcactccagcctgggtgacagagtgagactgtctcaaaaaataaaaagaaaaaagaaacaccacttactatttaagtttttgtgggtcaggaatcagtgcagcttagctgggtcctctgattctgtgtttctcacaaggctgcagtcatctcagagattcacttcctagttcactcgtggttattggctggatttggttcctctcaggctattagattgaggcctcagttcctcataagctgatgtccagaagcttctccatagagcatctcacaacatggcagtgtgcttcatcagatgaacaagtaggggagtgatatggtttagatctgtatccctgcccaaatcttgtgtcgaatggtaatgcccgtgttggaggtgggtcctggtgggggggtgactggatcatcagggtagatttctcatgagtggtttggcaccatccccttggtgctgttcttgtgacagtgagttctcgtgaggttgtttaaaagtgtgtagcacctgcatctccccttgttcgctcttcttcgcttctgccatgtaaggtacctgctctcccttcaccttccactatgattgtaagtttctggaggcttccccagaagccaagcacatgccagcatcatgcttcctgtagaacagtgcagaaccatgagccaattaggcctcttttctttataaattaccccgtctcaggtatttctttatagcagtgagagactggactaatacagagagcaagagagactgtcaggaagagaatgctagtaaaacagaagtcacagtcttttgcaacctaatcacagaagtgatttttgctgtgctctctttgttaaaaacaagttagggccaggcacagtggctcatgcttataatcctagccctttgggaggctgagatgggagggtcacttgaggccaggagttcaagaccagcctggtcaacatagtgatacccccgcccatctctttaaaaaaaaaaaaaaattaaaaagcaagttatggccagtcgtggtggctcacacctgtaatcccagcacttcgggaggccgaggtgagtggatcacctgaggtcaggagttcaaggccagcgtggctaacatggtgaaaccctgtctctactaaaaatacaaaaattagctgggcatggtggtggacgcctgtaatcccagtcacttgggaggctgaggcaggaaaatcgcttgaacctaaggggggcagaggttgcagtgagccaagatcagcctggatgaaacagcaaaacttcgtctcaagaaaaaaaaaggcaagttattagactgagcctacgctcgagggtaggggatgacacaaaagtgaacaccaggaggtggggagtctttgggtggcatcttagaaatctgcctaccacattggttttgaaaaagatggagaaaattctggaaacctactttatgacccctgacctacacgatcctcatactaccagttactttaatggttgccagcttcaggccatcaaagttggtggaaccattactgatctcattgtgttctgaattgtcagcaagccaaatgccgctggtctcagcttagacgagaacgttaatgccaaatttaatgatctgatcttttacctgggtggcattttttatctgtccatcctcagtattcaagatggaattactgaagtcaagtctgcaactgaggatacccacctgagtgaagagtaccttgacaactaagtggtcagctgtttcatggctgagatcaactgcagttatagaaaggacacccgttgagaacaagcaggctgcccaagccccttctgcctctactgaatgtgctcttcattctggtatcgaggccaatttgagattgagtccctccatgaaggggttcacatctatacctctgtgcacatgagcagctggaagaatcaaaagccaccccagtccctggcaccctacacctgtggagaaagccataagcaatgtcacccagacatatcaccagtccttcacgggtggctctatttatatccccaagatttaaaatctcttatagggccgggcatggtggctcacacctgtaatcccagcactttgggaggccaaggtgggaggatcgcttgaggccaggagttcaagaccagcctggccaacatggtgaaacctgtctctactaaaaatacaaaaattagccgggcctggtggtgcatgcctgtgatcccaggtacttgaggggctgaggcactagaatcacttgaacttgggaggcaaaggttccgatgagctgagattgcaccactgcactccagcctgggtgacagagtgagacttatctccaaaaaaataattaataaataagataaagtctcctacaggaagaactagaactgaatttatttacaggcagtatgatcttgtatgtagaagacctggaagaatctacaaagaagctaccagaataagtgagtttatcaaggtctcaagatcaatgtataaaaacggttatctttcgttatactgcaaatacacaattggaaaatgaaattttaaaacttctgtttatagtagcacccaaaacttgaattactcaggtttgaattgagtgattcaactattccagaataatattaattaatcaattggagtaatctgagcaagtaattgttctttatttcattccccagtctcactgtgggacatcttttttggtgttaagtcttctgcatgagttatgaagcatacctaaaaggtctcaaactacctttctcagagttttttctcagcatcccgaaggcagttcagactcgttggattatgtcaaggttatttagaaggggttgagagttcaccctgccttaggctcagcatagtgctggcattatacataatacaaaagaaaagtaagaattggtcctgcccttcagccagctttacagtcttctaagaaaacagatggaacaggccgggtgcggtggctcatgcctgtaatcccagcattttgggaggccaaggagggcggatcacaaggtcaggagatccagaccatcctggctaacatggtgagaccccgtctctactaaaaatacaaaaaaattagctgggcgtggtggcgggcgtctgtagtcccagctactcgggaggctgaggcaggagaatggcgtgaacccgggagggagagcttgcagtgagcggagattgtgccactgcagtccagcctgggtgacagagcaagactccgcctcaaaaaaaaaaaaaaatggaacaaagagtagcggggttttttattccccctcaaaaagtagaagaaagggtcttgagaaaataggggtgagtaggcataagacatgctaaaaagttgagtacagaggtccagatgcagagagcagttacacagtgtcatgggacagaaactagttggcagtggatccctcgctccattttctcacgtcagtatcccctgaagtcctgtcgctgaggcttctgtccccatgccaccttctccgtgaacacttgtttgttgtcgtgacttctaatcccaccttctcctggggattttcaaatgtctctctcatcccagtctcttgtctgccttccagacttttccagttgcccctcaatctcacagatcttcctcatttacatatctcgtcgcatccttttaaaaattgtgtgtaccattttccactagaatgtaagccccatgagatcggagaccatgattattttcttgcctgttcttggcaaaggcctcacatacagtatgtccgcaagaaatatttgtagaattagtcaatgattaaaatttcaaaatgaaacttttgaaattcccccccaccccagaaaatggtaaaccttttcagttctctatttcagctcatgggaggaccttctagcctcacctatctagtcattcaaccagaaacttaaaagtcatctgggtgtcctttttctccttcaccttccatatccagtcaaacaatctttttagttccctctaagtatcatggattcattagcaaacatttattgaaagcctgtatgataggccctaggctggtgaaacaggggaataccatactgacccgtcttcaagcccccaactattaatgttcatccacacagcccctcatcttcctttcccacctggacttgtctgattccttcttgactctctcagtctccagactggaccttttcccagtctctctgcaccctttggctgcaagacagacacatgtctatttcaccattctgtctcctctgcccagcgtagtacagtaaatgttaaaacaagtacttccagactgaacaaaggcctccccattacctgcagaatgaagttcagatattctagcatgacatgctactttcctactgctgcttaacagaaatttgtcatcttactgttctgtaggtcagaagtctggcatggcctaaagttaagatgttgattcctctttggagactgcgagtggaatccatttcctcaccttttccagtgactggaggccacccatattccttgctcatggccccctcctccatctagcaaaggcctgtggaatcctcatattgtatcattctgaactcttctgccccgcatttccacttttaaggacccttgtgattacattgggcttacccagataatctaggattatctcatcttaaggtcagctaattaataactttaatttcttatacaatcttaattctcctttgccatattatattcacaggttccaagaattaggacataaatctctttggggtgggggacatggttctgcctataccatatgtagtacacagtacctctcacaatctggtactaacttctttttttctgagatggagttcaatgccgtggtcttggctcactgcaaccaccgactcctgggttcaagtgattctcctgcctcagcctcccaaatagctgggattacaggtgcctgccaccacacccagctaatttttctatttttagtagagacggggtttcgctatgttggccatgctggtcttaaactgacctcaagtgatccgcctgccttggcctcccaaaatgctgagattacagatgggagccaccgcccccagctgacttaccttcttaacctcacttccaagcactttcttctaggttgtccacaatctagctatgcttgtctgtatgctgtttcctatgcttgacatgctcccttcatcccccaataaccccaccagcatcccaccttttcttcatgtccactgccttttaaagcctaattcacatttcctacctctgtgaagcctctcctggttttttctttgctcccttaatctgcatgctcgacgcgtacatgcctctatacctaaataaatagaaagcatgctgtggtaatagtgacttttttttgtgtgtgtgacggagtctcgctctgtcgcccaggctggagtgcagtggcgcgatcttggctcactgcaagctccacctcccggctgggttcacactattctcctgcctcagcctcctgactggctgggacaacaggggccgccacaacacccggataatttttttgtatttttagtagagatggggttttaccctgttagccaggatggtcttgatctcctgacctcgtgatcctcctgccccagcctcccgaagtgttgtgattataggcaagagccactgcacccggccatagggactcttgcttgcacatttcagtgtgttgtcagatgcttggattgaggttcgaagctaagttgttagacttaataatagactttgggacgtttaggagagttgtggtaatataaactaaaggaataaattggatgatgatgaggtagtggaggaagaaaatgttgcctgttttttggcccaagttgaaagaaaatgcaagaggctgaatcagtagtctgaagagagaagcaagcttaaggatgaacattaaagaccaagatcaagcagccaatagaaacagacattaagaaagggcaagaggaaaggaaaacagggaggggaaaggaagagggaagaggcatgctctacacatctatacagattagaaactacagggtgaccataacgcctggaaataggggcaaatggtggagtgtggttcagtcagttagtcctgtggttctgtgagtaagacagtttttttttggagacaggatctcactttggcacccaggctggagtgcagtggcatgatcttggctcattgcagccttgaccacctgagctcaagcaatcctcccacctcatccctgccaagtagctagaactacaggcacacaccaccatgcctggctaatttttttgtagagacagggtttcactgtgttgcccaggctggtctccaactcctgagctcaagtgcgcctcctgcctcagcctcccaaaatgctaggattacaggcataagccaccgagcccagcctagtaaggcagtttaatgctatgtgcaaaaatcgtaacatggtgcagttaacgcattccaatcaacccctgaacacgtacctgtgattcatctcttaatgttcactgaccaaacctgtaacttcagcatacccatgagacaaactgttttaaaattttgctttcaggatttccagtagcaagtgatatataaagatattaggtaggtatttaacagttatcacatccaggcctggcacggtggctcacgcctgtaatcccagcactttgggaggccgaggcgggcggatcacaaggtcaggagatcgagaccatcctggctaacatcatctctactaaaaatacaaaaattagccgggcgtggtggcgggcacctgtagtcccagctatttgggaggctgaggcaggagaatggcgtgatcccaggaggcagagcttgcagtgagccgagatccgccattacactccggcctgggcgacagagggagactccatcccaaaaaacaacaacaacaacaaaaaaaaaagttgtcacatccaaattttgaattcagggactttattttctttgaacccccacagccagcttgtttggaggcatcggaatgcagaactgttgcagttcagttgaaagcaatgccatctagtggtgtgtgtacagcaggtcaaatgttaagcgtagattttctagtagaaagtaaattatctttaggtcttgctaaaaaacattatgtttcaagtttgcctcttttaactgctaaaaagggcagctactaaaaactaggactcaaaaacctatttttagttcttccatcaaaatcttacaaatagaagagcttcagtatgcaaagtatttcttgcagttaaatttgtacattacaaaatgtctctggacggattcacaagaaactgataatgttggtggctgcctttggggagaggactgaggagcaggatttttcactgtatagctatagaatttttatgtgtatgaccgtattaaattgtttaaatacatgttactgaaatttttcttacataggtcatgaatgaaaaacttcagcactgcatggaactaacagatctaatgcggaatcacctgaatgagaagagggcactccgcttggagtggatgattgtcatcctcattaccatagaggtaagatggaaatgctctgtactatgatcagttaccatcttttcacaaatacaggggctatgctaataagatagtttgagatagaaaattattagcagaaaagaggctgactttgttatcattactaactctatttggaagtttcaaattactatttgcaaatgcattaaaagtaattcttgaaaaggttccactttttaaaatttgagagtagacctcaaggttctgcttttaaagacagcatttggaaaaagttctagctgtaaatttataatgtacagctcaacatcaaatcaagcacccgtacctccaattcataggttgccacgtgagaaagggcaaacatttaccttacttcaggagcatttctcattaatcacaatcttggaagtcattttagtttgtacccataatttgcccgtcatgaaataattctcactttctattctaaggtaatgtttgagctgggacgagtatttttctgatcaagtgataaccaaagtgtcactgcaagagatattcaagttctacaatcaaaaattaaatgttcggcccggcgcggtgcctcatgcctgtaatcccagcactttcggaggccaagaagggtggcttgagatgagatcaggagctcaagacaagcctggccaacatggtgaaaccccatctctactaaaaataccaaaattagccaggtgtgttggcacacgcccgtcatctcagctactcaggaggctgaggcaggagaatctcttgaacttgggaggcggaggttgcagtgagctaagatcacaccactgcactccagccagggcaacagtg

SEQ ID NO: 15777 - DNA, 33763 bp, Homo sapiens
agttggtaaatgacagttatgaataaagcaagggcagaaaaaaacatgtaggggagagaatgaggaactaggtccaggagatgctgaaactggataataaagacgtcatatcacaccccttggggtatccatctgagagcttgctttccattgccagcatgctggacagcagtgacagctccagtcagccccactggagcaacgagctcatagcggaacagctacagcagcaagtctctcagctgcaggatcagctggatgctgagctggaggacaagagaaaagttttacttgagctgtccagggagaaaggtaggctggaccttgaagagctctctcaaatgtggcatcctctacctctggtttgggagaagataacttgagccatcatttctttaatcccctcacttgatcctattcttttgtgggttgtaggtaactagaatgagaacactagcaatagatcagatctacaatcaggaaaacatgacacttacctacctctcatgtatactttttcctatataatgtctttccatttgagaagatgctagtttttgtttgtttgtttgtttgtttgtttttgaggtggagtttcgctcttgttgctcaggctcgagtgcaatggcacgatttcagctcactgcaaccttcacctcccaggtacaagcgattctcctatctcagcctcccaagtagctcggattacaagcatgcactaccacgcctggctatttttttttttttgtatttagtagagatggggttttaccatgttagttaggctggtcgtgaactcctgacctcagatgatccaccagcctcagcttcccaaagtgctgggattacaggcgtgcgccactgtgcccgacctgccagtttttaatttattatgttttttaaacgttcagtttattgaaagttttcttttgtttggtttggtttggttttgtttctgagagagtctcactctgtcacccaggctggagtacagtgatgcgatctgggctcacttcaacctctgcctcccaggttcaagagattctcctgcctcagcctcccgagttgctgggattgcaggtgcccaccaccacacccaactaattttttgtatattttagtagagacgagggttcactatgttggccaggctggtctgaaactaacctcaagtgatccacccgcctcagcctcccaaagtgctgggattacaggtgaaagccactacacctggctgaaagtattgaaagtgaatttctttgtcttttatccttctcatcattttagaggtaactggaatacttttttttttttttgccatccaattcttgaaattgagtagcaaattactattcttggttaccactgccagttcacccccgtcttaactcttggatctcaggagataggtatttggaacatttttaaatactgtcaaaaagaccttcatcttactactttttcctagcctggaccttaatatttagttttatcaaatttatatctcatcaagttttagtgtattcaaatagggaacggaaggaaaagaaatgtgtgaaatcaagaaaaatagaggcaagaaccatgtttaggagcacatgccaattagtatgtttgaagcacaaatgaagtcttgtaaggaccttcagggcaatctaatttaatcccttctctaatgcatgatggaaatgatctgctcactaaacaccgattacctttattccctgaaaaacacacacacagcctggtgtggtggctcatgcctgtaatcccagcacattgggaggccgaggccagcagatcacatgaggccaggagtttcagaccagcctggccaacatggtgaaaccccatctttactaaaaacacgaaaattagccagtcgtagtgtcgtgcgcctgtaataccagctactcaggaggctgaggcacaagaatcgttgaaccctggaggcataggttgcagggagccaagatcgcaccactgcactccatcctgagtgatggagtaagactgtctaaagagaaaaacacacacacacacattggaacacagaaatgcccatcctccatccaggccagggtgggtgtgaagatgggtgccacagagagctagtaacctagaagtcagaatggagtgggggtggagttggtgagatactggtttcgatgctgctgtcaaaaagtttggattaccctagtcaagtgattccctttctgttttgtgttgttattgttattccactttccactctaccattctgcaggtgtcttttgttttcggagtgcaagtagtatcacctcagtttactgagtcaataagctagagtcctcctctgtagaaataatagagaattgcttctcaaatttataacattaattaaaccttagtgggaagattaaattcacacttgatccaactctgaccatggtgataaataactacagaatttcacatttctggattatttttccccagcccaaaatgaggatctgaagcttgaagtcaccaacatacttcagaagcataaacaggaagtagagctcctccaaaatgcagccacaatttcccaacctcctgacaggcaatctgaaccagccactcacccagctgtattgcaagagaacactcagatcgaggtaagagcctctttaaacaaactagtccactctgcagagagatctctggcaaatatctctagggaagatgatgagattagaaaactaactaaataatattttgtcctgactgaggacactctttttttttttgagacagagtctcgctgtcgcccaggctggagtgcagtggcgcgatctcggctcactgcaggctccgccccctggggttcacgccgttctcctgcctcagccttccgagtagctgggactacaggcacccgccacctcgcccggttaatttttttgtatttttagtagagacggggtttcaccgtgttagccaggatggtctcgatctcctgacctcgtgatccgcccacctcggcctcccaaagtgctgggattacaggcgtaagccaccgcgcccggcccactctttttttttttttttttttttgagatggagttttgctcttgtttcccaggctggagtgcaatggcgcgatctcggctcactacagtctttgcctcccaggtttaagcaattctccttcctcagcctcccgagtagctgggattacaggtgcttgccaccacagccggctaattttttgtatttttagtagagacagggtttcgccattttggccaggctggtctcgaactcctgacctctggtgatccgcccaactcagcctcccaaagtgctgggattacaggcacgtgccactgtgccctgcttgaggacactttttggaaaactgtgagaaggcagagcgtagagaacttcatgagctccacccatttcttccactctttgcagctcataaaatttagaatctttttcagatgaggacttgaaaagatctgtggaagagcaaacagccattagtggctgtatcatctcccttcactgctgctactgaacatgagaactaggggaaagagcacttgtgaagtcatacaggtccttgtttacattttggagtagtttctgctgctggcattttactactaccaacaactgttttatggagaatcattattactttacctgtcatatttatactcccttttaccaatgcgtttccctctacagccaagtgaacccaaaaaccaagaagaaaagaaactgtcccaggtgctaaatgagttgcaagtatcacacgcagagaccacattggaactagaaaagaccagggacatgcttattctgcagcgcaaaatcaacgtgtgttatcaggtgcaaggaaagatggtacaggaaggggatggataacaggaacgtgggaaccactcacaggactgggaatgaagcaagacctaagtttccagggctgataccaggtgatgtgctatcctgagcaaacacacaatggctgtcctttgaagaacttgaggactcacacatgcccacggcaccttggcactaggagccagtgatggggccagcccatgccaatggcaagcgtaaggcttctgggttcaaattttgccagtcctaggaaccaccctacctcaatgatagcacaactagtcttggaggggtctgcaaggaaatcaaaccttcttctagtgggtgaacctgcccagctaaggatagcagtcttcttgacctagccagtgccacattttttatgctctttggttttaggccactgagatagaaaagttcagacattattttgtttcaggaggaactggaggcaatgatgacaaaagctgacaatgataatagagatcacaaagaaaagctggagaggttgactcgactactagacctcaagaataaccgtatcaagcagctggaaggtattttaagaagccatgaccttccaacatctggcaagtcttagtcctttgttctcctcacttcgggacccttccacagctaacgcctgtgttccactctgtgtacttgtcaagaagggtgcctctcatacccttagcatatgacttatccttcttgttctttatcctatcatttttgttgtttttttttgcttgtttgcttttgagatggagtcttgctctgtcactcaggctggagtgcagtggtgcgatcttggctcactgcaacctctgccttccaggttcaagcgattctcctgcctcagcctcccaagtagctgggatgacagttgtccaccaccatgcctggctaattttttgtatttttagtagagatggggtttcaccatgttggccaggttggtctggaacttctgacctcaggtgatccacctgcctcagcctcccaaagtgatgggattacaggtgcgagccactgcgcccggcccatctttgttgttttaatacatgttagcagcttctttccctccatcatgtttttctgatttctctgtagagtttcaagtgggcccagcaattgcttccaggggcttaattctgttgtgagaatgagtatcactgttggctctcagggtggtggtgtaacacacaatctctctctctctctctcattctttctctcttgctcctctcccctgtccctctctcctagtcactgtttcctcaaagcagttttagtcggataatagaacttcatcactcatctcctgttattcttgtcagtgatttctctcttaaaagctctaaaatctttgttgcaatttgaggatgctgacagtgacagggcagctggctggacactgaatgcaagtttcatattgtggtgcctcctatacttagtgtagtcactgctgaccagagcctggtctcaggcttgtttgtcaagacacttggctttgttattatacccagtggtgaaagatctgactcacgaaaaccaaattaaccagaagctgatatttaaacccaaatgtttgttattttacaatagtggctattccactgcttccatgaggaacttggaaccacagttcagggcagccctctttcgggaagcaaaatcagtaagtaggtttcttagtgagcatggaatagaataaagggacatggctgggcacggtggctcacacctgtaatcccagcactttgggaggacgaggcgggcggattgcctgaggtcaggagttcgagaccagcctgaccaacatggtgaaaccccatcgctactaaaaatagaacaattagctgggcatggtggcgggcacctgtaaccccagatacttaggaggctgagacaggagaatcgcttgaacccgggaggcaaagttgcagtgagccgagaccaggccattgcattccagcctaggcaacaagagcgaaactctgtctcaaaaagaaaaaaaaaaaagaataaaagcacataagtgtctctgggccgtgatttatccatgtcagcgtgagtctgataaaagatcactgcttctacctacgtctgaagatttatttgctttagctaatagttctttgatcactggtaagactaaagagtttttctatgttcaccagttatttgtattattccttttgagaattgaccgttcctatcctttgcctacttcttaacagtatcctattgatttatagaaattctttttatgctgagattattactcctgcatcatgtaatgcaaaattttaagtatattatatttaattatattaatcttgttaattaagaaagtagtctccttattcgtgtgtgtgtgtgtgtgtcatgaagacattccgatgtgtccagaatattttattctactgctttaactcttaaaataggaccttcggcagcagcacactgtgttgactcaaatattccccaatttgaagcaggctatatatcaaagtttctgattggttggacttgggagataatacccagatttgctagactgtctacctatctttgcgtcccactgccaatatttcctacctctttccagtaagtctcttttcccactttttactccattactctttaacttataatgtactttttgccttcttatgttgaaaccaaattctgaacagaatgaaagatctcctgactgacctggctagagaaggagaagcatttcttggtgggactcaatgtaatgtcatagacactatgtctgcaacttgctattatctccacggccaatataccaaacttgtagaaatattcatgtttttgtgtttctagtacttctcttatggaattaccagttaatcatagggccacgatgtacaccaaaacaatgtcatatataagataaaatgtgcccccagtgttttcctaagtttagcatctactttccagtcactccttttgtaccttctccctaaagctggcattggattatttggctatcggaattcaatgctcctggttgtccttctgttgcttttccttttgaatcacgtggtttcttgaaataatcacaacttggacttccaccatgtgttttatatttcttttgtccaccctcctctaccctaagaaagagctccctaccctttaacggataggcagctttctttcccctctagaacagctcaaagatgttgcttatggcacccgaccgttgtcgttatgtttggaaacactgccagcccatggagatgaggataaagtggatatttctctgctgcatcagggtgagaatctttttgaactgcacatccaccaggccttcctgacatctgccgccctagctcaggctggagatacccaacctaccactttctgcacctattccttctatgactttgaaacccactgtaccccattatctgtggggccacagcccctctatgacttcacctcccagtatgtgatggagacagattcgcttttcttacactaccttcaagaggcttcagcccggcttgacatacaccaggccatggccagtgaacacagcactcttgctgcaggatggatttgctttgacagggtgctagagactgtggagaaagtccatggcttggccacactgattggtaagtgccgttggcttcctgcggctcctaagcaccaatgcagaatttcccaaagcctacagttgcttttctggtggtttcttattttcttcctttgtcttgttcttgatccttgccacaccatctgtattccccctgctttcacactttctgctacccaggagctggtggagaagagttcggggttctagagtactggatgaggctgcgtttccccataaaacccagcctacaggcgtgcaataaacgaaagaaagcccaggtctacctgtcaaccgatgtgcttggaggccggaaggcccaggaagaggaggtgagaaaaaagatgtgccgaggcatctcagaggagcctcagccaaacagctcatgagcacagttcagtcttccactctcaataagtgtttgttgaatgtgaatgaaagagaaaactgtcacaccacaactagtctggattattcccttggtcaggcttgagtctgaaatgaaagtatgcctttggagcgagctacatccttcatccttgctgtgaacagaatagcttctctgtgccattctctaagttaagtcgtgagtgccagtatctccctgaaataactgccagagccagtttgcaggcaggtgaagatcattaggtttcttcctgatccagttgggatagctgttctctagatcatagctcttcctcaccacagatcctaggcttcacctacaacagtctcaagctgcccttttcctcaatccatgaccaacatctttccagttcagatcggagtcttgggaacctcagaacgagctgtggattgaaatcaccaagtgctgtggcctccggagtcgatggctgggaactcaacccagtccatatgctgtgtaccgcttcttcaccttttctgaccatgacactgccatcattccagccagtaacaacccctactttagagaccaggctcgattcccagtgcttgtgacctctgacctggaccattatctgagacgggaggccttgtctatacatgtttttgatgatgaagacttagagcctggctcgtatcttggccgagcccgagtgcctttactgcctcttgcaaaaaatgaatctatcaaaggtgggagttcgaggttattacatcttcacgccctcttcccagtgttgtctccctgtcctgattctacttttctttgattacttgcttgaaacagtctctcttaaaacctgaagataaaggatttagaatattgtcaagagcaacagagcagaagacttagagcctcactacttgtgtggaaacactggcttcttctgcttcttttcagccacaaagacaacattcctaagtgggtagagccagcaacctgaattctatacctctgtatctgaataaacttctttgttttttgagatggagtttcgctcttgttgcccaggctagtagctgggattacagacatgcgccaccacacccggctaatttttgtatttttagtagagatgggatttctccatgttggtcaggctggtcttcaactcccgacctcaggtgaacctcccacctgagcctcccaaagtgctgggattacagacgtgagccaccgcgcctggctgaacaaactttttcaagctctgtaatgctgtctagtatctgtctttactaaaggcctgttgtttcttagtgcatgactacatagatatctgattataaactgagaccttaacactcccccatcattctctcacttcttttaaacactggacacaagttagagagatttccacaccagatcatgacaaacacaaatttcttggattttttttttcctcccaatgtggagctgagctccatactgtctttcctaacttttatacctaggattgtgggggtgtaccaagaggggtcaactctttgactacagtcctgggagggtgaggtgggggtatccatgttttccttaggaagtggggatagctgcagtcagaaacaaccatatttaacaagattctggatgctccaggacatgtatgcagctctctcctcaatacaactgcttaaaaaaaggctgacacttctggacacaactcctttgccaaacaggggaggcagtataagccacctgttaatcagtgttacaaatcagacatctggcatttcgaaagagccattttgcttaagttttcttgggaccacttgagggtagaggtaacagttttcttggtacaactaaggcacagtaagcatttgataatagtaataataatgcagccttgttcattggctggatgactgatgacaagcaagctgtactccttttcatacacccttcactatctcttcctgaatcctagagataacccatcttccctgattaatattctaactgcactgctgtttgattttacttctgagtgtatcatcatcgtaattatttaatggatgttaattaattgctgataaaatatgttgaaattaaaaatgggaaggaagtagataaggtgctgacaaatgctcacttgcttatttcatgtgatcaggtcttattaatatctgtttgtttctcaggtgattttaacctcactgaccctgcagagaaacccaacggatctattcaagtgcaactggattggaagtttccctacataccccctgagagcttcctgaaaccagaagctcagactaaggggaaggataccaaggacagttcaaagatctcatctgaagaggaaaaggcttcatttccttcccaggtaactctccaggactccacaggtagcagatctctgccaatcctatggagcagatttgaaggagacagtattatagttgaagtaggtgcagtggctcacgcctgtaatcccagcactttgggaggccatggcaggcgaattacctgaggtcaggagttcaagaccagcctgaccaacatggggaaaccctgcctctactaaaaatacaaaaaattagctgggcgtggtggcacatgcctgtaatcccagctactgggaggctgaggcaggagaatcacttgaacctaggaggtggaggttgcggcgagccgagatcacgccattgcactctggcctgggcaacaagagcagaactctgtctcaaaaaaaaaaagaaaaagaaattccctctgtgagtgtcatgtgtcctgtgaacttaatatatatccctcataatgccatgagactactgatggagcgaaagcctgggttttactgcggaaaagagagagaaatagcatttctcagctccatgaggagagaaatgaagtctaacactagttcccaaatccctttcttgtgtttctaggttgttaaactaccagcttgtaatgctatctctgatctttctattcaggatcagatggcatctcctgaggttcccattgaagctggccagtatcgatctaagagaaaacctcctcatgggggagaaagaaaggagaaggagcaccaggttgtgagctactcaagaagaaaacatggcaaaagaataggtgttcaaggaaagaatagaatggagtatcttagccttaacatcttaaatggaaatacaccagaggtaagaccttaaaaactctgaagcactaaattgtgggttgtagtgtccccagatgtattattctcagaggtagaagcagaagcagaagcagacacacaagataagcactaatcggccgggcatggtggcttcggcctgtaatcccagcactttgggcagttgaggtgggcagatcacctcaggtcagcctggccaacacggtgaactcctatctctgctaaaaatacaaaatgaggcctggtgcagtggctcacgcctgtaatcccaacactttgggaggccgaggtgggtggatcacctgaggtcaggagttcgagaccagcttgaccaacatggtgaaaccctgtctctactaaaaatacaaaaattagccaggcatggtggtgtgtgcctgtaatcccagttactcgggaggctgaggaaggagaatcacctgaagctgggaggtggaggttgtggtgagctaagatcgcgccattgcactccagcctgagcaacaagtgagaaactccatctcaccaaaaaaaaaaaaaaaaaattagccaggcatggtggtatgtgcctgtaatcccagctactcagtcgggaggctgaggtaggagaatcgcttgaacccaggaggcggaggttgcagtgagctgagatcgtgccactgcattccagcctgggcgacagagcaagactccatctcaaaaaaataaaaataagataagccataatcatagctaattgtggctagcttgtgtttccacaaacacaagtagtttaacaaacccctggactgttcatttcaatgtaatttaattcagcatattatgtactctacagtttatgcttaaagttttaatactatatatatttttaaacaagtactcactttttttttttttttgagaccgagtcttgctctgtcgcccaggccagagtgcaatggcatgacctcggctcactgcaacctccgcctcccaggttcaagcaattctgctgcctcagcctcccaagtagctgggattacaggcacgtgccaccacacccagctaatttttgtatttttagtagagacgaggtttcaccatgttgatcaggctggtctcctgacctcaggtgatccgcctgcctcagcctcccaaagtgctgagattataggcgtgagccaccatgcccggccaacgagtactaacttttaaaaattaaaaagagccagtattgtctgggcatggtgactcacgcctataatcctagcactttgggaggctgaggcatgcggatcacatgaggtcaggagttcgagaccagcctggccaacatggtgaaaccccatctctactaaaaatagaaaaattagtcaggtgtggtgacgggctcctgtaatcccagctactcaggaggctgaggcaggagaattgcttgaacccaggaggcgaaggttgcagtgagccgagatggtgccactgcactctggcctgagtgacagagggagactctgtctcaaaaaaataataataataaaaattaaaaaaataaaaagagctaatatttaaaaagaaggcaggaaggaaggaatgaagaaagaaaaccaagatattaccagctatgtagtattgttgttcttattctgaagcaggtgaattacactgagtggaagttctcagagactaacagcttcataggtgatggctttaaaaatcagcacgaggaagaggaaatgacattatcccattcagcactgaaacagaaggaacctctacatcctgtaaatggtattgtcttttaaaatctattttttttcctagcactttgggaggccgaggtgggcagatcacgagatcaggctttcaagagcagcctggccaacatgatgaaacccgtctctactaaaaatacaaaaattagccgggtatggtggcaggcgcctgtaatcccagctacgtgggcggcggaggcaggagaattgcttgaacccaggaggaggaggttgcagtgagccgagattgcaccactgcactcctccagcctgggcgacagagcgagactccatctcaaaaaaaagaaaaaaatatatattttttctgtttaatcatttaattgttttgccaagctagttatttacttttctccttcaccttagaatgctaaagttttcatggaaaattagtatgtaagacctgaggcccagttttgtgttacaagtgtgatggttgggttaaccaaggctggaattcttaaataagtaactttctcagtgtttataaaatgttattttgccccaggatttttttgttttgttttgttttgtttttgagatggagtctcattctgtctcccaggctggagtgcaatggcaggatctcagctcactgcaagctctgcctcctgggttcaagcaattctcctgcctcagcctcccgagtagctgggattacaggtatgtgccaccatccccggctaattttgtatttttagtagagacaggttttctccatgttggtcaggctggtctcaaacttctgaccttaggtgatccgcccacctcagcctcccaaagtgctgggattacaggcgtgagccactgcacccgacctagttttgattttctcattaaaactgtttgttggctggttgtggtggctcatacctgtaatcccagcactttgggaggcatgggcgggtagatcacctgaggtcgggagtttgagaccagcctgaccaacatgatgaaaccccatctactaaaaatacaaaaaattagctgggcatggtggcatctgcctgtagtcccagctactggggaggctgaggcaggagaattgcttaaacccaggaggcagaggttgcagtgagctgagattataccactgcactccagcctgggcaacagagcaagactccgtctcagtacaaaaaacaaaaaacaggacagtgtttgtcttgattattgagtttttggcaccccttcaaattttatgcctaaggtcagtgcctcacatgccttcctctacttctgacagtggtcagaatagtggttactgctaggagaaggggaagagggttatcaggaaaggacaccctttgggcatctggagtgctaccagtgttctatttcttggctgaacggtgatagagatgttcattttacaacaatttaataagttgaacatttatatttcatgggcttttctatgtgcttgaaaaatttaataatgagaggaaaaatataaaggtagatatggaaatattatgaaaagagagtctttactacttaaaaaagctttttttctaaatctctagaagcattttatatatatataattttttttttttttttttttgagatgaagtctctctctgtcacccaggctggagtgcagtggcacaatctcggctcactgcaatctctgcctcccaggttcaagcgattctcctgcctcagcctccagagtagctgggactacaggtgtgccccactatgcccggctaatatttgtatttttagtagagactggatttcatcatgttgtccaggctggtctcgaactcttgacctcaagtgatccacctgcctcagcctcccaaagtgctgggattacaggtgtgagccaccacgcttggcctaaaagtataatttttaagcttttgaatgtatttggcataacttcttaaatgggaagagcataaatgatttttctcatgagaaggataatttttctattgattatgtaatctgatttctccgtcaaagtttactcaatgtaaggaaggttaacaagaataaccaagcccaaaatttcccagagccaaatttacatgactggcaagaaatcctggttataagagaacaattccattcttatgatttgcagacaatggaatattatttagtcataaaatagtagaataaatagtaacagtgtatctagatagcttcagtgtatccagacctgaatgcggggttccagttatctccatactcccaatttacatttcttcaggtatttgattgagtataatctatatccactagctttttctccttgtagaatgtgaaatatgggaccagaaggtaatctaaacctcatgtactatatggtcatctatttatagtcataaataataaaagaagactatttctgtggaagcctaattgttagttattgttttaatatcgctgttctccatgaatttcaaaagatcaagactggccaggcgcagtggcttacacctgtactcccagcagtttgggaggcagaggcaggcagatcacctgtcaggagcttgagactagcctggccaacatggtaaaaccccgcctctactaaaaatgcaaaaattagccaggtgtggtggtgggtgctggtaaccccatctgagaagctgaggcaggagaatcgcttgaacctgggaggcagaagttgcagtgagctgagaccatgccattgcactccagcctgggcaacaagagcaatgcttcatttcaaaacaaaaacaaaacaaaaacctcaaaagcaccagttagtactcgcaagaagctaaaatctgcctggtttcagatgtctgagtggagctatcaagcaggatgctgtagttgttgaaaaagaagcttattaatcttttagacaaagatctaagggtattaggtaaaggccatcaagaaatgaaaagggcctgattttaaggccatttccacatatgtagacaaagccttgtgtcttttagcagcctttgcttttgctgcccgctcagaccttttccctttgagacctcagtgaaacagacaacccaagactttgaaattttacagaagaggcacagcttgccatccagttatctaatgctatgtaacaatctactccaaaacttaatgacttaaaacaattgtcatttctttggctcactactcggcatgttaggcaggtctcatgaagaaggctcatttctcctctctcaatgtggcattagatggggtagctcagctagggggctgatgggttcatcttgcaagatagctcaccctactagctgatcaggtggtcctggctgtcagtggttgcttgggcttcctcacaggttggtagctgagttccaagacagcaaggtacaagtccatggcatttttgtgttctggccttagaagtcacatagcatcactcctaccgtactctttcagttgagacagtccaaaagatccaccttaattgaaggggaggggacaaagaccccaccactcaataggagcagcgtcaaggtcagtcgcattgtaaggagagcagctgagataggagagaccatttgaggccacctttttttttttttttttttgagacagagtctcttgtcgcccaggctggagtgcagtggctcgatcttggctcactgaaacctctgcctcccggattcaagcaactctcctgcctcagcctcccgagtggctgggaccacaggagtgtgccaccaagccaggctaattttgcatttttagtagagacggggcttcaccatgttggccaggctggtctaaaactcctgacctcaggtgatccacctgcctcgaactccaaaagtgctgggattacaggtgtgagccaccacgcccagccagagaggccatctttggaaaatacaatctgccccacccaattgcacagctttacctcaagcttggccattttcttcagcccccacaaaaggacttcctttcttccttccttactctcacccttccttcctgtcttccttcctttcttcctttctgtttttccttctttccctttctttttttgagaagtgaatcctgtatgtttggcaagcttctgaataagtgtacctttgaaaaagagggtttgattcttagtaagtgaaggcaaaatctagacactcggaactagtgaccagacagtggattggagatgtgtgtgctgggtcttttcttgggctaaagtgctttgaaacagttctataactgcaacctcttctctagcagacaaagaatcctctgaacaaggttctgaagtcagtgaagcacaaactaccgacagtgatgatgtcatagtgccacccatgtctcagaaatatcctaaggcagtaagtacactggagtaatcattgcatacgagataagacgataaataatgacagtggccagtcatgggggctcacgcctgtaatcccagcaccttgggaggccgaggcaggcagatcacctaaggtcgggagttcgagaccagcctgaccaacatggagaaaccccatctctactaaaaatacaaaaaaaattagccaggcatggtggagcgtccttgtaatcccagctactcaggaggctgaggcaggagaattgcttgaacccgggaggcagaggttgcagtgagccaagatcacgccattgcactccggcctgggcaacaagagcaaaactctgtctcaaaaaaaaaaaaaaaaaaaaaaaaagcaataatgacagtgtgcttagtggccacacaagtgaagggcaatccagttttaatgaagctgatggaaaatgcaaattgtttagttaaatttatgtttcgtgtgaatgaaggtcggctggtacagtcagataaaaggatcattttcttgagatagtgtaaatgatgacttgcttcaatacttctgtcctatctggatcctttgcctcttactcccatatcctccattgtgtcctgtaattcatgcccagcctgaatggtacccctgcctttaagtccatctaaggaaaacgggtttgctttgggagatggagtctggaagagaggacaggattcttcatgggagggctcatggagatcattccatttctgctgttttttactcaacctgtaattatctattaaacagttcagcctcaaagctctttcagaactgatttaagagacacgcatcaaaaaaatataaaaaagaaaaaaaagccggttgcggtggctcacgcctgtaatcccagcgctttgggaggccgagacgggtggatcacgaggtcaggagatcgagaccatcctggctaacacggtgaaaccccgtctctactaaaaatacaaaaaaattagccgggcgtggtggctggcacctgtagtcccagctactcgggaggctgaggcaggagaatggcgtgaacccaggaggcagagcttgcactccagcctgggcgacagagcgagactacgtctcaaaaaaaagagacacacatatattaataaatatccacacatatattcagtaatcattgtgttctaaccttgtgggttacacatgaggtagaaaacaattactcttaagtcgctgctgcctgacacatttgtaggtcctcaatatttgttgagtgagtgactgaataatagattcagagtgaattgatgattatgaacttcattagaaacattaaataagaatgtaggatgacctaaaaccaaggaggtagattgtgtaatataaagtctgttgtaagaaatcagaaaagggaatttatggtttcttttgtagaggttggaaaactcttccttgaaagctggaacatgtgcttgagaactgcaggaaaatgaaggatattggagtgaggagaaaaaactcaaagtcagtagacttaaacactgaatataacacatagttcaatttcagctgaggtgtggtggctcacacttgtaatcccagcactttgggaaactgaggcaggcagattgcttgaggccaggaatcaagaccagcctgagcaacacagcaagacaactgtctctacataaaatttaaaaactagctaggcgtgttggctcacatctgaagtcctaagtatttgggaggctgaggtgagaggattgcttgagcctgagagtttgaggctgcagtgagccatgatcttgccactgcactctagcttaggtgacagagagagaccctgtctcaaaaacaacagcaacgacaaaaccagttaagtttctctttgtctgaacttttatctatcatatctttttttagatattatgtagttatctgacaagtgtttgtaagacagactggagccacagaatgttggaattagataacacttctatattaccaaggtaaagaagattaaatgatgtgtacaggattattgagttagtgaaagagctgaaactccagttgaggtttttaaactgcgcaacctctcaagtaaccaaaaaaagcagccagctgatcagcaaactcatcttgaactgtaacaagccagccagatttcattaaaaacattacctaaattaaaggctcctaagtaagatatccttttagaaaacttccttgtgtgccccaaagtgttacttgagaaattaaatatgagaaaggagcctatctaagcaaaaaattagtgttattatcaagttaaacgtacaacacaggcacatatatattaaattattgttatattccaaaatgtccaggcatgaaaggtagagggggttgaaagctcagagtcaaaacttgagttctgtcactcttctgcctggggtcagctgggataaatggaaatgcagtagagtgtaatgtttaagagcatggagatttggttgagacagtgatttagatcccagctctgctacttaactagatatacagctttgagagagttttttaacctctattaggccttgtctccttatctgtaaaatggtagtattaagtatacccatctgatactgatgtggcaagattaaaataagggtttaatacagtgcccgagacaaattaagccctaaatgatagtgaggatgagtgtgatgataatagtagtctcatttctctgacctactggagttctcaatgttaagctttttttttttttttttgagatagagtcttgttctgttgcccaggctggagtgcgtgcagtggcgcaatctcggcttactgcaacctctgcctcccaggttcaagagattctcctgccacaggctcccgagtagctgggaccacaggtgtgtgtcaccacgaccagctaatttttgtatttttagtagagacggagtttcactatgttggccaggctggtctcaaactcctgacctcaggtgatccacccacctcggcctcccaaagtgctggaatttacaggtatgagccactgcgcccggcctaggttaagcatttttttttttttttttttttttttagagtctcgctctgtcacccaggctggagtgcagtggcaccatcttggctaactgcaacctccgcctcccgggttcaagcgactctcctgcctcagcttcccaagtagctgggactacagacacacgctgtcacgtccagctaatttttttgttttgagacctagtcttgctctgtcacccaggctagagtgcagtggtgcgatatcggctcactgcaacctccgccccccaggttcaagcaattctcctgtctcaccctcccgagtagctgggactacaggcgcacgccaccatgcctggctaattttttgtatttttagtagagatggggtttcaccgtgttagccaggatggtctcaatctcctgacctcgtgatctgcccgcctcggcctcccaaagtgccgggattacaggcgtgagccaccgctcctggcctccctcttcttaacagttactaatgaggagggagcaatcattttcatttgctctatggtcccagattactgtttctttagcaatagtgaatatcgagaacctcaaaattttttctcttatcgtgtcaatttcaggtgtcaggaatttcctgacccttatgtatgccaggtagtaagttttggcagccctgccccccagccaaattaggtggcacatctgagctaataagccaaagggtgttatctggcactaatccttgcagggtttctgccagcaagttcaaatgagttgatatatatttcaatggttaatattactaattgcatactttctttgctgttcagccccaataaaattacataatggaattagctcatgtaaagaaagtattctgaatccaacaaaaaatattagattgaaccatatattgtcatactcatagataaaaaatggttgacaattgtcagttctgtatagtccaacctaatatgaatgaataaaacatctgtgtgtacttggatcaaattttaatcttattcatcctcccatttcaccattgttaccagaataaacttgatgtagtctgcatgaatatggacttctgattattgtcccaggattattagcaagtttaaaaaatttgctgggtgtggtggctcacgcctgtaatcccagcactttgggaggtcgaggcgggcggatcacctgaggtcaggagttcgagacaagcctggccaacatggtgaaaccctgtctacaaaaatacaaaaattagccgggcgtgatgacgggtgcctgtaatcccagctactcaggaggttgaggcaggagaatcgcttgagcccaggaggtggaggttgcagtgagccaagattgcaccactgcactccagcctgggcgacagagcaagactctatctcaaaaaattgttttgttttgtttttttaactaggcaggtgtggtggctcacgcctgtaattctagcactttgggaggccgaggtgggctgatcatgaggtcaggagatcgagtccatcctggccaacatggtgaaaccccgtctctactaaaaatacaaaaattagctgggcgtggtggcgcgtgcttgtaatcctggctactcgaaaggcggagaaaggagaatggtttgaaccaaggagtcggaggttgcagtgagccgagatggttcccctgcactccagcctggtgacagagcgaaactcggtctcaaaaagaaaaaaaagaaaaataattttagatgtacaggaaggtgctatgtaatgtttatttagttttactcttttttcttcttttttggtaatgttatgaaacatgtatttttcaatcaataatgttttggggttctatccatgtcgatatatttagctttttatagttccttcgtcttaactgctgatcgatattgcattaaaataatacatgacctttcgtttagacagaactctaatgggtaatgattgagatttcatactgtgtgccaagtgcttgatattcatgactctctcgggcttcacagcagccttatgagttattctttccttcaagtaattatgaagtgcctgttttagtaactgccgggctctgtgggcacaaaatggtggataagacagacttggtctcttctctcttgaatcttacatactactgagggaaaatatgtacatcagtgagcaaataagtaaagcagatagctctgagattctaagtactatgaaggaaataaatagggcgatataatagcaatgcgaggagttgaactaggataggtgttgaggaaagatttctctgaggaggggacgtttgaactgaaatctgaagaacgagaagggaagagctacccatgtactgggtagactgtactcatctcaggcaaaggaattggtaagtgtaaaggccctgaggtaggaaagagtttgatttacctgaggagtgggaaatcaaaagaaaattaaagtttctcttgcacacatgtatattattattcccccaccccctttcaaaggaggacagtgaagtctagggagaagagcttgctcaagggaatatttaatacagttttactgagtgtatactgtgtgccagacattatgccaggcattgtgccaggcactagatactcggtagagactttaatggggccgggcgcaatggctcacgcctgtagtcccaacactttgggaggccgaggtgggtggatcacttgaggccaggagttcgagaccagcctgggcaacatggtgaaaccccgtctctactgaaaatataaaaattagtcgggcatggtggcacatgcctgtagtcccagctactcaggaggctggggcaggagaatcgcttgaacctgggagtcagaggttgcagtgagccgacgtcgcaccgttgcactccagcctgggcaacagtgctagactccatctctaaataaataaatacagattcccaggagccactctagacagtctgatataacacagaggcttttatacattttttatagcaatcactatgagaaatacatttctgcagtatccaatactcttataaaagaacaagtttcaagaaaccaggcttactattaacatttgccatgcattctcctattccactagatagtgtcttatcctgtctatcctatcctattgtttcttttttaaaaagctagtgaaacccgctaatctgacccatcaaagtgtcaaaaaaaaaccagatttttcaaaacactgtatagtcaatagttttcttgatgtttgggagagttggatgttatgggagggttattaagagaaaaacatcaaatatcgtttttttgtttgtttgtttgttttttgagacccagtctcactctgttgcccaggctggagtgcagtggcactgcaacctccacctcctaggttcaagtgattctcatgtcagcctcccgagtagctgggattacaggcatgagccaccatgcctggctaatttttgtatttttaatagagatgcggtttcaccatgttggccaggctggttttgaactcctgacctcaggtcaactgcccgcctcggcctcccaaaatgctggtattacaggtgtgagcctctgcaccccgccaaatatcttcatttttaagaagcaccccagatgattctgatgcagaatcattgagagatcttgcctgctgaatttcttaggggcaggcacaggagctccacttgctttctaagagaagaaaagatggggtaagagccggtctttggagaagtaagggcattggcctggccagctagtgaaaagaagcatacaggagggcactcacagatagaggggagagcgctatggctggtagggaaccatcctggattgactcattactggtgtcacgatactgacttgcctgccacactgtggaaggaggagacttctgttggccttggtgtacttctggaaacttcctcctggtatccctgatgccaacatggacacagggacaattaaaagaaaggacagggtgatggcagcgactgtgaagtgggattgaaaatattggagttcctggccaggcgcggcggctcacgactgtaatcccagcactttgggaggccgaggcgggtggatcacgaggtcaggagatcgagaccatcctggctaactaaaccccgtctctactaaaaatacaaaaaattagccgggtgtggtggcgggtgcctgtagtcccagctactcgggaggctgaggcaggagaatggcgggaacccgggaagaagagcttgctgtgagccgagatcgtgccactgcactccagcctgggcgacagagggagacactgtctcaaaaaaaaaaaaaaagactggagttcctgtgggagggcagggtggtctggtggcctcctcagtggcatgcacttgagtgggcatgggaagccctgggcagctctttgctatagtggctgaagcagctactgaatctccagtatcagtcaggaggtcttttaggtcctaacctcaggaaaatactagcttggttttcatgaagaacactgtggccagttgcagtggttcatgcctctcatctcagccactttgggaggctgaggtggacagattgcttgagtccaggagttctagaccatcgtgggcaacatagcaagaccatatctctattaaaaaaataaaaataattgtccctatgtggtggtgtacctgtggtcctagctacttgggtgactaaggtgggaagactgcttgagatcaggatgtcaaagctgcagtgaaccatgatcacacaactgccctccagcctgggcaacaaagcaagactctgtctcaaaaaaaaaaaaaaaagttgagaaatagctgtttagaaatttatttatttgtatataatcatcgggtacaagcacagttttgctgcatttatatattccactgtggtgaagcctggagcgacgcacattgttcccaccaagcaacctcccatcatccaccctccccgccgctccgaatcagacatttttttttattctttctatatgtggagatgactgagaaaggctgtcctggagaaatgatccactggactgtgagagagaagagctgggttctctttataaatttcctatcaattaactatggcaattaagtcaagttgtcttttgatgccagttttacctataaaaggattctcagggaataatatagtagatagattatacctatggttgatttctagagagtaccgtaatgggttaattggatggcgtataagcacttggagcctcactaacctttaggaactaaataaacattttccttatcaggattcagagaagatgtgcattgaaattgtctccctggccttctacccagaggcagaagtgatgtctgatgagaacataaaacaggtgtatgtggagtacaaattctacgacctacccttgtcggagacagagactccagtgtccctaaggaagcctagggcaggagaagaaatccactttcactttagcaagggtgaggcatcctgtgtggttactggggtgaggaagtctgatgaacattgagactgagggtcagaattactctggatttttgtggggtgaatccagccatttcactttattattttattgttcaaagtgttgtgtgcatgtggtttaaaaacatcgaatggggctaaacattttacatgaagcaggcctttgtcccagctcttcacagatcacttcgcctgttcccacccttcctcaatccacggcttcccacatttcagctatatttatttttactttttgaggtggagtctcgctctgttgcccaggctagaatgcagtggtgtgatcttggctcactgccacctctgactccgagattcaagcgattcacgtgactcagcctcccaagtagctgggattgcaggtgtgcgccaccgtgcctggctagttttttgtgtttttagtagaggcggggtttcaccattttggccaggctggtctcaaactcctgacctcaagtgatctgcctgccttggcctcccaaagtgctgggattataggcgtgagccaccaagcccatcctatctcagccatttcttctgttatttacttccatcatatttctgagtattgatttttgttcttcctcttttcctgtttttttttttttttttttttttttttttttttttttttttgagatggagtctgaacatgttgctcaggctggtttcaaactcctggactcaaatgattctcctgcctcagcctcctgagtagctggaattacaggcgtgagccaccatacctggcttctgagtaacatttctattgcaatctcctgattcaccggctttagacttcctatctcggaccttaaaagttagctcttttgcactacactcatgtccctttccttcccatcgtaattgtatcataatttttatttaaatccatttaaattggttctgttattatggatatgtaaatattaattcttgcagaaccaagtagtatgcaatgattatatttctttacacgtattttttgcagcaatttttcattcgccttattttcattatacatattgtaattattttcgtgtccttcaacagtcttcccaaattttgaaataatcaaacctgtcaaattatctactcatctatttttttcctgaagacctctctccatcctcttgttctgctctagcccactgtttcattattactgctgctcatggagaatacgatcaaattctctcctataccagatttcttatctcctggttatcctctaatttattttcttattttaatggatcatattttcagtagtttttaaagaaagggcatatcacaagtgaaaatttgagaaagtcgtgcatgaaatctttttttcctaccctcatatttgattcaagtgtggaaatctttttcattcagaatttcgaaggagcctgggtgcagtggctcatgcctgtaatcccagcactttgggaagccaaggcgggcagattacttgaggtcagaagttggagaccagcctggccaacgtggcaaaaccctgtctctactaaaaatacaaaaattagccgggcatggtggggtgcacctgtaatcccaactactcgggaggctgaggcaggagaatcgcttgaacttgggagatggagactgcggtgaaccaagatcacgccactgcactctagcctgacacagtaagaatctgtcacacacacacacacacaaatgattttcaaagcagttggtccatgttattctagatccaggcaaggagtctaatctttttatgaaaactaccatgaataccactaatgaaagtcttggggctcacactgcaacagtatatgattctttgcttttttctcttacccttaatacagtaatagacctggacccacaggagcagcaaggccgaaggcggtttctgttcgacatgctgaatggacaagatcctgatcaaggacagtaagcatctgctttccactttgaaacaaaggagatattgagacagaaattcaaaagtttgagtttggttttgtgctgatgctgaatattttaataacttttttgagttaatttactcttaatgaatttcctatgtacttgagtataatttatatttgtgactacctaatccattacctaatcttataggttatttatttatttatttatttatttattttcgagacagggtctcactctgtcgtccaggctagagtgcagtggtgcgatcttggctcactgcaacctccacctccccaggctcaagggattcttgtgcctctgcctcccaagtagctagggttataggcatgtgccaccatgcctggctaattttttgtgtttgtagtagagatagggttttgccgtgttgctcatgtctggtcttgaactcctgcgctcaagcgatctgccctcctcggcctcccagagtgctgggattacaggcgtgagccaccgtgtccagcccatagtcttataggtttagttcatttctcacccatgccagcctgatgggccctttttttgtagcagcagtttacttgaatattgacaatgcccaaatggaataacaaaaagtgttgacattcttcttttttttgagacagtgtctcactctgttgtccaggctggagtgcagtggtacaatcttggctcactgcaacctccacctcctgggttcaagcgattcttctgcctgagcctcccaagtagctgggatgacaggtgcacgccacttgcctggctaatttttgtatttttagtagagacagggttttgccatgttggccaggctgatcccaaccccaggtgatccttctgcctcagactcccaaagtgttgggattacaggcgtgagtgaccacacctggtcaacaggaattttttgatgttgacataactaagtgaattttagatctcctttaaagttttaggaaagctggttgtccttattattccaataatctgaagaaggcctcctttcagagtttccagataaaatgtgggacatacccaaaaaaaaattatttggtcgggtgcagtggctcacatctgtaatcccagcactttgggaggctgaggcgggcagatcacttgaggccaggagtttgagaccagcctggccgacatggtgaaaccccatctctactaaaaacacaaaaaaatcagctaggcatggtggcacatgctggtaattctagctactcaggaggctgaggcatgagaatcatttgaatttgggaggcggaggttgcagtgagctaagattgtgccactgcactccaacctgggtgacaaagcagactctgcctctaaggaaaaaaaaaagttatttgttgtttagctgaaattcaaatttaaataggcatatggtttttgtttttgaaatctgttatccataccgcctgtgcatgtgtgtgcataagaaataatatggggctggtgttttatcttatttttaatttttttgtttgtttgttttagagacaggatctcactatgttgcccagctggtctttcagctcctgggctgaagcagtcctcctgccctgcctcccaaagtgctgggattataggcatgagccactgtgcccgacctggtgttttaattactttttgaaaggcccaatacttttgtttcatctgcttttactttgtctttggttagtcatagaaagaactgaaaaaggagccagatgaaataaacagtgactctgacttcagcatcactgtgggcttaaacagatgtaagcttacagagaacttttggacatggaaagtgatttggttctttcctttctgtgctaatgtcaaatttagctttcacttttttttccccagcatttccagaactctctcttcctttattcccttacagtgataatcattttctactcaattttagattcgattggtattacctttggctttctttttgccagtatggtctagcagacagagcaggctttgtaatcagaccaaccttgtttttattccagactctttgacttactagctctttgatctttttgatattacttaatttgaaggctcttgtgagaataaaattgagctaatatagtttacataaagcacttggtattgtgcccggcacattgtaatgctagttatcatccctttcctatgcaaattgggatgagggagtcagcattatcacttcgcattgttgaagttctcaataatgacatagaaacatagttacaaatgaatattgcctaatgggctgagaatggatccctttaaagtaattcctttgtttcagtttaatcatatttagctgtgcttttaaaagcttgaatttttagtcctattcctggcactctgtattagctaccaatatttgcttttaaaaattaataaaaatatgaaaaatcaagaataggcaaatccagagagatagaaagtagattagtggttcaggagctagggaaggagaatggggagtgactgcttaatcagtacagggtttctttttcttttttcttttagagactgggtctcgttctgtcacccaggttgaagtgcagtggcatgaacacagcccactgcatcctcgacctcctgggctcaagtgatctcacctcagccttccaagtagctgggactataggtgtgtgccaccatgcccggctaattttttattttttttgtagagacggggtgttcctatgttacccaggctggtcttgaactcatgggcacatcccatgatgttccctcttctaaaaggactgttactgcttaaattataccaattcctgacttttttgcttattgtcattttgtaaaatggaggcaagggaaaagtgattcagagaagacgttgtattgtttatgattacttttatccttattttatttttgaagcattaagagtatcaacagtgctgaattaaatgcaatttctttttagtttaaagtttacagtggtaagtgatcctctggatgaagaaaagaaagaatgtgaagaagtgggatatgcatatcttcaactgtggcagatcctggagtcaggaagagatattctagagcaagagctagacagtgagtcatttttttttcagttctaattatttccaaggaaatcatcctaatagtgaatatattttatcttcaatacataattattactatgaagttgataagacacaaagtggattgaaatcttatccctacaactgtatttatttctggatccaacattaaagtagtcagttgtgtatttttacccccatatacctgattacaactagaattgattttgaatctacaatgtttgaaaaggagatttttaaaaagacaagttattttcatttcaaatttatacatcagaattttggacctctcttgagcattttcgtataggcagctgatgcccattctttatgttatcatgcatccagtcttttttttttttttttttttgagatggagcctcactctgtcgcccaggctggagtgcagtggtgtgatctcagctcactgcaacctctgcctcccaggttccagctgttctcctgcctcagcttcctgcctcagcttccatggtgtgccaccatgcctggctaatttttgtatttttagtagagaccgtgttttaccatgttggccagactggtctcgaactcctgacctcaagtgatctgcttgccttggcctcccaaagtgctgggattgcaggtgtgagccactgcacctggcccatcttgtctcttaaaaagacattaactgtctcctctttcctcacattcactggtcattaagtcttatccattctacttgtgaattgactatgctctccttactacaattttttttttttttttttttgagacagagtctctctctgttgcccaggctggagtgcagtggtgtgatctcggctcactgcaacctccacctcccaggttaaagcgattctcctgcctcaacctcctgggtagctgggactacaggcacctgccaccacgccagctaatttttgtatttttagtagagacgggctttcaccatgttgcccaggctggtctcgaactcttggactcaagcaatccaccctcttttgcctcccaaagtgttggcattacaggcataaaccactgcgcccggcctccttaaatataattactataatttctttcttttttttttttttttttgagatggagtcttgctcttgttgcccaggctggagtgcaatggaccgatctcagctcaccacaacctctgcctctttcttaatcaagcgattttcctgcctcagcctccctagtagctgggattacaggcatgaaccaccacgcccagctaattttgtatatttagtagagatggggtttcttcatgttggtcaggctggtctcgaactcccaacctcatgtgattcgccctccactcagcctcccaaagtgctgggattacaggcgtgagccaccgcgcccagccatataatttctaaactggtcttcctgccaccggtttcttctaccccatttccatctactatagtaaatacataatacatttgatcactgccttcttcttaaatccttttacagtttgctatagatcagcatgttttaaaaacatttgtatttgagtacctttagttgggactgcgctgtccagtcttcactgttcccattaccttacatagctgggatgtcacctatcttatctgctaggaccttcagacacttaagattatccactagatcaatgtttttcaaacttccagacacacaccccattagtggatgtgaaactgaattagtaaatcacaaggaaatttgaaaaatgcaaaccaaaactgtgggaaagaaaacaggaattaaaggccaggcgaggtggctcatgcctgtaatcccagcactttgggatgccgagatgggcggatcacctgaggtcaggagttcgagaccagcctggccaatatggtgaaaccccatctctactaaaaatacaaaaaaaattagccaggcatggcggcggacacctgtaatcccagctactcggaaggatgaggcagaattgcttgaacccgggaggcggaggttgcagtgagctgagatcaagtcaccgcactccagcctgggtgacagaacaagactctgtctccaaaaaaaaaaaaaaaaaaaagaaaacaggaattaagagtacatagcacatattgtcttgtgaaacttgttttatgtattgtttaatgaatcatggtataaaattattcttactgatcattataaacattttttgaggaatactcctcagaccctaaggtttacaaagttcaaatgttagataagattctaattatattcctctagtatctttccaactgtgatccttagtctttttcctcatctataaaacgggaataacagcagtctctatcttactgagttgtgaagattaaggaagcacttaaataagggattaaggggcttagggtagtgcctggcataaggcaagtgacgttatctttgtgggctattttccaactcactcctatccccattcctaaacatgctatgttcttcctgacctccatgccatttgtatgtgcacagggaaaatccacttaagacttttctggtgatttctccagaaatcctttccaatttgtccattctggtgcagatgcctcgttatgtccccaaagcaacttgtgcttccatttattatatagcacctatacactataccattttcctttctccttcactagattgagtcctcttatgaaatgggtaatttcattcatttagcatccccagtacctaacctgacaaataccaagtatcaaagtgttcaactgagtgatgctgtttttttccctttcccaacagttgttagccctgaagatctggctaccccaataggaaggctgaaggtttcccttcaagcagctgctgtcctccatgctatttacaaggagatgactgaagatttgttttcatgaaggaacaagtgctattccaatctaaaagtctctgagggaaccatagtaaaaagtctcttataaagttagcttgctataacatgaa

SEQ ID NO: 15778 - DNA, 63319 bp, Homo sapiens
atgtcacatctggtggaccctacatcaggagacttgccagttagagacatagatgctatacctctggtgctaccagcctcaaaaggtaacttctacgcctgaggatggacaccttttagaattaaaagaactctcactgtggaacatcttgctggccttcacagagactgatttactttcagctcttttcttcagtcttctcacttttttttttttttttttgagatggagtctcgctctgtcacccaggctggagcacagtggcacaatctcagctcactgcagcctccgactcctgggttcaagcaattctcctgtcttagcctcccaagtagcagggattacaggcgtgcaccaccatgcctggctagttttgggatttttagtagagacaagttttcaccatgatggccaggctggtctcaaattcctgacctcaagggatctgccctcctcgggctcccaaagggctggtattacaggtgtgagccactgtgcctggccctcttctcacattttattcttaagttctttttttttttcttttttttgagatggagtttcactctctctcgtcccccaggctggagtgcagtggcccaatcttggctcactgcaacctatgcctcccgggttcaagcagttctcctacctcagactcctgagtagctgggactacaggtggccaccaccacgcttggctaatttggtatttttagtacagatggggtttcaccatgttggccaggctgatctcgaactcctgacctcaagtgatccgcctgcctcggtctcccaacgtgctggattacaggcgtgagccaccgtgcccagacttagtcttaaattcttacagtaaaagtattactgtgtgggtttaggaggtaaagctaaatactaccaccacaaacagcacaacaaaagccaagaacaactagtgggtttcactcatctatccttgtgattagcccttagcccttcactgtcactaagcagaagtgttcaatttaagatgaaagggctcagccctaccagagcttcttccacacattatttaagatatctttagggctgggcgcagtggctcatgcctgtaatcccagcattttgggaggccgagacgggcagatcacgaagtcaggagatcgagaccatcctggctaacatggtgaaaccccgtctctactaaaaatacaaaaaaattagctgggcgttgtggcgggcgcctgtagtcccagctactcaggaggctgaggcaagagaatggtgtgaactcaggaagtggagcttgcagtgagccgagatcgcaccactgcactccagcctaggcgacagagcgagactccataccacccccctcccccaaaaaaccatatttttctaactttggccaggcttggtggctcacacctgcaccagctactcgaggctgaggtgggaggatcacttgagcccgggagtccaagatcagtctgggcaacatagcagtaccctatctctaaaacaacaaaaaaaggtatttttgtaattttgctccactttcccatccctcaatcccaatcatggctaccgttgattctattttcacttgacttcacttctataaaattattttttgaggatagggcactttatgcactgcccataagtgtataaatgatgcaaccactttggaaaatatttgccattatctagtaaagttgaacgtgtaactctacttttgagtataaaattggcagaaattgcctgggcatagtggctcacgcctgtaatcccagcaccttgggaggccgaggcaggtggatcacctggtcgggagttaaaaatttgcagaaattaactcttgcccatatataccaggagacattaccagaatgttcatagcagtatttttttttgagacagattcttgctttgtcacctaggctggagtgcagtggcgtgatctcagctcactgcaacctctgcctcccgggttcaagtgattctcctgcctcagccacccaagtagctgggattacaggcacctgccaccacacctggctaatttttatatttttagtagagatggggtttcaccatgctggccggactggtctccaactcctggcttcaagtcatctgtctgcctcggcctcccaaagtgctgggattacaggcagaagccaccacacctggcccctgtttttatttctcctgggcacaaatctagatgtagaattgctgggtcatacggtaacactagtttaacattttgaggaactgccaggctattttccaaagcagtggcaccattttacattcctaccagcaacgtatgatgcttctgatttcttcactttctcagcaacacttgttattgtttgtaactgaggtgttatctcattgtatttttaaaaaaatatattctttcttggctgggcaaagtggttcacgcctgtaatcccatcaccttgggaggccaatgcaggtggatcacctgaggtcaggagttcaagactagcctggtcagaacagtgaaaacccatctattctaaaaatagaaaaagttaaggccgggcacggtggctcatgcctgtagtcccagcactttgggaggccgaggcgggtggatcacgaggtcaggagatcgagaccatccttcctggctaacacagtgaaacctcgtctctactaaaaaatacaaaaaaaaattagccaggcctggtggcgggcgcctgtattcccagctacgtgggaggctgaggcaggagaatggcgtgaacccgggaggcggtgcttgcagtgagccgagatcgcgccactgcactcaagcctgggcgacagagtgagactccgtctcaaaaaaaaaaaaaaggaaagaaagaaagaaaaagttagctgggccaggtggtgcacacctgtagtcccagtatttgggaggctgaggcatgagaaaaacttgaacccaggaggcataggttgcagtgagccgagatggtgccactgcactccagcctgggtgacagagcgagactccatctcaaaaaaaaaaaaaaaaggattctttctcgttatggttttgatttgcatttctctgatgaataatcacactgaccatttttcatatgcttatttgccatttgtatatctacttgggagaaatgtctattcaggtcctttgccaattttctttttaattcaggggccagttttgccaatttttaaattggattatttgtctttatattgttggttttaagagttctttgtatattttggacacagttgagaattttgtgcttctgaaagctttaactgttccacaaagtccatgaaacatgaactgactgagataatttttcaagttagaagagtcatagtgataggaaaccgttgttcaggaactacctacctggagttccagtcagtttggaagccacccacatatccaaaaagctaaaagaattcaatatttttcttcagtatcataaaagaaaaatagaagatgagaaaggggaatatttacaagtttattttatgaaaaaataagcttttttaggtttcattacaaacatgtccaatttcacttctgtcatttatgaaataactaaaagtagatgaagtacctttttttttttttgagacagggtcttgttctgtcacccaagctggagtgcagtggtgcgatcttggcttactgcaacctctgcctcccaaggctcaagcgatcctccagcctcagccttccaagtagctaggactacaggtgcacaccaccatgcccagataatttttgttttctgttttttgttttttgttgagatggagtctcgcttttgttgcccaggctggaggcaacggtgcgatcttggcccactgcaacctccacctcccagattcaagcaattctcctgcctcagcctcccgagtagctgggattacaggcacgtgtcaccacacccaactaatgtttgtatttttagtagagacggggtttcaccatgttggtcacgctggtctcaaactcctgacctcgtgatcctccggcctcagcctcccaaagtgctgggatgacaggcatgagccactgcacccagccaatttttatattttttgtagagagggatttcactgtgttgcccaggctggtctcaaactcctgaactcaagctgtctgcccaccatggccttccaaagtgttgatatcacaggcatgagccaccgcgtctggcctaaatatttgtcatatataaatatttttataaaggcatatggtcatgttataattttcttcctagtgaccttaccttcctagttgacctagcaacattattttgcaggttctttggttgggaagttgtatttttttttttcattctaagcacctcagaaacactgttttcggagaaaaaaaaattttgatgtcacaaatagataaaaccacattaagggaatatttttatagcatatattcaaaaattaatctagccagtgactcatgcctgtaatctcagcacattgggaggccaaggcaggaggatcacttgagcccagcctgggcaacatggtgagaccttgtcactataaaaaatttaaaaattggccaggcatggtggcttatgcctgtaatcccagcactttgggaggctgaggcaggcggatcacctgaggtcagaagtttgagaccagcctggccaacatggtgaaacctcatttctactaaaaatacaaaaattagctggctgtggtggcccatgcctgtaatcccagccattcgagaggctgagacacaaggattgcttgaacctgggagacagggagacggaggttgcagtgagccaagacagcaccactacactccagcctgggcaacagtgagagactctgtgtcaaaaaaataataattagccgggcgcagtggctcacgcctgtaatcccagcactttgggaggccgaggcgggtggatcacgaggtcaagagatggagaccatcctggccaacatggtgaaaccccatctctactaaaaatacaaaaaattagccaggtgtggtggcaggtgcctgtaatctcagctacttgggaggctgaggcaggagaattgcttgaacctgggaggcagaggttgcagtgagccgagatcgcaccattgcactccagcctgggcaaaaagagcgaaactctgtctcaataaataagtaaataaacgcaaaaaaataaaaaatatggttcccattcaccatgagatcagagcagacctgggccagtgaacactcacaatgaaaagtgtgctccagtttcctctgcttagaccaagcagaggctcttgtcctaggaggcagctttggggacagtttctcctgaccaaaaaaacaaacgagatggttcttggaaatcaaaaaaagtttttatccttttccttactgggtttttgaagacagtcatgggaacaatccttgtgtaggtccaaattatctaataaggagaaaaaaatagaagaataggctgggcatggtggctcatgcctgtaatcccagcactttgggaggccgaggcaggtggatcacctgaggtcaggagttggagactagcctggccaacatggtgaaaccctgtctctactaaaaatacaaaaattaagctgggcacggtggctcacacctgtaatcccagcactttgggaggccgaagcgggtggatcacaaggtcaagagatcgagaccatcctggctaacatggagaaaccccgtctctactaaaaatacaaaaaaattagccaggtgtggtggctggcgcctatagtcccaggtactcgggaggctgaggcaggagaatggtgtggacctgggaagcggagcttgcagtgagccgagatggcgccactgcactccagcctgggcgagagtgcgagactccgtctcttaaaaaaaaaaaaaatggaagaaattagctgggtgtggtggcaggcacctgcaatcccagctactctggaggctgaggcaggagaatcacttgaacctgggaggtggaggttgcagtgagccaagatcacaccagtgtactctagactgggtgacagagcgagaccctgtctcaaaaaaaaaaaaaaaaaaagaagaagaagaaactaaaaagaaaaattaagtaaaataaaagcctaattggatatttttatctagagaatgtactttctagacggaaggtcgagttatacctcatgctgtgataatatagaaagggtctccagggacccagtaggagtcatttctgtttttgtttttttttttttccaaggcagagtcttgctctgtcacccagggtggagtacagtggcacgatctcggctcatggcaacctctgcctcccaggctcaagcaattctcctgcctcagcctcctgagtagctgggattacaggcacgtgccaccacgcccagctaattttgtatttttagtagagaccgggtttcaccatgttggtcaggctggactcgaactcctgacctcacaatctgcctgcctcagcttcccaaagtgctgggattacaggtgtgagccactgcgcctggcccagagtcatttctcatacttcctgatttcctcataaatacttgactcaagatagatttatgctctctggacaagatgtgatgagacatctaaagggttcaaaaaataggtgtaaaaatactgtccatttactgttttctgggactttaggtaagaatatgaaaactcaaccacccttgagcaggatgaaccgggaggaattggaggacagtttctttcgacttcgcgaagatcacatgttggtgaaggagctttcttggaagcaacaggatgagatcaaaaggtacttagagttctccttaaattttttttttttttttttttttttttttttttgagacggagccttgctctgttgcccaggctggaatgcagtggcatgatcttggctcactgcaacctccgcctccagattcaagcaattctcctgccccagcctcccaagtagctgggattataggcatgcgtcaccatgcccagctaatttagtatttttaagtagagatggggattcgccatgttggccaggttggtcttgaactcctgacctcagatgatgcacccacctcggcctcccaaagtgctgggtttacagatgcgagccactctgcccggcccaaaaataatttttgaagcaatatttctttagtcaatttttttgccaaacatgtcgatagactgtgaccacaggacacagagcatcattaagagcttgggtgataatatttcagtccacagaataagagactggacaggttcctcccctggtcacaactgaggggatggagataggtggaatggtcaaaatttcagaggagaaaagcctgcaggggcaagtaaaagaaggggtctttatttacaaaagaaaactaaagatcgtattgatccctgcaggcatgttgtaagtgctatctatacatttatttatttatttatttatttatttttgagattttttttttttttttttttttgagatggagttttgctcttgttgcccaggctggagcgcaatggcatgatctcagctcaccgcaacctccgcctccaggattcaagtggttctcctgcctcagcctcccaagtagctgggattataggcatgcgccaccacactcagctaatttttagtatagacggggtttctccatgttggtcaggctggtcttgaactcttgacctcaggtgatccgcctgcctcggcctcccaaattgctgggattacaggcttgagccaccacgccagccaatttttatttatttttgagacagagtctcactctgtttgggctggagtgcagtggtgtgatctcggctcactgcaacctctgcctactgggttcaagcgattcccctccctcagcctcctgagtagctggaattacaagcttgcaccaccacgtcagagtaattttttttgttgttttgagatgaaacctcgctccgttgcccaagctggagtgcagtggcgcagtctcggctcactgcaacctccacctcccaggttcaagcaactctcctgtctcagcctcccaagtagctgtgactacaggcacacaccaccatggccagctaattttttttttttttttggagacggagtctccatctgtcgcccaggctggagtgcagtggtgcgatctcggctcactgcaacttccgcctcccggattcaagcgattctcctgcctcagcctcccgagtagctgggactataggtgcccactgccaccactggccgtgctgcccaggctggtctcgaactcctgagctcaggcaatcagcctgcctcggcctcccaaagcgctaggattacaggtgtgagccactgtgcccagccatgcctggctaatttttttttttttttagtagagatggggtttcaccctgttggccacggtagtctcaaactcctgacctcaggtgatccacccaccttggcctcccaaagtgctgggattacaggcattagccaacacgccaggccttaatatttgtattttttgtagagatggggtttcaccatgttggccaggctggtctcaaactcctgacctcaaatgatccccccatcttggccgcccaaagtactgggattacaggcatgacccatcgtgcccagttaatttattagaaatagtattaattagccagccacagtggctcacgcctataatcccagtactttgggaggccaaggcgggtggatcacgaggtcaggagttcaagaccagcctgaccaacatgatgaaaccctgtctctactaaaaatacaaaaattagctgggcgtggtggtgggcgcctgaaatcccagctactcgggagactgaagcagaatcacttgaacccaggaggcagaggttgcagtgagccgaaattgtgccattgcactccagcctgggcgacaagagcaagactccatctaaaaaaaaaaaaaaaaagtattaattcatttaatagtctgaagaggtattattaagaggaaaaggaagcataaagaggttaaataagttgcctgagatcatacctagtgcataacagaggtggaatctctttttgttttgttttgttttgttttgtttttgagacagagtcctgctgtgtcactcaggtttgagtgcagtggcgcaatctcggctcaccggcaatctctgcctcccgggttcaagtgattctcctgcctcagcctcccaagtaactgggattacaagcatgtgccaccatgcctgactaatttttgtatttttagtagagacagggtttcaccatgttggccacgctggtctcgaactcctttcctcaagtgatccgcctgcctcggcctcccaaagtgctgggattacaggtgtgagccaccgcgcctgtcccagtgggaaaaactcttaacttcaaaacatattattatatacagtgatcttagatttctttctttagaaaatggggacctggaaagaaatctgagacggaggtgagggaaggtaaacagatgggaagaatgggagttctcaaagtctggagtctatctctaggacacattttgaagatactggtgtcaatgccttccagccaaggaccaccaggaacataccaacagttgagcaagctgggcttattcattacagctagagaatatgcacaccaggggaactaaaggcatctcagcaaatgtgttagaacttattatagtatctaagctttgtttgattgggtgattttgggggaggatccaaggaaacagaagtttgctccagatttcatgctgtcagaaagcaagcacaattctatgtttcggtatctcaataaattattctttctttctttctttctttctttctttctttctttctttcttttttttgagatagggtctcactctggcacacaggctggagtgcagtggtgcagtctcagctcactttagcctcaacttcctggaatcaagtatcaataaatcttatctacagggagggtaaactagtgcaaggctgaagccatgattggtaaagaagttgcagtcactcatattaacctggagagaaggatgtttggtattttgtgggtggcagtgacactaattttgtctgtaagcagacaaaattaggcagtggacttgttttgtatcattctatcatggttttggagtgaacttgtttcatgttgatgttctgtgaggtgtccaaaagaatagtggctgggcacggtggctcatgcctgtagttccaacactttgggaggctgaggtgggcagatcacctgaggtcaggagttcagagaccagcctggccaacgtggtgaaaccccgtctcttctaaaaatacaaagattatccgggcgtggtggcaggcgcctataatcccagctactcaggaggctgaggcaagagaatcgcttgaacccaggaggcggaggttgtagtaagcaaggattgcgccactgcactccaggctgagtgacagagtgagattcggtctcaaaacgaaaacaaaaacaaatggagatagcacagactagcttcaaacaacactgaggaccagttgtgtcagaccagtttcctaatgtcaagggcagtgttttgctttctcattgtaacccccaggagtgattaagatcttcgtttagaatctgcaggattggccgggcgtggtggctcatgcctgtaattccagtactttgggaagccaaggcgggtagatcactaggtccggagttcaagaccagcctgttcaacatggtgaaaccccgtctctactaaaaatacaaaaattagctgggtgtggtggtgggcgcctgtaatcccagctactcgggaggctgaggcaggagaatctcttgaacccgggaggctgaggctctagtgagcagagatcgcaccactgtgctccagcctgagcaacagagtgagactctgtctcataaaaaaaaaaaaaaaaaaaaaaagaatctgcaggaatgcaggcctccattgtggatcagcactcttcagagttggtgattttttttttttgagatgggagtttcgctcttgttgcccaggctggagtgcaatggcgtgatctcggctcaccgcaacctccgcctctcagattcaagcgattctcctgcctcagcctcccaagtagctgggattacaggcatgtgccaccacgtgcagctaattacagacagggtttctccatgttagtcaggctggtctcgaactcctgacctcaggtgatccgcccacctcagcccggcaaagtgctaggattacaggcgtgagccaccgcaaagggccgatttttttttttttaattgttgagaacttgagaatctagtgacttgagtgaagtcagaaggttgtatgggccaaaaaatctagtttcttggttgataatcaaagagtacttgagattatggatgctaaatggttaatctggattctatgcccctggctttgggcaagttacatagctattttacaccttgttttctttatctgggtataatgatatgtaataataatagctcacacctgaagcccttacagtgtaaccccactgttctaagcattttacatatatatttatatataagcttattaatcctcacaacaatctactgcttttatctttttctatttatctttatttataaatgaggaaactgagcacagaaaggttaagtggcatggccaaagctacagttagtaaatgtcagaacagacgggcagtgtgtcttagtcagctcaggatgccataacaaaataccacggactgggtggctgaaacaacagacattggttttctcagagttctgaagctggaagtctgagatcaaagtgtcagcgtggttggatcctggtaagggccatctttctagcttgctgactgctgctttctcactgtgtcttgggaggtgggagagggagatctcttgttacaaggccacagtcctatccagttagggccccacccttgtgaactcatttaaacttaataacctccaaaggccgggcgcggtggctcacgcatgtaatcccaacactttgggaggccaaggcgggcgaatcacttaaggtcaggagttcgagatcagcctgaccaacatggagaaaccctgtctctactaaaaatacaaaattagtattttgtggttaggcgtggtggcgcatgcctgtaatcccagctactcaggaggctgaggcaggagaatcgcttgaacttgggaggcagaggttgtggtgagctgagatcgtgccattgcactccagcctgggaaacaagagaaaaagtccgtctcaaaaaaaaaaaaaaaagcctccggaacacccaatgtccagatacagtcacactgggggttaaggcttcaacataagaattttgagtggggacacaattcaggccatagcacagtgagagcatagaatcagatagtagcaaaaaaaccatgattttaggtcaagataacaaataaaaattgttactaaaagttataaaggagttatccttaatttggagcacatatacaggggtgtgtagacaagtgggatagaaaaagcaaatattaaaattgttatttatatttgtcacccatttaaacatacatattttgttttataatgacaatttattagtacaaaaacaagtctatatataatttttttaaatgcacacaaatactattggggtagtggctcaactttttttttttttttttttttttttttactaagataagggtgtaatcactgcaataaaataaagacaggtatcacaatggccctgccctcaaagagttacagtgtactggggacagaaggctaatctttttaaagtgtggttaatagatcacggtagatgaatacatattatagatcaattcgtgattatatgtcccaaataacccgtagaaataataactgtcatgaaaggagaagccacgtgctctatttgtccacaggctgaggaccaccttgctgcggttgaccgctgctggccgggacctgcgggtcgcggaggaggcggcgccgctctcggagaccgcaaggcgcgggcagaaggcgggatggcggcagcgcctctccatgcaccagcgcccccagatgcaccgactgcaagggcatttccactgcgtcggccctgccagcccccgccgcgcccagcctcgcgtccaagtgggacacagacagctccacacagccggtgcaccggtgccggagaaacccaagaggggtgagatttaaggctacatcccctacagggctaagacactgggaaggactgatgtgccagccacgttttcctcactgccttcttctgcccaccaccccattttgttcttttgttctcactccctcctttctgcctccctaaaatctttatttcctgagttgggatatcagattcaaaattctaaattcaccatggagtgtcgctgagggcagaatcagacaacaggtcaggagatggagaccatccttgtccaacatggtgaaaccccgtctctaataaaaatacaaaaattagctgggcatggtggcgcgcacctgtagtcccagttattcgagagattgaggcaggagaatcacttgaactcgggaggcggaggttgcagtgagctgagattgcaccactgcagtccagcctggcgacagagcgagactctgtctcaaaataataataataataataataataataataataataataataataaaaaattagccaagcctggtggcacatgcctgcagtcccacctacttgggaagctgatgtgggaggatcgcttgagcctgggaggcggaggctgcagtgagcccagatggcaccactgaactccagcctgggcaacagagtgacactctgcctcaaaaaacaaacaaaacaaaacccccaaaaagaaaactcaacgttgaatctctagagtagacacctcattctcatggccctaaatcaggaatgagtaacctaggtaaaggaaatctacacacagcatttcattaagtactcttattttattagtaagtactcacttattttgcttagtgtggtcctataatttcaagttccatactccagacaaccaaacgcatgcaaaaacaactgaaagtagaaaacttgcatgaatttaaatttcagttccatttaacagttcagcatagctggccacctgttatgtactgggcactagatacaaagatggttagagttagacacacagtctctgccctggacaagcttccacctttcttttttcttcctatttgtacttactcacttgaggatctatagtctggctgactttagttgcagttttttgcaagagtaaaaaaaaaactgctcctcggggaccatttgtcatacaagggtttcacccaggtctcaagactctatgcccagcccttcatgttccagtttcagtacttggtgttccggagggtactgttgcccgagtctgcatcttctgtctaaacttttagggccaagggacaggctgagctacacagcccctccatcgtttaaggagcatgcgacaaatgaaaacagaggtgaagtagccagtaaacccagtgaactgtgagttcttctcatttatcccatgttgttattcctgccactttaattagaaagacatcatttagggaacaaatgaatgttggtgatttgagtcttttcagcatgatcagggaagatgaaagtcgaccctaggtcaaattccaacttcattgcttaaaagtggaaaacaagcgtctctctgttctctgaggaaatgaaaataaaggtccatttctcagttgaaggtattccctctatttacatttatatttttttccttaggtcataattcctttgttgtgttttttttttttttttttttttgagatggagtcttgctctgttgcccaggctggagtgcagcagcgtgatcttggttcactgcaacccctgcctcccaggttcaagcaattctcctgcctcagcctcctaagtagctgggactacaggcatgtgccaccatgcccagctaatttttgtatttttagtggacacagggtttcactatgttggccaggcttgtctccaactcctgaccttgtgatctgctcgccttggcctcccaaagtgctgggattacaggtgtgagccaccacgcctggcccataattcctttatgttttgtttgacatttgaaagctgtattttataagattttcctcgacatgtaccaaggttactgattcacttaatttctttttatatgtgtaagaacccaattctaaactcctgtaacaacagtttctaagtatcctttttgtatttagtgtttctggttctaacagcataatttctttcagcagtgtcataagtatggctaaacccattggtctatgcatgcctaacagtgcccacatcatggccagcaataccatgcaagtggaagagccacccaagtctcctgagaaaatgtggcctaaagatgaaaattttgaacagagaagctcattggagtgtgctcagaaggctgcagagcttcggtaagagtgtggcactccatgcctcaaaccaaaacgaactgaaaaagctaagagattcttatttatacctttcctccatctcagaggaaaagagtgtttgggattaaattcaatcggagtagtagacacggagtccctcgtaggttaagaaatggattaacctgcgggcaccatggatcacgcctgtaatcccagcactttgggaggccgaggcaggccgatcacctgaggtcaggagttcgagaccagcctcgccaacatggagaaaccctgtctctactaaaaatacaaaaattagccaggcatggtggcaggcacctgtaaatcccagctactagggaggctgaggcaggagaatcacttgaacctgggaggcagaggtttcagtgagctgagataacgccattgcactctagcctgggcaacaagaacaaaacttggtctcaaaaaaaaaaaaagaaaagaaaagaaaagaaatgaattaaccttctgggcgcagtggctcacgcctgtaatcccagcactttaggaggccaaggcaggtggatcacctgagatcgggagttcaagaccagcctggccaacgtggtgaaaccccgtctgtactaaaaatacaaaaaaactagccaggtatggtggccggtgcctgtaatcccagctactcaggaggctgaggcaggaaaatcccttgaacctgggaggcggaggttgcagtgagccgagattgcaccattgcactccagcctgggcaacaagagcaaaactctgtcaaaaaaaaaaaaaagaggaaagaaggaaggagggagggagggaaggaaggaaggaagggagggaggaaggagagagagaaagaaagaaagaaagaaagaaagaaagaaagaaagaaagaaagaaagaaagaaattaacctaaaggagataagtttatgtataaaaggatatttgctgcctcactatatagaaggaaaacgacttcatcctcatcaccagatagggattcttagccctctctgtgcataaattcctggaaaacttttttaaaaatgtatttttcagacaagttttagttttatagcaaaattaagcaggaaatagagttcctgtatacccattgcctccatacacacacagcctccccaactatcagcaccccgtaccagagtggtgcatttgttacaatcagtgaaactacattgacacatcattatcacctgaccatcatttaatagtttacattagggttcattcttggtgttgtacattctttttttttttttgagatggagtctcgctcagttgcccaggctggagggcagtggcgtgatctcggctcactgcaagctctgcctcctgggttcatgccgttctcctgcctcagcctcctgagtagctgggactacaggcgcccgccaccatgcccggctaatttttttgtatttttagtagagacggggtttcaccatgttagccaggatggtctcgatctcctgacctcgtaatccgcctgtctcagcttcccaaagtgctgggattacaggcgtaagccactgcgcctggccggtgttgtacattctatgggttttgacaaatgtgtaaggacatgtatccatcattatagcatcatacagaatagctttactcccccaaaagtcctctgtgttccacctagtcatgtcttttacctccagtcctggcaaccactgatctttttactgtctccagttttgcctcttctagaatgtcatatagttgggattacacagtatgtggccttttcaaattggcttctttcacttagtaatatgcatttaagcttgctccatgtcttttaaggtttgaaagctcattttttcaaaacaccaaataacattcgattgtctacatgtaccagtttatttatccattcagctaccgaaagatgtcttagttgcttccaagttttggcaattatgaataaagctgctattaacattatgtgtcgttttttgtatggatataagttttcaacctggagatattttaaaaccacagatccaggccgggtgcggtggcttatgcctgtaatcccagtactttgggaggccaaggtgggtggatcatttgtggtcaggagatcgaaaacagcctggccaacatggtgaatccccatctttactgaaaataccaaaattagccgggtgtgatggctcatgcctgtaattccagctacttgggaggctgaggcaggcgaatagcttgaacccgagaggcaggggttgcactgggccaagattatgctactgcactccagcctgggcaacagagcaagactctgtctcaaaaacaaaacaaaacaaaacaaaaaaagaccataacagatccctgggccccatctctgagattccctttcaattatttggggggtagaattcaggcagtgtaattttaagatctctccaggttattctaatcagcagctagacagggaatcaatgagatagagtggagtgaacccaaatcctccccagtatctctttcaatctttcaaacaataaagaaaacgtgagctcctaggttcaggaataatagtctttttttttttttttttttttttttttttttttttttgagacagagtctcactttgttgcccaggctgaagtgtagtggcaccttgtcagctcactgcaatctccatcttccgggttcaagcaaattctcctgcctcagcctcctgagtagctgggattacaggcacccaccaccacacctggctaatttttatatttttagtagagagggggtttcaccatgttggccaggctggtctcgaactcctgacctcaggtgattcgccttcctcgacctcccaaagtgctgggattacaggcgtgagcccctgcgcccagcctaatcttctttctattattttattttattttatttttattttccgagacagagactcactctgtcacccaagctggagtgcagtggcgagatctcagctcactgtaatctccacctcccaggttcaagtgattctcctgcctcagcctcccgagtagctgggactacaggtgtgcgccaccatgcccagctaatttttgtatttttagtagagacggggtttcaccacgttggccaggatggtcttaatctcttgacctcgtgatccacccgcctcagccttccaaagtgctgggattataagcgtgagccaccgtgccgggtgtattttactattattattattattatcattattttttgagacagtctcactctgttgtcgccaggctggagtgcagtggtgcaatctcggctcactgcaacctccccctcccaggttcaagcaattctcctgcttcagcctcctgagtagctgggactacaggtgcgcaccaccacacccagctaatttttgtatttttagtagagatggggtctcactatgttggccaggatggtctcaatctcttgacctcgtgatctgcccgcctcaacttcccaaagtgttgggattacaggcctgagccaccgcactcggccactattgttattttttgagacagaatctcactctgttgcctaagctgatttcagctcactgcaacctccgcctcccgcagttcaagcgattctcttgcccagtgtccatagctgggatgacaggcttatgccaccacacccatctgacttttgtgtttttagtaaagacaaggttttgccatgttgcccaggctggtctccaactcctgacctcaggccatctgcccgcctcagcctcccaaagtgctgggattataggcgtgagccacggtgcctggttcataatcttctttttaagttttctagcacgttcaaacctcactggtttctctaaggaaacggctgagacctagcttgacattgcaaggtttgtgggaaattatgaacaccatcatttaaaaaagtagttattatcttttctcataacataagcttaaggttagtgatctctatcaaatcttggctggcgtgatgagaaatgggagaaaggagattatttactagactgtacatacaccacatacttgtgttctagtgtgggtaagacgggaaggcaagagacaagagggaggtattcttactagggcatagtcaaggagaaaatgtctttaattctatccatgttcagacagaataatttagcgcctttctctgcagagcttccattaaagagaaggtagagctgattcgacttaagaagctcttacatgaaagaaatgcttcattggttatgacaaaagcacaattaacagaagttcaagaggtgagttgccatcatcagctgtgctttcttggtggggggaaaccccaattaagagattcatattattttctccattttaaatatgagaagccacaattcagaaagacaatttataagtgatatcacacaatttataagtgatattcaaatccaagcctcacaactcggagtctatgcttttcccagtatttcccattagttctctattaagaggaaggctcaagctctgcctgctaaggtgaaataaagtggagttaacttgtgtaagggttacggtcccctacgaagaccacaaccagaatgtgattaaattaggaagccaaaagcagtcacagggaagggaaggaaactagccttttaattagcactttctgtgagctgtactctgtcccagatatttacagtcatgatcttttttaagcctgacaacagccctcaaggtaagtatatttagcattagcacacattagaaactaacatctgattggtggaaatagagtatcaagggtcaaagtaaggtcagcaccatccttttattgaacaaatatttatccagtaccaggaattgcaaagcactgggatacaaagattccaagggtaagtaagaaaaaactgccttcaaggagtttataggagtgagaaaacaagtaaacaaattcaactatcctatgcagggtatgggcaggacacaaaagagagagtagtcagacccaccagtgggtgaggtgctgatatggctgataagtggaggaacaccagggctcttgtctcacgcgaattagataaaacgacacggacacaggtggagcggctttaaggagcggagagtttaataggcaagaaacaagggagaagaaagacggaagaagctcccctgtactgagacagagggagaaggactccaaagcagagaggggagacctcatgtgccgggaaaagtggctgcttatatgagtaggcaggaggaggtagtgtctgatttgcatagggctcaggggattggtttgaccaggcatgtcactcatgtagcctgtggaaaaaactggccctcctaccctagtcttttaatatgcaaatgaagggcgccatgatgttctacacacgtggggatatgtgggggtggccatgttgccaggtacaggtcggggaaaggacaggaagacaagggcgggaatcgccatgtttgggtggacccagtttctaaagacctgtatttgcatatcaaaggttgccttcccggctgtaagagccagggctttcctgctagacaaaaaacgtttctggagctgctttaaaggacgagaaaactttccaaggaccccttttcctctctatctgcctaaaattatttttaataactcctttaacagtgccagatcagaaaaggattaatgactgggtgcggtggctggagcctgtaatcccagcactttgggaggtcaaggagggaggatcacttgagctcaggaattcgagaccagcccagacaacatggcgaaaccccatctctatcaaaaatagaaaaattagacaggcatcgtgatgtgtgcctgtagtcctagctactatggaggctgaggcaggaggattgcttgagtgcttgagcccaggaggcagaggttgcagtgagccgagatcccgatacggcacctcagcgtgagactttgtctcaaaaaaagaaaaaagaaaaggattaataaaggaatagatttgtgagttaaatactgaaatactaaaagattagcttgtgttaataagtgtgtaagagaagagggggctttccatgagagcagaggtgagaaacatcaggtctggtcatgaaggacacactaagaattttttttctcgttgtcattaaagacagaacatgctaggaatttagactttatcctacaaacagcagagagctatgtgaaagggttttaagcaagttgatatgatcaatttttttctctctcaagattatttgaccttttttaaaaaataaaaaataaatttaaaaaaaaagtttgggaggctgaggtgggtggatcgcttgaggtcaggagtttgagaccagcctggccaacatggtgaaaccccgtctctactaaaatacaaaaattaggtgtggtggggggcacctgtaatctcagctacttgggaggttgaggaaggagaattgcttgaacctgggaagccgaggttgcagtgagccaagattgtgccgcagcactccagcctgggcaacagagtgagactgtctcaaaaacaaaaacgaaaacttacctctcatatttgctacaaggattaaatgagataatatgtgtgaaatgattataatgatcatgatgtggcaggtaatgaaacacatagtaacacatagcaactactcaactaattatagctgttgttatgatcattcttttttttttactaaaactgaagagatctttctgaagtgtgctaagtaacagtacctaatttaagattaaacatttttcttggataatccaccaagtacaatgcaaatgttaataaatgacccttcattcttttttgagaaatggtgtgaatgattgcagtcacagactacttggcaagctagggcaggggaaaaatagcaacaattagtaaacaagtacacaaattgatttgttttgtgggatttttataatgtctttaaaaatgttaagcattatattacagtgataaatatatcatgaaattgataaatcaataaaataataataatttctttcttccaggcatacgaaaccttgctccagaaggtacttaatgagaattgagtctctgtttcttagtaaccagaataatcaaacccaaagaaatctatgttcatctccaagtaacataacaccagaatttagctaactaaatcaatgttattatgtcatatagtttctgttaaaaatgatactattatgattatcaaaagatacagatacttattgcactgttttcataaaaattgaaatatgaaattgtagttgagaaatatttggcatggtatttttaagcctattgctggagcaaattatagcatttgctcaaaacttcctaagagtattcttctagcatgtgtgaggtgatgagatataacaaagttgttgcaggtattctcagatggtcttaaatatttggccctattcaccactgtgagtgggctgcatgtgaagctaggtgaatgtctgtgcttaagaatcaccactaagacagagttccaaacgagaccacccagctgtgcctcaccagaggagtccgccagaaacacacacagaacttctggagttaacatgtcacttgtctaggtacaaacgtagtcatcataaaaaagcagtcaaatagcttagaaagtgaaggcagctttggaaggtggcaactaatttaaagctagggattaatttgaaccttgagaaaattaaggctcaagggccaggcgcggtggctcacgcctgtaatcccagcacttggggaggcggaggcgggtggatgacctaaggtcaggagttcgagaccagcctggccaacatggagaaaccctgtctctattaaaaatacaaaaattagctgggcgtggtggctcatgcctgtaatcccagctactcaggaggctgaggcaggagaattgcttgaacccggtaggcagaggttgcagtgagccaagcactattgcactccagcctgggcaacagagcgagactgtctcaataaataaataaataaataaatacaagaaaagaaaattaaagctcaaatgatgaactacaattgcccagaatggaaaccctacctaccagggaaattatacttccagagaaatgctagggtgaaaaacaaggttaacgaacagtacaaaggtaataagctattaatcaaagtcattctttgtgacatctgttagagaatgctagggttgctggtgtctggagaccactcgtgctgagtgatatgaccattcccagaggtactttccttttgacccagaatcagggaatcctgagtgcagcccatgaggccctcctcaagcaagtgaatgagctcagggcagagctgaaggaagaaagcaagaaggctgtgagcttgaagagccaactggaagatgtgtctatcttgcagatgactctgaaggaggtaaataataatagttgaaagataccatctacatttcaacttcagggatgttagaatgtgtatcttagcaacaatatgagtattgcattttttcaaatgacaaaaacgaagctccgagtagttaaatcatttgcttaagattacaccattagagggaaagcttggatttgtacttatgtctgtttttcaaagtccttgctctttcataatgttttgctgcttccctagcagtagaaacccagaaacagtgaagacttattttggaaaatcctcattaatcccaatacaagtttctagccgaccttcaattggttcaagtctttctagttggatggcttctcagacactggagatggtgatagaaagcctctcacccacgcccctccctgccatggacaggggaaatcctgtgcaggggaatagattttaacattttatctcaagggctactatcactcttagtttcaggagagagttgaagatttggaaaaagaacgaaaattgctgaatgacaattatgacaaactcttagaaaggtgagtaccacatttgggtcccagagcagtgttactatgaaagacattatagaaagttcattcctaatacctagcattaataaatatatggggaaattggtactcaatattgttagtgagaatattaatcggcagtcttttggaagggaatttgacactattaaaatgttaaatgtgcatatcctcttttttttttttttgagatggagtctcgctctgctgcccaggctggagtgcagtggtgcgatcttggctcactgcaacctctacctcccgggttcaaacgattctcctgactcttcttcctttttatttttttaaccagcaattccttttttctttttttgagatgtagtttctctctgtcacccaggctggaaaacagtggcattctaggcttactgcagccccagtctcccaggctcaagcaatcctcccacctcagcctccccagtagctgggactacaggtgtgcactgccacacctggctaatttttttctatttttttgtagagacagggttttgtcaggttgcccaggctggtctcaaactcctgggctcaagtcatctgcctgcatcagcctcctaaaatgctgggattacaggcacgagccaccatgtctggcccccaaattttttggggggctggggggaatcaaaatgaaaaaattctcttgtgtatgtgcaaatatatgtatataataagaatgttgctgggtgcagcagctcacacctgtaatcctaacacttagggaggcagaggtgggaggataacttgcgcctagaagttcgagacctgtctgggcaatatagtgagaccctgttctccacaaaaagaaaaaaaaaaaaaagaatgtgaattactgccctgatagtaatagcaaaaaaacaaaaacaaataaacaaataaaaaggaaaccactgataagagattgatcacataaagcatgttgcatcctcacaatgaagtgctatgcagctgttaaaaatgagatagatggccaggcgcggcggctcatgcctgtcatcccagcactttgggatgccgaggcggccagatcacgaggtcaggagttagagaccagcctgaccaacatgatgaagccctgtgtctactaaaaatacaaaaattagccaggcacagtagcgcgcacttgtaatcccagctactcagacagctgaggcaggagaatcgcttgaacccgggaggcggaggttgcagtgagctgagattgcgccactggacttcagcctgggtggcacagcaagacttcctctgaaaaaaaaaaaaaagatacattgtaaaaagaaaaagcaagctgaaaatgaatatgttaactctgacatggtttatgttatgtatctttatggttccacaaacctttgatgagataagaggattagaataaggcaaaggggcaccttcacttttattcttttttttttttttttctcttgagatggggtttcactctgttacccaggctgtagtacagtggtgtcatctcagctcactgcaacctccacctctcaggctcaagcaatcttcccacctcagcctcccaaggagctgggaccacaggtgcacaccaccatgcctggctaatttttgtattttttgtagagatggtgttttgccatgttgcccaggctggtcttgaactcccaggctcaagtgatttttccacctcagcctcccgagtagctgggaccacagccacacgccaccacacccggctaatagtttctatattgtgcagagacagggtttcgccagattgcccaggctggtctcaaactcctgggctcaagtgatctgcctgccttggtctcccaaagtgttgggattacaggcatgagccaccgaccctgggctattctatatgctgatgtattattctaatttttcacaatgagcatgtattcatgcattaattttataattaaaaagaactggaagtggcctggcatggtggctcattcctgtaatcccagcactttgggaggctgaggcaggaggatcgctggagctcaggagttcacgaccagcctgggcaacatgatgaaaccccttctccacaaattattttaaaaattagccagccaggcgcggagaatcacttgaacccaggaggcagaggttggggtgagctgagatcaggccattacactccagcctgggcaacaagagcaaaactctgtctcgaaaaaaaaaaaaaaaatagccgggcagctgggcgcagtggctcatgcctgtacttctagcactttgagaggccaaggcaggcagattgcctgagcacaggagtgtgagaccagcctgagcaacattgcaaaacactgtctctactaaaaatacaaaaaattagctgggcgtggtggcaggggcctgtaatcccagatacttgggaggctgaggcagggcgaattgcttggacccgggaggtggaggttgcagtgagctgagattgcaccactgcactccagcctgagcaacagagcaagactctgtctcaaaaaaaaaatttggctgggcatggtggcgtgcatctgtattcccagatactcagaaggctgaggcaggaggattgtttgagcctaggaggtcaaggttgcattgagccatgtgcagtgcagtgcagtgagaaagtgagactctcaaacaaaaaaaaaacctgtaagtaaaagaaaaaagtttttaaaacttaaaagtgccaggctgtgcgcggtggctcatgcctgtaatcccagcactttgggaggccgaggtgggtggatcacgaggtcaggagatcgagaccatcctggctaacacggtgaaaccccgtctctactaaaaatacaaaaaattagccaggcgtggtggcaggtgcctgtagtcccagctactcgggaggctgaggcaggacaatgtcgtgaatccgggaggcggagcttgcagtgagccgagatcgcgccactgcactccagcctgggcgacagagccagactccgtctcaaaaaaaaaaaaaacaaaaaacttaaaagtacctttgatctagtaaaaggcagcagggggtagattgaggaggtcttacgggagcatctgggaacaactgatgttcttcagctcagtgaaataaagcagtgtggggagtatccacttcgatagacattactctgtgatagacattactatttgcctctccccttcatcactcaaaatactattttcttgagtccttacatgatatatggtcaggcaatgccaagaaatgttaatacttgcctaagtaggttattattattattattattattttttttttgaggcagagtctcactctgttgcccagggtagagtgcactggtgtgatcttggctcactgcaacctctgcctcctaggttcaagtgattctccttcctcagcctcccaagtagccgtgaccacaggtgtgtgccaccatgcctggctaatttttgtggtttttttttttttttttttgagacaaagtctcactctgttgcccaggctgagagtgcagtggcgcagtctcggctcactgcaacccctgcctcccgatgtttaagctattcttctgcctcagcctcctgagtagctgggattataggtgccggccaccacacctggttaattttttgtatttttagtagagacggggtttcaccatgttgggcaggctgatcaccaactcctgacctcgagatctgcctgcctcagcctcccaaagcactggaattacaggtgtgagccaccgcgcccagccaatttttgtatttttaatggagatggggtttcaccatgttggccaggctggcctcgaacccctgacctcagataatctgcccaccttgacctcccaaagtgctgggattacaggtgggaaccatccagcctggccggtaagttatttatttatttcttgagacggaatctcacactgttacctgggctggtgtgcagtggcacgatctcagctcgctgcagtgtccgcctgctgggttcaagcaattctccagcctcagcctcccaagtagctaggattacaggcacctgccaccacacccagctaactttttgtattttcagtagagacagggtttcactatgttggccaggctggtctcgaagtcctgacctcatgatctgccctcctcggcctcccaaagtgttgcgattgcaggcgtgagccactgtgcccagcctggtaaattatttttaaaccacatttactaaaatgataaataagaaataagacataaaaagaaataattgtttgattattagtgtcatttcatttgtatgaatgaccaagaactagccatgtggctgggcatggtggctcacacctataatcccaacactttgggaggccgaggcaggtggatcacctgaggtcaggagttcaagaccagcacagccaacattgtaaaaccccgtctctattaaaaatacaaaaattagctgggcctggtggtgggttactttaatcccagctactcaggaggctgaggcaggagaatcgcttgaacctgggaggcagaggttgcagtgagccaagattgcacccctgcactccaacctgggtgacagctcgagattctgtctcaaaaaaaaaagaaaaaagaaaaaaaaaggaaccagccatgtgtattttatactcaaaatgggtctgctctgacagcttgatacaatagggtggaggatacagttgttgaaaagtttaattcccgcccttcagcatagtaatttataatctaggtcaaagacaaatattctctaaactcaccgttggtgaaggtagatggaggcatggggtttgagaaaaggaagattttgttcctcatttctaatccggcaggcctgagaaggtcttgatacatagttccctgactaaagaaagccatcatggtggagaagttccttgggaaatggatatgacttggggtgtttgctcagtcagatatctgagacctaaacagaaatggtactgagcaataactcagtaggactcaaaagttccaaggcagttggtaaatgacagttatgaataaagcaagggcagaaaaaaacatgtaggggagagaatgaggaactaggtccaggagatgctgaaactggataataaagacgtcatatcacaccccttggggtatccatctgagagcttgctttccattgccagcatgctggacagcagtgacagctccagtcagccccactggagcaacgagctcatagcggaacagctacagcagcaagtctctcagctgcaggatcagctggatgctgagctggaggacaagagaaaagttttacttgagctgtccagggagaaaggtaggctggaccttgaagagctctctcaaatgtggcatcctctacctctggtttgggagaagataacttgagccatcatttctttaatcccctcacttgatcctattcttttgtgggttgtaggtaactagaatgagaacactagcaatagatcagatctacaatcaggaaaacatgacacttacctacctctcatgtatactttttcctatataatgtctttccatttgagaagatgctagtttttgtttgtttgtttgtttgtttgtttttgaggtggagtttcgctcttgttgctcaggctcgagtgcaatggcacgatttcagctcactgcaaccttcacctcccaggtacaagcgattctcctatctcagcctcccaagtagctcggattacaagcatgcactaccacgcctggctatttttttttttttgtatttagtagagatggggttttaccatgttagttaggctggtcgtgaactcctgacctcagatgatccaccagcctcagcttcccaaagtgctgggattacaggcgtgcgccactgtgcccgacctgccagtttttaatttattatgttttttaaacgttcagtttattgaaagttttcttttgtttggtttggtttggttttgtttctgagagagtctcactctgtcacccaggctggagtacagtgatgcgatctgggctcacttcaacctctgcctcccaggttcaagagattctcctgcctcagcctcccgagttgctgggattgcaggtgcccaccaccacacccaactaattttttgtatattttagtagagacgagggttcactatgttggccaggctggtctgaaactaacctcaagtgatccacccgcctcagcctcccaaagtgctgggattacaggtgaaagccactacacctggctgaaagtattgaaagtgaatttctttgtcttttatccttctcatcattttagaggtaactggaatacttttttttttttttgccatccaattcttgaaattgagtagcaaattactattcttggttaccactgccagttcacccccgtcttaactcttggatctcaggagataggtatttggaacatttttaaatactgtcaaaaagaccttcatcttactactttttcctagcctggaccttaatatttagttttatcaaatttatatctcatcaagttttagtgtattcaaatagggaacggaaggaaaagaaatgtgtgaaatcaagaaaaatagaggcaagaaccatgtttaggagcacatgccaattagtatgtttgaagcacaaatgaagtcttgtaaggaccttcagggcaatctaatttaatcccttctctaatgcatgatggaaatgatctgctcactaaacaccgattacctttattccctgaaaaacacacacacagcctggtgtggtggctcatgcctgtaatcccagcacattgggaggccgaggccagcagatcacatgaggccaggagtttcagaccagcctggccaacatggtgaaaccccatctttactaaaaacacgaaaattagccagtcgtagtgtcgtgcgcctgtaataccagctactcaggaggctgaggcacaagaatcgttgaaccctggaggcataggttgcagggagccaagatcgcaccactgcactccatcctgagtgatggagtaagactgtctaaagagaaaaacacacacacacacattggaacacagaaatgcccatcctccatccaggccagggtgggtgtgaagatgggtgccacagagagctagtaacctagaagtcagaatggagtgggggtggagttggtgagatactggtttcgatgctgctgtcaaaaagtttggattaccctagtcaagtgattccctttctgttttgtgttgttattgttattccactttccactctaccattctgcaggtgtcttttgttttcggagtgcaagtagtatcacctcagtttactgagtcaataagctagagtcctcctctgtagaaataatagagaattgcttctcaaatttataacattaattaaaccttagtgggaagattaaattcacacttgatccaactctgaccatggtgataaataactacagaatttcacatttctggattatttttccccagcccaaaatgaggatctgaagcttgaagtcaccaacatacttcagaagcataaacaggaagtagagctcctccaaaatgcagccacaatttcccaacctcctgacaggcaatctgaaccagccactcacccagctgtattgcaagagaacactcagatcgaggtaagagcctctttaaacaaactagtccactctgcagagagatctctggcaaatatctctagggaagatgatgagattagaaaactaactaaataatattttgtcctgactgaggacactctttttttttttgagacagagtctcgctgtcgcccaggctggagtgcagtggcgcgatctcggctcactgcaggctccgccccctggggttcacgccgttctcctgcctcagccttccgagtagctgggactacaggcacccgccacctcgcccggttaatttttttgtatttttagtagagacggggtttcaccgtgttagccaggatggtctcgatctcctgacctcgtgatccgcccacctcggcctcccaaagtgctgggattacaggcgtaagccaccgcgcccggcccactctttttttttttttttttttttgagatggagttttgctcttgtttcccaggctggagtgcaatggcgcgatctcggctcactacagtctttgcctcccaggtttaagcaattctccttcctcagcctcccgagtagctgggattacaggtgcttgccaccacagccggctaattttttgtatttttagtagagacagggtttcgccattttggccaggctggtctcgaactcctgacctctggtgatccgcccaactcagcctcccaaagtgctgggattacaggcacgtgccactgtgccctgcttgaggacactttttggaaaactgtgagaaggcagagcgtagagaacttcatgagctccacccatttcttccactctttgcagctcataaaatttagaatctttttcagatgaggacttgaaaagatctgtggaagagcaaacagccattagtggctgtatcatctcccttcactgctgctactgaacatgagaactaggggaaagagcacttgtgaagtcatacaggtccttgtttacattttggagtagtttctgctgctggcattttactactaccaacaactgttttatggagaatcattattactttacctgtcatatttatactcccttttaccaatgcgtttccctctacagccaagtgaacccaaaaaccaagaagaaaagaaactgtcccaggtgctaaatgagttgcaagtatcacacgcagagaccacattggaactagaaaagaccagggacatgcttattctgcagcgcaaaatcaacgtgtgttatcaggtgcaaggaaagatggtacaggaaggggatggataacaggaacgtgggaaccactcacaggactgggaatgaagcaagacctaagtttccagggctgataccaggtgatgtgctatcctgagcaaacacacaatggctgtcctttgaagaacttgaggactcacacatgcccacggcaccttggcactaggagccagtgatggggccagcccatgccaatggcaagcgtaaggcttctgggttcaaattttgccagtcctaggaaccaccctacctcaatgatagcacaactagtcttggaggggtctgcaaggaaatcaaaccttcttctagtgggtgaacctgcccagctaaggatagcagtcttcttgacctagccagtgccacattttttatgctctttggttttaggccactgagatagaaaagttcagacattattttgtttcaggaggaactggaggcaatgatgacaaaagctgacaatgataatagagatcacaaagaaaagctggagaggttgactcgactactagacctcaagaataaccgtatcaagcagctggaaggtattttaagaagccatgaccttccaacatctggcaagtcttagtcctttgttctcctcacttcgggacccttccacagctaacgcctgtgttccactctgtgtacttgtcaagaagggtgcctctcatacccttagcatatgacttatccttcttgttctttatcctatcatttttgttgtttttttttgcttgtttgcttttgagatggagtcttgctctgtcactcaggctggagtgcagtggtgcgatcttggctcactgcaacctctgccttccaggttcaagcgattctcctgcctcagcctcccaagtagctgggatgacagttgtccaccaccatgcctggctaattttttgtatttttagtagagatggggtttcaccatgttggccaggttggtctggaacttctgacctcaggtgatccacctgcctcagcctcccaaagtgatgggattacaggtgcgagccactgcgcccggcccatctttgttgttttaatacatgttagcagcttctttccctccatcatgtttttctgatttctctgtagagtttcaagtgggcccagcaattgcttccaggggcttaattctgttgtgagaatgagtatcactgttggctctcagggtggtggtgtaacacacaatctctctctctctctctcattctttctctcttgctcctctcccctgtccctctctcctagtcactgtttcctcaaagcagttttagtcggataatagaacttcatcactcatctcctgttattcttgtcagtgatttctctcttaaaagctctaaaatctttgttgcaatttgaggatgctgacagtgacagggcagctggctggacactgaatgcaagtttcatattgtggtgcctcctatacttagtgtagtcactgctgaccagagcctggtctcaggcttgtttgtcaagacacttggctttgttattatacccagtggtgaaagatctgactcacgaaaaccaaattaaccagaagctgatatttaaacccaaatgtttgttattttacaatagtggctattccactgcttccatgaggaacttggaaccacagttcagggcagccctctttcgggaagcaaaatcagtaagtaggtttcttagtgagcatggaatagaataaagggacatggctgggcacggtggctcacacctgtaatcccagcactttgggaggacgaggcgggcggattgcctgaggtcaggagttcgagaccagcctgaccaacatggtgaaaccccatcgctactaaaaatagaacaattagctgggcatggtggcgggcacctgtaaccccagatacttaggaggctgagacaggagaatcgcttgaacccgggaggcaaagttgcagtgagccgagaccaggccattgcattccagcctaggcaacaagagcgaaactctgtctcaaaaagaaaaaaaaaaaagaataaaagcacataagtgtctctgggccgtgatttatccatgtcagcgtgagtctgataaaagatcactgcttctacctacgtctgaagatttatttgctttagctaatagttctttgatcactggtaagactaaagagtttttctatgttcaccagttatttgtattattccttttgagaattgaccgttcctatcctttgcctacttcttaacagtatcctattgatttatagaaattctttttatgctgagattattactcctgcatcatgtaatgcaaaattttaagtatattatatttaattatattaatcttgttaattaagaaagtagtctccttattcgtgtgtgtgtgtgtgtgtcatgaagacattccgatgtgtccagaatattttattctactgctttaactcttaaaataggaccttcggcagcagcacactgtgttgactcaaatattccccaatttgaagcaggctatatatcaaagtttctgattggttggacttgggagataatacccagatttgctagactgtctacctatctttgcgtcccactgccaatatttcctacctctttccagtaagtctcttttcccactttttactccattactctttaacttataatgtactttttgccttcttatgttgaaaccaaattctgaacagaatgaaagatctcctgactgacctggctagagaaggagaagcatttcttggtgggactcaatgtaatgtcatagacactatgtctgcaacttgctattatctccacggccaatataccaaacttgtagaaatattcatgtttttgtgtttctagtacttctcttatggaattaccagttaatcatagggccacgatgtacaccaaaacaatgtcatatataagataaaatgtgcccccagtgttttcctaagtttagcatctactttccagtcactccttttgtaccttctccctaaagctggcattggattatttggctatcggaattcaatgctcctggttgtccttctgttgcttttccttttgaatcacgtggtttcttgaaataatcacaacttggacttccaccatgtgttttatatttcttttgtccaccctcctctaccctaagaaagagctccctaccctttaacggataggcagctttctttcccctctagaacagctcaaagatgttgcttatggcacccgaccgttgtcgttatgtttggaaacactgccagcccatggagatgaggataaagtggatatttctctgctgcatcagggtgagaatctttttgaactgcacatccaccaggccttcctgacatctgccgccctagctcaggctggagatacccaacctaccactttctgcacctattccttctatgactttgaaacccactgtaccccattatctgtggggccacagcccctctatgacttcacctcccagtatgtgatggagacagattcgcttttcttacactaccttcaagaggcttcagcccggcttgacatacaccaggccatggccagtgaacacagcactcttgctgcaggatggatttgctttgacagggtgctagagactgtggagaaagtccatggcttggccacactgattggtaagtgccgttggcttcctgcggctcctaagcaccaatgcagaatttcccaaagcctacagttgcttttctggtggtttcttattttcttcctttgtcttgttcttgatccttgccacaccatctgtattccccctgctttcacactttctgctacccaggagctggtggagaagagttcggggttctagagtactggatgaggctgcgtttccccataaaacccagcctacaggcgtgcaataaacgaaagaaagcccaggtctacctgtcaaccgatgtgcttggaggccggaaggcccaggaagaggaggtgagaaaaaagatgtgccgaggcatctcagaggagcctcagccaaacagctcatgagcacagttcagtcttccactctcaataagtgtttgttgaatgtgaatgaaagagaaaactgtcacaccacaactagtctggattattcccttggtcaggcttgagtctgaaatgaaagtatgcctttggagcgagctacatccttcatccttgctgtgaacagaatagcttctctgtgccattctctaagttaagtcgtgagtgccagtatctccctgaaataactgccagagccagtttgcaggcaggtgaagatcattaggtttcttcctgatccagttgggatagctgttctctagatcatagctcttcctcaccacagatcctaggcttcacctacaacagtctcaagctgcccttttcctcaatccatgaccaacatctttccagttcagatcggagtcttgggaacctcagaacgagctgtggattgaaatcaccaagtgctgtggcctccggagtcgatggctgggaactcaacccagtccatatgctgtgtaccgcttcttcaccttttctgaccatgacactgccatcattccagccagtaacaacccctactttagagaccaggctcgattcccagtgcttgtgacctctgacctggaccattatctgagacgggaggccttgtctatacatgtttttgatgatgaagacttagagcctggctcgtatcttggccgagcccgagtgcctttactgcctcttgcaaaaaatgaatctatcaaaggtgggagttcgaggttattacatcttcacgccctcttcccagtgttgtctccctgtcctgattctacttttctttgattacttgcttgaaacagtctctcttaaaacctgaagataaaggatttagaatattgtcaagagcaacagagcagaagacttagagcctcactacttgtgtggaaacactggcttcttctgcttcttttcagccacaaagacaacattcctaagtgggtagagccagcaacctgaattctatacctctgtatctgaataaacttctttgttttttgagatggagtttcgctcttgttgcccaggctagtagctgggattacagacatgcgccaccacacccggctaatttttgtatttttagtagagatgggatttctccatgttggtcaggctggtcttcaactcccgacctcaggtgaacctcccacctgagcctcccaaagtgctgggattacagacgtgagccaccgcgcctggctgaacaaactttttcaagctctgtaatgctgtctagtatctgtctttactaaaggcctgttgtttcttagtgcatgactacatagatatctgattataaactgagaccttaacactcccccatcattctctcacttcttttaaacactggacacaagttagagagatttccacaccagatcatgacaaacacaaatttcttggattttttttttcctcccaatgtggagctgagctccatactgtctttcctaacttttatacctaggattgtgggggtgtaccaagaggggtcaactctttgactacagtcctgggagggtgaggtgggggtatccatgttttccttaggaagtggggatagctgcagtcagaaacaaccatatttaacaagattctggatgctccaggacatgtatgcagctctctcctcaatacaactgcttaaaaaaaggctgacacttctggacacaactcctttgccaaacaggggaggcagtataagccacctgttaatcagtgttacaaatcagacatctggcatttcgaaagagccattttgcttaagttttcttgggaccacttgagggtagaggtaacagttttcttggtacaactaaggcacagtaagcatttgataatagtaataataatgcagccttgttcattggctggatgactgatgacaagcaagctgtactccttttcatacacccttcactatctcttcctgaatcctagagataacccatcttccctgattaatattctaactgcactgctgtttgattttacttctgagtgtatcatcatcgtaattatttaatggatgttaattaattgctgataaaatatgttgaaattaaaaatgggaaggaagtagataaggtgctgacaaatgctcacttgcttatttcatgtgatcaggtcttattaatatctgtttgtttctcaggtgattttaacctcactgaccctgcagagaaacccaacggatctattcaagtgcaactggattggaagtttccctacataccccctgagagcttcctgaaaccagaagctcagactaaggggaaggataccaaggacagttcaaagatctcatctgaagaggaaaaggcttcatttccttcccaggtaactctccaggactccacaggtagcagatctctgccaatcctatggagcagatttgaaggagacagtattatagttgaagtaggtgcagtggctcacgcctgtaatcccagcactttgggaggccatggcaggcgaattacctgaggtcaggagttcaagaccagcctgaccaacatggggaaaccctgcctctactaaaaatacaaaaaattagctgggcgtggtggcacatgcctgtaatcccagctactgggaggctgaggcaggagaatcacttgaacctaggaggtggaggttgcggcgagccgagatcacgccattgcactctggcctgggcaacaagagcagaactctgtctcaaaaaaaaaaagaaaaagaaattccctctgtgagtgtcatgtgtcctgtgaacttaatatatatccctcataatgccatgagactactgatggagcgaaagcctgggttttactgcggaaaagagagagaaatagcatttctcagctccatgaggagagaaatgaagtctaacactagttcccaaatccctttcttgtgtttctaggttgttaaactaccagcttgtaatgctatctctgatctttctattcaggatcagatggcatctcctgaggttcccattgaagctggccagtatcgatctaagagaaaacctcctcatgggggagaaagaaaggagaaggagcaccaggttgtgagctactcaagaagaaaacatggcaaaagaataggtgttcaaggaaagaatagaatggagtatcttagccttaacatcttaaatggaaatacaccagaggtaagaccttaaaaactctgaagcactaaattgtgggttgtagtgtccccagatgtattattctcagaggtagaagcagaagcagaagcagacacacaagataagcactaatcggccgggcatggtggcttcggcctgtaatcccagcactttgggcagttgaggtgggcagatcacctcaggtcagcctggccaacacggtgaactcctatctctgctaaaaatacaaaatgaggcctggtgcagtggctcacgcctgtaatcccaacactttgggaggccgaggtgggtggatcacctgaggtcaggagttcgagaccagcttgaccaacatggtgaaaccctgtctctactaaaaatacaaaaattagccaggcatggtggtgtgtgcctgtaatcccagttactcgggaggctgaggaaggagaatcacctgaagctgggaggtggaggttgtggtgagctaagatcgcgccattgcactccagcctgagcaacaagtgagaaactccatctcaccaaaaaaaaaaaaaaaaaattagccaggcatggtggtatgtgcctgtaatcccagctactcagtcgggaggctgaggtaggagaatcgcttgaacccaggaggcggaggttgcagtgagctgagatcgtgccactgcattccagcctgggcgacagagcaagactccatctcaaaaaaataaaaataagataagccataatcatagctaattgtggctagcttgtgtttccacaaacacaagtagtttaacaaacccctggactgttcatttcaatgtaatttaattcagcatattatgtactctacagtttatgcttaaagttttaatactatatatatttttaaacaagtactcactttttttttttttttgagaccgagtcttgctctgtcgcccaggccagagtgcaatggcatgacctcggctcactgcaacctccgcctcccaggttcaagcaattctgctgcctcagcctcccaagtagctgggattacaggcacgtgccaccacacccagctaatttttgtatttttagtagagacgaggtttcaccatgttgatcaggctggtctcctgacctcaggtgatccgcctgcctcagcctcccaaagtgctgagattataggcgtgagccaccatgcccggccaacgagtactaacttttaaaaattaaaaagagccagtattgtctgggcatggtgactcacgcctataatcctagcactttgggaggctgaggcatgcggatcacatgaggtcaggagttcgagaccagcctggccaacatggtgaaaccccatctctactaaaaatagaaaaattagtcaggtgtggtgacgggctcctgtaatcccagctactcaggaggctgaggcaggagaattgcttgaacccaggaggcgaaggttgcagtgagccgagatggtgccactgcactctggcctgagtgacagagggagactctgtctcaaaaaaataataataataaaaattaaaaaaataaaaagagctaatatttaaaaagaaggcaggaaggaaggaatgaagaaagaaaaccaagatattaccagctatgtagtattgttgttcttattctgaagcaggtgaattacactgagtggaagttctcagagactaacagcttcataggtgatggctttaaaaatcagcacgaggaagaggaaatgacattatcccattcagcactgaaacagaaggaacctctacatcctgtaaatggtattgtcttttaaaatctattttttttcctagcactttgggaggccgaggtgggcagatcacgagatcaggctttcaagagcagcctggccaacatgatgaaacccgtctctactaaaaatacaaaaattagccgggtatggtggcaggcgcctgtaatcccagctacgtgggcggcggaggcaggagaattgcttgaacccaggaggaggaggttgcagtgagccgagattgcaccactgcactcctccagcctgggcgacagagcgagactccatctcaaaaaaaagaaaaaaatatatattttttctgtttaatcatttaattgttttgccaagctagttatttacttttctccttcaccttagaatgctaaagttttcatggaaaattagtatgtaagacctgaggcccagttttgtgttacaagtgtgatggttgggttaaccaaggctggaattcttaaataagtaactttctcagtgtttataaaatgttattttgccccaggatttttttgttttgttttgttttgtttttgagatggagtctcattctgtctcccaggctggagtgcaatggcaggatctcagctcactgcaagctctgcctcctgggttcaagcaattctcctgcctcagcctcccgagtagctgggattacaggtatgtgccaccatccccggctaattttgtatttttagtagagacaggttttctccatgttggtcaggctggtctcaaacttctgaccttaggtgatccgcccacctcagcctcccaaagtgctgggattacaggcgtgagccactgcacccgacctagttttgattttctcattaaaactgtttgttggctggttgtggtggctcatacctgtaatcccagcactttgggaggcatgggcgggtagatcacctgaggtcgggagtttgagaccagcctgaccaacatgatgaaaccccatctactaaaaatacaaaaaattagctgggcatggtggcatctgcctgtagtcccagctactggggaggctgaggcaggagaattgcttaaacccaggaggcagaggttgcagtgagctgagattataccactgcactccagcctgggcaacagagcaagactccgtctcagtacaaaaaacaaaaaacaggacagtgtttgtcttgattattgagtttttggcaccccttcaaattttatgcctaaggtcagtgcctcacatgccttcctctacttctgacagtggtcagaatagtggttactgctaggagaaggggaagagggttatcaggaaaggacaccctttgggcatctggagtgctaccagtgttctatttcttggctgaacggtgatagagatgttcattttacaacaatttaataagttgaacatttatatttcatgggcttttctatgtgcttgaaaaatttaataatgagaggaaaaatataaaggtagatatggaaatattatgaaaagagagtctttactacttaaaaaagctttttttctaaatctctagaagcattttatatatatataattttttttttttttttttttgagatgaagtctctctctgtcacccaggctggagtgcagtggcacaatctcggctcactgcaatctctgcctcccaggttcaagcgattctcctgcctcagcctccagagtagctgggactacaggtgtgccccactatgcccggctaatatttgtatttttagtagagactggatttcatcatgttgtccaggctggtctcgaactcttgacctcaagtgatccacctgcctcagcctcccaaagtgctgggattacaggtgtgagccaccacgcttggcctaaaagtataatttttaagcttttgaatgtatttggcataacttcttaaatgggaagagcataaatgatttttctcatgagaaggataatttttctattgattatgtaatctgatttctccgtcaaagtttactcaatgtaaggaaggttaacaagaataaccaagcccaaaatttcccagagccaaatttacatgactggcaagaaatcctggttataagagaacaattccattcttatgatttgcagacaatggaatattatttagtcataaaatagtagaataaatagtaacagtgtatctagatagcttcagtgtatccagacctgaatgcggggttccagttatctccatactcccaatttacatttcttcaggtatttgattgagtataatctatatccactagctttttctccttgtagaatgtgaaatatgggaccagaaggtaatctaaacctcatgtactatatggtcatctatttatagtcataaataataaaagaagactatttctgtggaagcctaattgttagttattgttttaatatcgctgttctccatgaatttcaaaagatcaagactggccaggcgcagtggcttacacctgtactcccagcagtttgggaggcagaggcaggcagatcacctgtcaggagcttgagactagcctggccaacatggtaaaaccccgcctctactaaaaatgcaaaaattagccaggtgtggtggtgggtgctggtaaccccatctgagaagctgaggcaggagaatcgcttgaacctgggaggcagaagttgcagtgagctgagaccatgccattgcactccagcctgggcaacaagagcaatgcttcatttcaaaacaaaaacaaaacaaaaacctcaaaagcaccagttagtactcgcaagaagctaaaatctgcctggtttcagatgtctgagtggagctatcaagcaggatgctgtagttgttgaaaaagaagcttattaatcttttagacaaagatctaagggtattaggtaaaggccatcaagaaatgaaaagggcctgattttaaggccatttccacatatgtagacaaagccttgtgtcttttagcagcctttgcttttgctgcccgctcagaccttttccctttgagacctcagtgaaacagacaacccaagactttgaaattttacagaagaggcacagcttgccatccagttatctaatgctatgtaacaatctactccaaaacttaatgacttaaaacaattgtcatttctttggctcactactcggcatgttaggcaggtctcatgaagaaggctcatttctcctctctcaatgtggcattagatggggtagctcagctagggggctgatgggttcatcttgcaagatagctcaccctactagctgatcaggtggtcctggctgtcagtggttgcttgggcttcctcacaggttggtagctgagttccaagacagcaaggtacaagtccatggcatttttgtgttctggccttagaagtcacatagcatcactcctaccgtactctttcagttgagacagtccaaaagatccaccttaattgaaggggaggggacaaagaccccaccactcaataggagcagcgtcaaggtcagtcgcattgtaaggagagcagctgagataggagagaccatttgaggccacctttttttttttttttttttgagacagagtctcttgtcgcccaggctggagtgcagtggctcgatcttggctcactgaaacctctgcctcccggattcaagcaactctcctgcctcagcctcccgagtggctgggaccacaggagtgtgccaccaagccaggctaattttgcatttttagtagagacggggcttcaccatgttggccaggctggtctaaaactcctgacctcaggtgatccacctgcctcgaactccaaaagtgctgggattacaggtgtgagccaccacgcccagccagagaggccatctttggaaaatacaatctgccccacccaattgcacagctttacctcaagcttggccattttcttcagcccccacaaaaggacttcctttcttccttccttactctcacccttccttcctgtcttccttcctttcttcctttctgtttttccttctttccctttctttttttgagaagtgaatcctgtatgtttggcaagcttctgaataagtgtacctttgaaaaagagggtttgattcttagtaagtgaaggcaaaatctagacactcggaactagtgaccagacagtggattggagatgtgtgtgctgggtcttttcttgggctaaagtgctttgaaacagttctataactgcaacctcttctctagcagacaaagaatcctctgaacaaggttctgaagtcagtgaagcacaaactaccgacagtgatgatgtcatagtgccacccatgtctcagaaatatcctaaggcagtaagtacactggagtaatcattgcatacgagataagacgataaataatgacagtggccagtcatgggggctcacgcctgtaatcccagcaccttgggaggccgaggcaggcagatcacctaaggtcgggagttcgagaccagcctgaccaacatggagaaaccccatctctactaaaaatacaaaaaaaattagccaggcatggtggagcgtccttgtaatcccagctactcaggaggctgaggcaggagaattgcttgaacccgggaggcagaggttgcagtgagccaagatcacgccattgcactccggcctgggcaacaagagcaaaactctgtctcaaaaaaaaaaaaaaaaaaaaaaaaagcaataatgacagtgtgcttagtggccacacaagtgaagggcaatccagttttaatgaagctgatggaaaatgcaaattgtttagttaaatttatgtttcgtgtgaatgaaggtcggctggtacagtcagataaaaggatcattttcttgagatagtgtaaatgatgacttgcttcaatacttctgtcctatctggatcctttgcctcttactcccatatcctccattgtgtcctgtaattcatgcccagcctgaatggtacccctgcctttaagtccatctaaggaaaacgggtttgctttgggagatggagtctggaagagaggacaggattcttcatgggagggctcatggagatcattccatttctgctgttttttactcaacctgtaattatctattaaacagttcagcctcaaagctctttcagaactgatttaagagacacgcatcaaaaaaatataaaaaagaaaaaaaagccggttgcggtggctcacgcctgtaatcccagcgctttgggaggccgagacgggtggatcacgaggtcaggagatcgagaccatcctggctaacacggtgaaaccccgtctctactaaaaatacaaaaaaattagccgggcgtggtggctggcacctgtagtcccagctactcgggaggctgaggcaggagaatggcgtgaacccaggaggcagagcttgcactccagcctgggcgacagagcgagactacgtctcaaaaaaaagagacacacatatattaataaatatccacacatatattcagtaatcattgtgttctaaccttgtgggttacacatgaggtagaaaacaattactcttaagtcgctgctgcctgacacatttgtaggtcctcaatatttgttgagtgagtgactgaataatagattcagagtgaattgatgattatgaacttcattagaaacattaaataagaatgtaggatgacctaaaaccaaggaggtagattgtgtaatataaagtctgttgtaagaaatcagaaaagggaatttatggtttcttttgtagaggttggaaaactcttccttgaaagctggaacatgtgcttgagaactgcaggaaaatgaaggatattggagtgaggagaaaaaactcaaagtcagtagacttaaacactgaatataacacatagttcaatttcagctgaggtgtggtggctcacacttgtaatcccagcactttgggaaactgaggcaggcagattgcttgaggccaggaatcaagaccagcctgagcaacacagcaagacaactgtctctacataaaatttaaaaactagctaggcgtgttggctcacatctgaagtcctaagtatttgggaggctgaggtgagaggattgcttgagcctgagagtttgaggctgcagtgagccatgatcttgccactgcactctagcttaggtgacagagagagaccctgtctcaaaaacaacagcaacgacaaaaccagttaagtttctctttgtctgaacttttatctatcatatctttttttagatattatgtagttatctgacaagtgtttgtaagacagactggagccacagaatgttggaattagataacacttctatattaccaaggtaaagaagattaaatgatgtgtacaggattattgagttagtgaaagagctgaaactccagttgaggtttttaaactgcgcaacctctcaagtaaccaaaaaaagcagccagctgatcagcaaactcatcttgaactgtaacaagccagccagatttcattaaaaacattacctaaattaaaggctcctaagtaagatatccttttagaaaacttccttgtgtgccccaaagtgttacttgagaaattaaatatgagaaaggagcctatctaagcaaaaaattagtgttattatcaagttaaacgtacaacacaggcacatatatattaaattattgttatattccaaaatgtccaggcatgaaaggtagagggggttgaaagctcagagtcaaaacttgagttctgtcactcttctgcctggggtcagctgggataaatggaaatgcagtagagtgtaatgtttaagagcatggagatttggttgagacagtgatttagatcccagctctgctacttaactagatatacagctttgagagagttttttaacctctattaggccttgtctccttatctgtaaaatggtagtattaagtatacccatctgatactgatgtggcaagattaaaataagggtttaatacagtgcccgagacaaattaagccctaaatgatagtgaggatgagtgtgatgataatagtagtctcatttctctgacctactggagttctcaatgttaagctttttttttttttttttgagatagagtcttgttctgttgcccaggctggagtgcgtgcagtggcgcaatctcggcttactgcaacctctgcctcccaggttcaagagattctcctgccacaggctcccgagtagctgggaccacaggtgtgtgtcaccacgaccagctaatttttgtatttttagtagagacggagtttcactatgttggccaggctggtctcaaactcctgacctcaggtgatccacccacctcggcctcccaaagtgctggaatttacaggtatgagccactgcgcccggcctaggttaagcatttttttttttttttttttttttttagagtctcgctctgtcacccaggctggagtgcagtggcaccatcttggctaactgcaacctccgcctcccgggttcaagcgactctcctgcctcagcttcccaagtagctgggactacagacacacgctgtcacgtccagctaatttttttgttttgagacctagtcttgctctgtcacccaggctagagtgcagtggtgcgatatcggctcactgcaacctccgccccccaggttcaagcaattctcctgtctcaccctcccgagtagctgggactacaggcgcacgccaccatgcctggctaattttttgtatttttagtagagatggggtttcaccgtgttagccaggatggtctcaatctcctgacctcgtgatctgcccgcctcggcctcccaaagtgccgggattacaggcgtgagccaccgctcctggcctccctcttcttaacagttactaatgaggagggagcaatcattttcatttgctctatggtcccagattactgtttctttagcaatagtgaatatcgagaacctcaaaattttttctcttatcgtgtcaatttcaggtgtcaggaatttcctgacccttatgtatgccaggtagtaagttttggcagccctgccccccagccaaattaggtggcacatctgagctaataagccaaagggtgttatctggcactaatccttgcagggtttctgccagcaagttcaaatgagttgatatatatttcaatggttaatattactaattgcatactttctttgctgttcagccccaataaaattacataatggaattagctcatgtaaagaaagtattctgaatccaacaaaaaatattagattgaaccatatattgtcatactcatagataaaaaatggttgacaattgtcagttctgtatagtccaacctaatatgaatgaataaaacatctgtgtgtacttggatcaaattttaatcttattcatcctcccatttcaccattgttaccagaataaacttgatgtagtctgcatgaatatggacttctgattattgtcccaggattattagcaagtttaaaaaatttgctgggtgtggtggctcacgcctgtaatcccagcactttgggaggtcgaggcgggcggatcacctgaggtcaggagttcgagacaagcctggccaacatggtgaaaccctgtctacaaaaatacaaaaattagccgggcgtgatgacgggtgcctgtaatcccagctactcaggaggttgaggcaggagaatcgcttgagcccaggaggtggaggttgcagtgagccaagattgcaccactgcactccagcctgggcgacagagcaagactctatctcaaaaaattgttttgttttgtttttttaactaggcaggtgtggtggctcacgcctgtaattctagcactttgggaggccgaggtgggctgatcatgaggtcaggagatcgagtccatcctggccaacatggtgaaaccccgtctctactaaaaatacaaaaattagctgggcgtggtggcgcgtgcttgtaatcctggctactcgaaaggcggagaaaggagaatggtttgaaccaaggagtcggaggttgcagtgagccgagatggttcccctgcactccagcctggtgacagagcgaaactcggtctcaaaaagaaaaaaaagaaaaataattttagatgtacaggaaggtgctatgtaatgtttatttagttttactcttttttcttcttttttggtaatgttatgaaacatgtatttttcaatcaataatgttttggggttctatccatgtcgatatatttagctttttatagttccttcgtcttaactgctgatcgatattgcattaaaataatacatgacctttcgtttagacagaactctaatgggtaatgattgagatttcatactgtgtgccaagtgcttgatattcatgactctctcgggcttcacagcagccttatgagttattctttccttcaagtaattatgaagtgcctgttttagtaactgccgggctctgtgggcacaaaatggtggataagacagacttggtctcttctctcttgaatcttacatactactgagggaaaatatgtacatcagtgagcaaataagtaaagcagatagctctgagattctaagtactatgaaggaaataaatagggcgatataatagcaatgcgaggagttgaactaggataggtgttgaggaaagatttctctgaggaggggacgtttgaactgaaatctgaagaacgagaagggaagagctacccatgtactgggtagactgtactcatctcaggcaaaggaattggtaagtgtaaaggccctgaggtaggaaagagtttgatttacctgaggagtgggaaatcaaaagaaaattaaagtttctcttgcacacatgtatattattattcccccaccccctttcaaaggaggacagtgaagtctagggagaagagcttgctcaagggaatatttaatacagttttactgagtgtatactgtgtgccagacattatgccaggcattgtgccaggcactagatactcggtagagactttaatggggccgggcgcaatggctcacgcctgtagtcccaacactttgggaggccgaggtgggtggatcacttgaggccaggagttcgagaccagcctgggcaacatggtgaaaccccgtctctactgaaaatataaaaattagtcgggcatggtggcacatgcctgtagtcccagctactcaggaggctggggcaggagaatcgcttgaacctgggagtcagaggttgcagtgagccgacgtcgcaccgttgcactccagcctgggcaacagtgctagactccatctctaaataaataaatacagattcccaggagccactctagacagtctgatataacacagaggcttttatacattttttatagcaatcactatgagaaatacatttctgcagtatccaatactcttataaaagaacaagtttcaagaaaccaggcttactattaacatttgccatgcattctcctattccactagatagtgtcttatcctgtctatcctatcctattgtttcttttttaaaaagctagtgaaacccgctaatctgacccatcaaagtgtcaaaaaaaaaccagatttttcaaaacactgtatagtcaatagttttcttgatgtttgggagagttggatgttatgggagggttattaagagaaaaacatcaaatatcgtttttttgtttgtttgtttgttttttgagacccagtctcactctgttgcccaggctggagtgcagtggcactgcaacctccacctcctaggttcaagtgattctcatgtcagcctcccgagtagctgggattacaggcatgagccaccatgcctggctaatttttgtatttttaatagagatgcggtttcaccatgttggccaggctggttttgaactcctgacctcaggtcaactgcccgcctcggcctcccaaaatgctggtattacaggtgtgagcctctgcaccccgccaaatatcttcatttttaagaagcaccccagatgattctgatgcagaatcattgagagatcttgcctgctgaatttcttaggggcaggcacaggagctccacttgctttctaagagaagaaaagatggggtaagagccggtctttggagaagtaagggcattggcctggccagctagtgaaaagaagcatacaggagggcactcacagatagaggggagagcgctatggctggtagggaaccatcctggattgactcattactggtgtcacgatactgacttgcctgccacactgtggaaggaggagacttctgttggccttggtgtacttctggaaacttcctcctggtatccctgatgccaacatggacacagggacaattaaaagaaaggacagggtgatggcagcgactgtgaagtgggattgaaaatattggagttcctggccaggcgcggcggctcacgactgtaatcccagcactttgggaggccgaggcgggtggatcacgaggtcaggagatcgagaccatcctggctaactaaaccccgtctctactaaaaatacaaaaaattagccgggtgtggtggcgggtgcctgtagtcccagctactcgggaggctgaggcaggagaatggcgggaacccgggaagaagagcttgctgtgagccgagatcgtgccactgcactccagcctgggcgacagagggagacactgtctcaaaaaaaaaaaaaaagactggagttcctgtgggagggcagggtggtctggtggcctcctcagtggcatgcacttgagtgggcatgggaagccctgggcagctctttgctatagtggctgaagcagctactgaatctccagtatcagtcaggaggtcttttaggtcctaacctcaggaaaatactagcttggttttcatgaagaacactgtggccagttgcagtggttcatgcctctcatctcagccactttgggaggctgaggtggacagattgcttgagtccaggagttctagaccatcgtgggcaacatagcaagaccatatctctattaaaaaaataaaaataattgtccctatgtggtggtgtacctgtggtcctagctacttgggtgactaaggtgggaagactgcttgagatcaggatgtcaaagctgcagtgaaccatgatcacacaactgccctccagcctgggcaacaaagcaagactctgtctcaaaaaaaaaaaaaaaagttgagaaatagctgtttagaaatttatttatttgtatataatcatcgggtacaagcacagttttgctgcatttatatattccactgtggtgaagcctggagcgacgcacattgttcccaccaagcaacctcccatcatccaccctccccgccgctccgaatcagacatttttttttattctttctatatgtggagatgactgagaaaggctgtcctggagaaatgatccactggactgtgagagagaagagctgggttctctttataaatttcctatcaattaactatggcaattaagtcaagttgtcttttgatgccagttttacctataaaaggattctcagggaataatatagtagatagattatacctatggttgatttctagagagtaccgtaatgggttaattggatggcgtataagcacttggagcctcactaacctttaggaactaaataaacattttccttatcaggattcagagaagatgtgcattgaaattgtctccctggccttctacccagaggcagaagtgatgtctgatgagaacataaaacaggtgtatgtggagtacaaattctacgacctacccttgtcggagacagagactccagtgtccctaaggaagcctagggcaggagaagaaatccactttcactttagcaagggtgaggcatcctgtgtggttactggggtgaggaagtctgatgaacattgagactgagggtcagaattactctggatttttgtggggtgaatccagccatttcactttattattttattgttcaaagtgttgtgtgcatgtggtttaaaaacatcgaatggggctaaacattttacatgaagcaggcctttgtcccagctcttcacagatcacttcgcctgttcccacccttcctcaatccacggcttcccacatttcagctatatttatttttactttttgaggtggagtctcgctctgttgcccaggctagaatgcagtggtgtgatcttggctcactgccacctctgactccgagattcaagcgattcacgtgactcagcctcccaagtagctgggattgcaggtgtgcgccaccgtgcctggctagttttttgtgtttttagtagaggcggggtttcaccattttggccaggctggtctcaaactcctgacctcaagtgatctgcctgccttggcctcccaaagtgctgggattataggcgtgagccaccaagcccatcctatctcagccatttcttctgttatttacttccatcatatttctgagtattgatttttgttcttcctcttttcctgtttttttttttttttttttttttttttttttttttttttttgagatggagtctgaacatgttgctcaggctggtttcaaactcctggactcaaatgattctcctgcctcagcctcctgagtagctggaattacaggcgtgagccaccatacctggcttctgagtaacatttctattgcaatctcctgattcaccggctttagacttcctatctcggaccttaaaagttagctcttttgcactacactcatgtccctttccttcccatcgtaattgtatcataatttttatttaaatccatttaaattggttctgttattatggatatgtaaatattaattcttgcagaaccaagtagtatgcaatgattatatttctttacacgtattttttgcagcaatttttcattcgccttattttcattatacatattgtaattattttcgtgtccttcaacagtcttcccaaattttgaaataatcaaacctgtcaaattatctactcatctatttttttcctgaagacctctctccatcctcttgttctgctctagcccactgtttcattattactgctgctcatggagaatacgatcaaattctctcctataccagatttcttatctcctggttatcctctaatttattttcttattttaatggatcatattttcagtagtttttaaagaaagggcatatcacaagtgaaaatttgagaaagtcgtgcatgaaatctttttttcctaccctcatatttgattcaagtgtggaaatctttttcattcagaatttcgaaggagcctgggtgcagtggctcatgcctgtaatcccagcactttgggaagccaaggcgggcagattacttgaggtcagaagttggagaccagcctggccaacgtggcaaaaccctgtctctactaaaaatacaaaaattagccgggcatggtggggtgcacctgtaatcccaactactcgggaggctgaggcaggagaatcgcttgaacttgggagatggagactgcggtgaaccaagatcacgccactgcactctagcctgacacagtaagaatctgtcacacacacacacacacaaatgattttcaaagcagttggtccatgttattctagatccaggcaaggagtctaatctttttatgaaaactaccatgaataccactaatgaaagtcttggggctcacactgcaacagtatatgattctttgcttttttctcttacccttaatacagtaatagacctggacccacaggagcagcaaggccgaaggcggtttctgttcgacatgctgaatggacaagatcctgatcaaggacagtaagcatctgctttccactttgaaacaaaggagatattgagacagaaattcaaaagtttgagtttggttttgtgctgatgctgaatattttaataacttttttgagttaatttactcttaatgaatttcctatgtacttgagtataatttatatttgtgactacctaatccattacctaatcttataggttatttatttatttatttatttatttattttcgagacagggtctcactctgtcgtccaggctagagtgcagtggtgcgatcttggctcactgcaacctccacctccccaggctcaagggattcttgtgcctctgcctcccaagtagctagggttataggcatgtgccaccatgcctggctaattttttgtgtttgtagtagagatagggttttgccgtgttgctcatgtctggtcttgaactcctgcgctcaagcgatctgccctcctcggcctcccagagtgctgggattacaggcgtgagccaccgtgtccagcccatagtcttataggtttagttcatttctcacccatgccagcctgatgggccctttttttgtagcagcagtttacttgaatattgacaatgcccaaatggaataacaaaaagtgttgacattcttcttttttttgagacagtgtctcactctgttgtccaggctggagtgcagtggtacaatcttggctcactgcaacctccacctcctgggttcaagcgattcttctgcctgagcctcccaagtagctgggatgacaggtgcacgccacttgcctggctaatttttgtatttttagtagagacagggttttgccatgttggccaggctgatcccaaccccaggtgatccttctgcctcagactcccaaagtgttgggattacaggcgtgagtgaccacacctggtcaacaggaattttttgatgttgacataactaagtgaattttagatctcctttaaagttttaggaaagctggttgtccttattattccaataatctgaagaaggcctcctttcagagtttccagataaaatgtgggacatacccaaaaaaaaattatttggtcgggtgcagtggctcacatctgtaatcccagcactttgggaggctgaggcgggcagatcacttgaggccaggagtttgagaccagcctggccgacatggtgaaaccccatctctactaaaaacacaaaaaaatcagctaggcatggtggcacatgctggtaattctagctactcaggaggctgaggcatgagaatcatttgaatttgggaggcggaggttgcagtgagctaagattgtgccactgcactccaacctgggtgacaaagcagactctgcctctaaggaaaaaaaaaagttatttgttgtttagctgaaattcaaatttaaataggcatatggtttttgtttttgaaatctgttatccataccgcctgtgcatgtgtgtgcataagaaataatatggggctggtgttttatcttatttttaatttttttgtttgtttgttttagagacaggatctcactatgttgcccagctggtctttcagctcctgggctgaagcagtcctcctgccctgcctcccaaagtgctgggattataggcatgagccactgtgcccgacctggtgttttaattactttttgaaaggcccaatacttttgtttcatctgcttttactttgtctttggttagtcatagaaagaactgaaaaaggagccagatgaaataaacagtgactctgacttcagcatcactgtgggcttaaacagatgtaagcttacagagaacttttggacatggaaagtgatttggttctttcctttctgtgctaatgtcaaatttagctttcacttttttttccccagcatttccagaactctctcttcctttattcccttacagtgataatcattttctactcaattttagattcgattggtattacctttggctttctttttgccagtatggtctagcagacagagcaggctttgtaatcagaccaaccttgtttttattccagactctttgacttactagctctttgatctttttgatattacttaatttgaaggctcttgtgagaataaaattgagctaatatagtttacataaagcacttggtattgtgcccggcacattgtaatgctagttatcatccctttcctatgcaaattgggatgagggagtcagcattatcacttcgcattgttgaagttctcaataatgacatagaaacatagttacaaatgaatattgcctaatgggctgagaatggatccctttaaagtaattcctttgtttcagtttaatcatatttagctgtgcttttaaaagcttgaatttttagtcctattcctggcactctgtattagctaccaatatttgcttttaaaaattaataaaaatatgaaaaatcaagaataggcaaatccagagagatagaaagtagattagtggttcaggagctagggaaggagaatggggagtgactgcttaatcagtacagggtttctttttcttttttcttttagagactgggtctcgttctgtcacccaggttgaagtgcagtggcatgaacacagcccactgcatcctcgacctcctgggctcaagtgatctcacctcagccttccaagtagctgggactataggtgtgtgccaccatgcccggctaattttttattttttttgtagagacggggtgttcctatgttacccaggctggtcttgaactcatgggcacatcccatgatgttccctcttctaaaaggactgttactgcttaaattataccaattcctgacttttttgcttattgtcattttgtaaaatggaggcaagggaaaagtgattcagagaagacgttgtattgtttatgattacttttatccttattttatttttgaagcattaagagtatcaacagtgctgaattaaatgcaatttctttttagtttaaagtttacagtggtaagtgatcctctggatgaagaaaagaaagaatgtgaagaagtgggatatgcatatcttcaactgtggcagatcctggagtcaggaagagatattctagagcaagagctagacagtgagtcatttttttttcagttctaattatttccaaggaaatcatcctaatagtgaatatattttatcttcaatacataattattactatgaagttgataagacacaaagtggattgaaatcttatccctacaactgtatttatttctggatccaacattaaagtagtcagttgtgtatttttacccccatatacctgattacaactagaattgattttgaatctacaatgtttgaaaaggagatttttaaaaagacaagttattttcatttcaaatttatacatcagaattttggacctctcttgagcattttcgtataggcagctgatgcccattctttatgttatcatgcatccagtcttttttttttttttttttttgagatggagcctcactctgtcgcccaggctggagtgcagtggtgtgatctcagctcactgcaacctctgcctcccaggttccagctgttctcctgcctcagcttcctgcctcagcttccatggtgtgccaccatgcctggctaatttttgtatttttagtagagaccgtgttttaccatgttggccagactggtctcgaactcctgacctcaagtgatctgcttgccttggcctcccaaagtgctgggattgcaggtgtgagccactgcacctggcccatcttgtctcttaaaaagacattaactgtctcctctttcctcacattcactggtcattaagtcttatccattctacttgtgaattgactatgctctccttactacaattttttttttttttttttttgagacagagtctctctctgttgcccaggctggagtgcagtggtgtgatctcggctcactgcaacctccacctcccaggttaaagcgattctcctgcctcaacctcctgggtagctgggactacaggcacctgccaccacgccagctaatttttgtatttttagtagagacgggctttcaccatgttgcccaggctggtctcgaactcttggactcaagcaatccaccctcttttgcctcccaaagtgttggcattacaggcataaaccactgcgcccggcctccttaaatataattactataatttctttcttttttttttttttttttgagatggagtcttgctcttgttgcccaggctggagtgcaatggaccgatctcagctcaccacaacctctgcctctttcttaatcaagcgattttcctgcctcagcctccctagtagctgggattacaggcatgaaccaccacgcccagctaattttgtatatttagtagagatggggtttcttcatgttggtcaggctggtctcgaactcccaacctcatgtgattcgccctccactcagcctcccaaagtgctgggattacaggcgtgagccaccgcgcccagccatataatttctaaactggtcttcctgccaccggtttcttctaccccatttccatctactatagtaaatacataatacatttgatcactgccttcttcttaaatccttttacagtttgctatagatcagcatgttttaaaaacatttgtatttgagtacctttagttgggactgcgctgtccagtcttcactgttcccattaccttacatagctgggatgtcacctatcttatctgctaggaccttcagacacttaagattatccactagatcaatgtttttcaaacttccagacacacaccccattagtggatgtgaaactgaattagtaaatcacaaggaaatttgaaaaatgcaaaccaaaactgtgggaaagaaaacaggaattaaaggccaggcgaggtggctcatgcctgtaatcccagcactttgggatgccgagatgggcggatcacctgaggtcaggagttcgagaccagcctggccaatatggtgaaaccccatctctactaaaaatacaaaaaaaattagccaggcatggcggcggacacctgtaatcccagctactcggaaggatgaggcagaattgcttgaacccgggaggcggaggttgcagtgagctgagatcaagtcaccgcactccagcctgggtgacagaacaagactctgtctccaaaaaaaaaaaaaaaaaaaagaaaacaggaattaagagtacatagcacatattgtcttgtgaaacttgttttatgtattgtttaatgaatcatggtataaaattattcttactgatcattataaacattttttgaggaatactcctcagaccctaaggtttacaaagttcaaatgttagataagattctaattatattcctctagtatctttccaactgtgatccttagtctttttcctcatctataaaacgggaataacagcagtctctatcttactgagttgtgaagattaaggaagcacttaaataagggattaaggggcttagggtagtgcctggcataaggcaagtgacgttatctttgtgggctattttccaactcactcctatccccattcctaaacatgctatgttcttcctgacctccatgccatttgtatgtgcacagggaaaatccacttaagacttttctggtgatttctccagaaatcctttccaatttgtccattctggtgcagatgcctcgttatgtccccaaagcaacttgtgcttccatttattatatagcacctatacactataccattttcctttctccttcactagattgagtcctcttatgaaatgggtaatttcattcatttagcatccccagtacctaacctgacaaataccaagtatcaaagtgttcaactgagtgatgctgtttttttccctttcccaacagttgttagccctgaagatctggctaccccaataggaaggctgaaggtttcccttcaagcagctgctgtcctccatgctatttacaaggagatgactgaagatttgttttcatgaaggaacaagtgctattccaatctaaaagtctctgagggaaccatagtaaaaagtctcttataaagttagcttgctataa

SEQ ID NO: 15779 - DNA, 63363 bp, Homo sapiens; identical to SEQ ID NO: 1250

SEQ ID NO: 15780 - DNA, 63363 bp, Homo sapiens; identical to SEQ ID NO: 1250

SEQ ID NO: 15781 - DNA, 201855 bp, Homo sapiens
atggtcctggcagggctcatcaggaaactcggtaactgtcagcttgcccctcgcccaaggcaccccccgcgctctggccacttgctgagaatggtcgtgtcacgtttccgcggccggccgctccgcgaccgctccctctttcacccccgctttgtcaggatagcccccggggacccatctcggactttgtgtaaacttcgcggttcgcgtcccgaaggcaccagtggcctgcttctgaaaaaaactggtttattccgtcttcacgccgctcctgcccacagcataaataacgtagtctctttgcagtcgggaaataaaatagttttgtgccgttcgttgacaggtcatcagctggccgagatcagggagcgcgctctcaagagtattctctgcaagattgagcacaacttaatctgctacgctgatctcattcaggagaggcaactttttcttcatttgctggaatggttcaatttcccgtccgttccgatgaaggaagaggttctgaacctgttaagcagattggttaaggtagggtcattttgaaataaagaaaataatcagacgagtgacttgtttcttagtcatttaattgtagcgtttattgaaagttaaataattggggttaaaagtttttttaatcaaccagagatgtttaattttaattaatctgggtatatggttcatcttttatttgtgatactgaatcccacatggtctctgctgtgctcagaagtaacacagaacttcttttgagttttggtatgttctgtgtttttgagttatctttggaggttaatatttgtattctgtttttgttttctgacatttacatcttaaaaactagatatgtcagtatgaaagggagcactttaaaaataatgttacataaccgtgattcataaataccaatgttaagttgcttgcccatatgcttttagattggtattcttatgcctacctcaagagtagttagttatcggggtcagatatcaaagtgtaagtttaacctttcaaaactaaatcactgtacaatggtagaggaatcttaaactactttgacatcctgttgaccggttggggctgggaccataaggtgagtgtcagtggaaaaaagtaacccattaaaaaaataagagtagggattgataatgtgcatttctagcgttcagtgtgttggctcatctttcataaatgttatcaagtgttggatgtatgtctctataggtgtatgtgctcctcatggaagtgccttacttcggggcagagccatgaaggatttgtttttcagaaaaggaacatctgatataccaaaaataattttatgttttgattgctgtaagttatagagattttgatacagttattctcaagatcatcctcttcttattttagtatcccccagcagtccaacatttggttgacgttggtgcagtagagttcttatctaagcttcggtctaatgtggagccaaatctgcaggctgaaattgatggcattctggatggactttttcttcttccttcggaagttcctgcactatcttctgcctcataccaaaccaatcaaactggtaactctttggaatctgttaaatacaaatatattaattctaatggtaaattttaaggaaagggagattagatttttttaaaaaggatttctcccacctcccccaaacttatttttcttgtgttaacttacatgattttgacctttttcccctcctctactgttagtcaaaggatggtacatttgcattaattgctttttgggtcaggcctaaacgatgccagtgactttgcttttatgaggccagtttgacagattatttttttggcaataacaatgtatttttattgagcacatgagtgctcattgttcttagtgctttatatttgtatttttgaccttgttcgtcatattggagtataatgatatctgtcctagctcatgatcttgttgtggggaccaatcaaaacgacataatgcaagtatttttatatgctgcagtccatcatgatatacttgttaaaatccaagtcaaagagacatggatttaagtctcagttctgctgctagttgtgtgaccttggctaaggtaattaacccttccaggcttcagttttctcattcaaaaactgggataataagaaagaacaccgggctgggcatggtggctcacgcctgtaatcccggcactttgggaagccgaggcaggtggtcagaagttcaagaccagcctgaccaacatggtgccccgtcactactaaaaatacaatacaaaaattagccggacatagtggcgggcgcctgtaatcccagctagtagggaggctgaggcaggagaatcacttgaacccggggggcggaggttgcaacggtgagctgagatcactccattgcactccagcctgggtgacagagcaagactccatctcgaaaaaaaaaaaagaacactttctcatagaatcgtcatgagattagatgagacaatgtctgtaaagtgcttagcacagggcccagcatgtatgaaatgtggctgtgttggctgctgtgctgctgctgttgtgttgttgttaatgcctagtatagtgccttgcacatggaatgcatttgaattgatttgaagaaaaacatcttcatgcaatttatgtgactgagtagtaaaagtaaaaaaaaaaaaaaaaagttttgatgcttaacctgttagaccatattttcttctctgccagtactgttacagcttcagctgtgggtactgcggttcacaacaacaatagcagctgtcatttattgagttttgttgtgggcattgaatacattgatttaaacacatcatcttgttaaatcttaaagcagccttttgactgagatgttattagtcttactctatagctgagaataaaagtataaagtaacttgccccacagtaccaagttttctaacctgtagcagatgcaggattctaacattgctttatctggctcccaaacctgtgatttttaacaatatattttacagtttcgaagacatcacaaataaagtagagtcttacactgtgaatttttaatctgattccttgcgggtgaaagtagaggaatggtttagggctaaatgttatttttctttattagtgttaggaactattgccatgaaaacttaaaattacaaactatagttttagccttttcctcattttcattgcagctgaactgctgaacatataatcgcatgttatagggaattgtaaaggtattgaaagataatatttgactcctttgtttttgacaactttctttttaaggtatgaatgaaaattgaagtgatcaggaactatataattggagtcaagggagagggagatggattaggaagtagagagggatagtccttgaatactttgtagcagattcttcgtgtacattctaacaaataactgtgtttggctaacagtaaaagtgagagggaaaaagcttcttaactggaagtgggctcaatgtgcacattttttcctctttagcaagatagatcattcagaaaaaaaactggacttttttttaatttttaaaatgattccaatacttaagagaaaacattaccacttaaagaaagtaagtttcacttttagcaaataaggaatcgacaatacagtaatgtttatttccttttcagaattgtcaaaaaaccctgaaatcttaacaggatattttccccaagacaaaagtaatttccagcagatggaagtgccgccacgaccagtgggtgtgtatatgtcgggaagtaaatcctgttgacttgggaagttgaaaattaatgtacttttttcgttattgtgaagatgtatttttaccaaacttgaatgtttcagcaccaaactatcattaaatgttttagttgtttcaagttagtttaggatatcgagtagaaatgataaaattttgtgttattctaaccatatttgaacaactgtgtagatggatggtattaatggcagtagtatgtcgtactgaatgaacatgagtttttttttttttttttttttttttttgagatggagtctcgctctgtcgcccaggctggagtgcagtggtgggatctcggctcactgcaagctccgcctcccgggttcacgccattctcctgcctcagcctcccaagtagctgggactacaggcgcccgccactacgcccagctaattttttgtatttttagtagagacggggtttcaccgttttttttttagccgggatggtctcgatctcctgacctcgtgatccgcccgcctcggcctcccaaagtgctgggattacaggcgtgagccaccgcgcccggccgaacatgagttttttgaggcattgtgccctgcactacacatgtcatctcatttgttctccagcttaacgatggcaccatctatccagttacgccagccagaggctgaagatcattttagtttcttttcccatttcctcaccacccagttaattaaaaagttctgatttagaaccctgtttctggaatctggaatctcatctccatctttttgtatctggctgtgttcagcctcagctcacatgccacctcatcagagaccttcctggtgattctagccagtgatcacttcctatgtgtagttttcttcctaacacattattttttattatttttgttttaagtttgataatagccgtgaacattgcattattttcagtgtctggaacaataccaaaaaatgtattaggcactcagtatatattctttgaaggaatgaatgaatcctcctggagtgtctttgagattggtattattagtgaccacattttactaataaagacactgagattagaaaggttgaaaactttgtccttggtgaggcagttaggaagtagttaagtaatcacgtacttaccattttcttgcctgcacagttaagttgaaaaggatatgttcaagagtatatctgctgatgtcacatattcaaatgaactccatttggaagcctctgttattaaaaagctttcatggaaactcacaggtggaataacaagaaagaactgaaaacttgttaagccattagaatactttaccttttcattcattgttaggcttgtagcaagctttgtttttgaggccagatggctgagaggcttaattccatcaagatgagagacatctgaagggagggggaatctctagggttggtaaaggatgggtgtctgaatgaagccgatgaaaacattaagggggattgagattgttacacttttatgtgagttgcagtttgtcttgattgagggtctggcttattttggacacatttttactgtgtggtgtaagcctgtccttccctccacccacctctccttatttccttagaaagtaaatcctgcttttatgttagcaattttgaaagaagtaactgtgctatgtttgggaatttaataatactgctatccacatttagcgattccatgctcttttcaaagcacttggcagaaagactgccatttggaaggacttatgtagatgctatttctcagtgttgccaccttaacttgtactatataagatctgttaaaaataacttgcatggggatagtttaaaactgttgctttctcagatttcttttaatcttgttcgaacactgatacttgttttttgaccttacggtcttcaagtcatcttcgcagaggtttaaaacacctgacaccatataggatatttgaacatggctagatatggtatatcattatgttttatcatttttaattttgaaaagttaaggttttccctaaatgtcagttccttttatgttgaatttaagtttgatgttctggtcagccacagggtaaaatagaaaatttaatggaaacttcatatgtcagtctgtattggattgtgtttaatgctcttcttctaatacttattttgatatcatatgagttctgtttaaattatgaaaagagaactctcttatttatcctgtgatagaacaaatttgcagctgaccttgtttggtatattttaggttactgtaagatgcagcctttattttgggacttgttttaaagggaaaacttactcttaacattgtgaatctgtcatctctttattctttgataccataagatttgctctttcactgacagtaaatcagactgtgaagtgcttgaagttttctacatttccttggctacccctgaccaccacagacagacatgtcctctcctctaatgaaaggtacggtgcttgatgtattttcaggtatttttgttcacttatagtcattaagtttgatagttattacaatatgttttaccaggaaaagatactagtggcagtgaaaggtagtaatggtcatatttaaatgatttttatttttcaaaaagctagccagaaaaaaattcctatttgcttttaatcaatctacacatcaagtttcttttatttatttatttatttatttttgagacagagtctcactctgtcacccgggctggagtgcaatggcaccatctggctcaatgcaacctccgcctcctgggttcaagcgattcttgtgccacagcctcctgagtagctggaattacaggcacgcaccaccacgctgagctaatttttgtatttttagtagagatggggtttccccacgttggccaagctggtcttcaactcttaatctcaagtgatccgcccctcttggcctctcaaagtgctgagattccaggtgtgagccactgcatttggcccacgtttctttttgtggttggactcttgtgtagtccttggtgacaggagttttctcttattggccagattctcttattggccattgcttatgcccttgattgataaaaatggaaaattgaacataaatgtagtctttttggcagaatatatttcaaaatgtgggcttcattaggagacaaattaaaccatgtggataaggttgggtaccactgatccaatctaatgtaatgactgttaattgattgctacccacaagagtaaatagctgatatatagagatttagagagtattttaatgtccagattcactttgtgcagtttcataaatgccacaatacacgagttatctgcttttttggggtataaatctggaaaataaagaccaatttactagggctaagtccagattacaggtggatgccattaagtgatttttaataatgacatgaattctcttggaacaacatattcgagaggcaaagtgcacatgggaaagggttaggaggttgtatgatctctcagttttgagtcagtcccaaaggcagagatggcgataatttctaatgcatgcctgtagatagtgaatggtggatagtataatggaactgggctgagagaaggggtgtgatttttttggggtggggagtgaacaactgccaatcctaggtgggcagaagttgataggtgtcctctgtatgggataagaggggagtcctaatctgattcaccttgagtggggaagatcagtaaggactttaattcttagaatttgcctctgtacttttgttctgtctcatttcttaatttatttggcagatttcctagaattgtgtgctctttgacctcattgaactcgttttgcagacttgtgataatctctgagggtacagtgtttagtatgatgtcgttcctgctcttgagagggtctagtggggaatgcaaaatcaacaggcagttaacaatatcacaaataatggacaaacggaaggagcactgccctagagttgtttattggttagggaaaagatctaggaaggcttttctggagaagtgatatctcagctgagacccaaaagattgttaatggagtcattgtgtcagtaggctacttagaatctggaatagatgaactcttcttaaaaatgattaacgctatgttttgtagctctttaagaagtagtaaccacactttaatctggaacacctgtgaactattgaaggatgttatcatgcaagattttcctgctgagattttccttcaaaggccaaaaattgttcaggtcagtgccctctataattgttttagattttgaactagagaactttttgcaataaagcaaattttgcagagtaggagttcttgggaaggaactttgtactcatgtttttaaaaagtgaagtatttggctatttaaagcacttattcgctaacttgggtggatagttatagttcttccaatagtagtagtttcatttgacacttgcagtccagtctggccaccttgagttaccatttatggatcacctaaatggtagagtagactttggacattgagattgtgcaggagcccttattaaaagtaagaatagcattgcttcttgagtatctcgtttatttaacgcacagtgctacatgctgggaaaatacagtagcggtgagtaacgcagatggattcttttctttttttctagtttattgcttgtatagtagagagagagggatccagggtggggaattgcaacatcttcacagcagccagtaatggctcagcattctcgctccacactcccagggctgaaatggactccagtgggtgccaactgttaatacctaggatcaaagctggcaaatgatcgcagaggaaagctgttaattactaaaatgtggttaaatggtttagatgcttgagatgaaaagggcttgctgtgatttttaaaatgttctctgtaatgtaatgtcctgagtggggaataatttctgtcttctctcagaatggttactcaactaacagattttagaaataggaaacactgactattctatttaaatgttgttgtcttattttattttgacccatctccttgctttatgccaagtcatatttgcccatttcagtttcttatgtcttacaaatatttggcaacttattttctcttgattattcacttaggcttacttacttaagctccacattctgctttgaagttgagctctttgttcccttagtaattttcacggctcttcttgatttcagagccttttatctctgttgaaactggcctttggagatggaaagcatcgcctggcattacagtcggtgtcctgcctgcagcagctgtgcatgtatttaagaaacagacttaactttcaccgagatccaggttttttctccaataaacacggtatttatttttatctgttcattagccactggtgttatttgtagattcttctgggaaccttccattatagttactgttagggtttattgtgtacgcattttcacaacataaactccccactcctaaatgtattcaaatgattatctttacagattgcgtgaatgacagaaactgccatgatctcttgagcctttttttttttttctggataagagatatttacaaggtgtttttcttttttctcccaaacttgcagagattctatatagtgttgttgggatgtagtgactcggatatttggtatggctattcatgtaggactttggacaatttagcaagttacatatagtgttaatacattgttttgtttgaaaaatattgatttgaattttatgaagagtatttttatgcaacttgcaatgtagtcaagtgttgcagcaatgtgagacttcagagaaaaagtgccacctaatggccaaatagagtaccagcctggcttcgacaaaaccagtaccatttaggatttttgtgagcttaatgcaacctgcatcgaaagtcaaatattatagtcatttgtcatcatgtttcatagttaatccctatttcattgggagtttcactgatcctgtgctacttgaatatttatgctttaccttggttttattctagatcttagagggtatggcattgtacaaatgactggtaatagagaacgtctgggtaccccatacttcaacagaaaaagagttacaatgttgatttaaaaagttgatatctctgaagaattgttaatgtatttaataagtatgtatttattacctgttttatgcccctgatattctagcctctagggaagtataacactgaacaaacgaataagatccaagcccttatgagcttctattttaaaaggctgggcacaggtgataaacaatcaagtttgcttgagataaggagaagtacttgaaggaaataaaaagggtgatgtgacagaatgtggttgggtaaacatagcttcatttaggatagtcagggaaagtccctcagaaagcttctattttaaaaggctggggacaggtgataaacaatcaagtttgcttgagataaggagaagtacttgaaggaaataaaaagggtgatgtgacacaacgtggttgggtaaacatagcttcatttaggatagtcagagaaagtccctcagaggaggtgacctgaagggtgacaaggaatcgtcactcgaagagctgcaagaagagtgttccagggaaggccaggcctcaaggttagcactgagggtgatgtccttgagcaactgaaataaagcccatgagagtggactgcagtgagctgggcagaagaggagaatgaggtgacatcagagaggtagttaggggccagagtatattggggcttgcagatctttttaaagattttatattttctttgaagtgtagtgagaagctcttggagagttttttttccccctctctctgactgtaaatgcttttattacctaattctttttttaaattggggtaaaataggtataatataaaatatgccattataaacatttttaagtatacaatatagtgacattaataacattcacattgttgtgcagccatcaccactatctgtttctaaacctcttcattatctgaaacagaaactctaatcattaagcagtgattcctcatttttcctttccccaaagctggtaaactctaatttactttctgtctctgattttgtctattctaggtacctcatctaagaggaatcatacagtatttgtccttttgtgtctggtttatttgtaatgttttcaagcttcatccacattgtagcttgtatcagaacttcattcctttatatggctgaataatattcctttgcatgtatatcccacattttattcatctatgcatttgtcgatggacatgtgggttgtacccacatttggcggttgtgaataatgcttcagtgaacattggcatgcaagtatctgtgcagtgcctggtttcaattcttttgggtaatacccagtgaataatagtgaaattgctgcgtcatatggaaattctatctttagctttttgaagaatcaccaaactattttccacagcagctgtaccatttacatttctatcagcaatatataaagcttccagtttttccacatcatcactgacttgttcatttttttcttttttaaaaataatcgtagtcatcctagtagatgtgaagtggtatctcatggttttgatttgcatttctctaaagacctaataattaatgaccaatgaatctctaataactttttatgtgcttattgtttgttcatgtatcttctttggagaaatgtttattaaagttctttgcccattttaaaaattggactggtttctttattgctgggttttaggttacttatatattctgaaaattaaacccttatcagatatatggtttgccaatatttcctcccactctataagttatcttaacactttcttgtaatgttcccttggtgtaccaaagttttagattttgatgaagtccagcttatctgtctgttccttggttgtttgtgctttcgatgtcatagttaacaatcgattgccaaattcaaggtcatgaagatttattttttccgctaagagctttatggctttagcttttatatttaggttgttgatccactttgaattaatttttatgtacagtatgaggtagccattcttggagagttttaagcagacgagtgcatgatctagtgtttttctgctttggtagtctctaatgttgtaactgaatgccattgactagaaggtcccatgtaatcaagtcagttagatataaacctaaatgtactaagtgaatacttatagaaaagtttgatctttgcttttgtttttacccctgtagaaggattcctactatcttaatttgttaatgtttttggaagaatgatacataaataccacatagtcagaagtctgtttctactaaagaataattttattttttctttgtttccccagacacagtttcccaaaattcttctttgtcttattgtcatgaagcaagaggtactcatcattcccagaatccttccccaggaagcagcagccctcggccttctgtggttgggcgcacaggccagcgacccagaggagatggccaggactgggatgcagcgtcctctaggtgactgctagcagtgtctctggggaaatgagaaatgccggttaacttgtgtgtgtgttaatttcagaaggagataattatttttctgtccttttttttttttttttttttgaaacattaacacaggtataggccttgtgttaaaccctggcttcatactttttttgaccatgatccacggtaaggacagataaatattacatcgcaactcagtgctcagtacttgaacatatgctctgtttatgtatatatatgtgtgtgtatgtgtcccccaaaacaaaatgttcacataatagtattctgatactatgtttgacacactgaactatattttcagttccgatttcattagaaaagaaatgattctgacccaataaattgtttttaccagctgcaaacggaatatgatcaagtttaaaagaatagctttaaatgatagatacattgttgatagtattttacacatatttttgtaagtcttataacaaatggataagtgtttactgttaaaaggaatggttggagaattttataaaataaggactccttcaaggtgaacaatttatggtatttgtttgtgtaaatacagatttttttcttttttttttttttttttttgagacaaggtctcactctcttgcctaggctggagtgcagtggcacgattatagccttgacttctgggctcaagtgatcctttcgcctcagcctcctgagtggctgggaccacagatgtgcactaccatacttggctaagccttttattttttgtagagatggggtctcactatgtttcccaggctggtctcgaactcctgggctcaagtgatcttcccatcttggcctcgtaaagtgctgagattacagacatgagtcaccatgcttggcccccagtgcttggcacccagattttcatacaccaactctgcttaaaaggattggtgtggtatttgtatgttaccttatccttgggtgcaaatgtgttagaaacatattagtctctttagtgtcattctaaaaaatgttcactaagttaagcattggtctgttggcttaattattttcttgcaatactgctactactgttaacaagctaatactgattcatacctgctgtgtgtatggtgttatgccctgtgctttgcatactttgtctcctttagttgtcctagaataggattgatattatatatagcattagtattattattatcatcctcattgaggtttagagaggttaagagcataacagttggtaaagagcagagctagggttaaataaaatgataggagagtctatgctcttagtccttatattgtagttggttgttcagccatgtttttctctttctcctgaagcctttctgcctcattctcttgtgtgcttcatgcttctaagttttcactcctgagtgaacagcttcctcactgaaacttcctttcagagttacagagaagcccgagttgtttccatattttggggtgcttggtatcttgaaattgaagaaacgacaaagttggtttataatttgggcaaatttaaatgttccatagcattaatatgtctcttgtgatccagcttcggttgtggataacatcaaaagacaaaattttgaggctctttgtaagtgtgaggctctagcctttctacactttttaaatccttactccagcactttacatccgaggtaagaactttttaatgaagaaagccaaggacaatgggatgttccgtttttttgggtgcatttttgaagtcactacatgatgtcgaatgtactaagtgaagtaatacatttcccatgaggtttttctagaaacatccttcatttactaacactggcttactcagaacagtggtgaaactcagaaaatctaggaaacggtatgaactattggttttgtctctacacgttgattacagaagagctttcctataaatctgcttatttccttttggaaatgaatgggttatcagtgctaatattgattcctactataggaatgttgacatgttttgagatatcagcctgacaagcaaaatatagatgcatttttggcttcatttacaatttagagtctttttttttttttgagatggagtcttgctctgtcgcccaggctggagtgcagtgtcgctatctcagctcactgcaacgtctacctcctgggctcagaagattctcccgcctcagcctccccagtagctgggattacaggtgtgtgccaccatgcccagcgaatttttttttttgtatttttagtagaggtgggatttcaccatgttggccaggctggtcttgaactcctgacctcaggtgatctgcccgccttggcctcccaaagtgctgggatgacaggcatgagccaccactcctggccttgagtcatctttatggaatttaatttcgtaaatttgtcaaagtttctacaaatctgaccagagttgaatgaagcagtagagttgtgacttgtatgaggcttctaatatgcgaggcagcagatatgcagtaaatctgtttggggattgtttctgtatgcaaggtttatcatttgtttatcttgcagtggaagtagtagtcatgctcatgtaaactccaggatatccgttcattcacctttggatatgggacacatagatctgccagagctggaaactgaagacacattggaactacaattccagcagctcagtcttccccagttttgtgtctccattctggaatcagctgttcctctcttaagaacaggttagttgttttagaaatcgtaattctgatataatttgtgtctgttttgtatttcgttaggattttcctttttttctcttctatgttagggcctttggaatctgtatttacttatcttttgggatataaatttctaaaaacctaataaggtctttattatttttaaattaaatgtggatgccttggagggctattcagcttgcccttccattttatgagtttttattggcacaggctttcatgcttattttttttttagaatttttatctattttttgcatttattcttgctgtcatctatttttttcttttttttttggactgtatggctattttaaatttgagcagtgacaacattcagcaactggaataaggtataaaaggtggactggcatgaatagaccagaataaaaaaatctttggcttttgctctttggaaactttttgattagctgtcagttgtttactcttcccattcatttcttgctacttaagccacttaacatgttaaaaacaaaactccaaaactggattcttacctttgtagtaatttttcttaaaaaagccacaaatattttgagatcccatttttgttcagatgtactaggaaaatttgaagaggttgactgaaatatacactggtatttaattgtaattgtactgaacaatggtaacagcaataacaatatgacagaggtctgctgagtctagtaatgaaacaacagttagcacgtgtccctactgggttctgccttcatacttggttttgtgtgcattatttcgtgtatttttcatatcaacccattttgttttttcactggtagttaactaattttatctccatttttacaaatgatgaagctgagtttttgagtggtttagaaacttgcctgaagtcaaacggctaaaagcagggacttgaaccacgattcttttgaatctaaagtccatgcttttaaatactttagcattttgcaaggtgtaaagaaagttttagaaagaaaacagtcatgatttttattctcaaaatctatacattttcaacgtttgataaactcatcaggatataaataagataaccaagttttgccctttttactttatactggcaaagtaaaaatatatattccaagttaatggttctttaagtcccatgtctattttttgccacttggaggtgatggaggagaaagaagcaggaaggtatatatttggaaaacatttaaaatgtttttatcctgaggaaaactgtgtactcatactttttactcagtaagtgcttctactagctggaactatatattaattcatatactaataatgtgaaatgaagaaagatctgaactttggcatcataaagtacatatgtttatctgtctggtaagctgagaagaacagtcttagactttaatgattttgcatttaacctttccttaatttgctttaaaaagtcagattgataattataaagctatatcttggtacataaaaactaaatgttctcctgcccttttgtggtaaattatggcatgatttgtaactgttcaatatcgtaagagatttgtaagagaatttggtccagctcttctagtgaaaaaattaatctagatccttccaatctggtagtttgttttactttgattcattagaacttaacctttgggatgcggggtgggaaagtctcgtgtgaatgttcgtctcacacaggataatggaagtggagtctttgttattctgtctctgtggagaaaggaggttgctctggtgggtgtgactttgggaagtttttttgagtttaaggtgagtacaaatagtttctttagcaaatgttagcatgttcatttattcctttagttgctccagtccaagcttagcttcccaggcaactcctgtgtgggaaaatactaatttatgagaaggctcacgccttctagtactaagtagaaattattggaatacgttttctaaacctttctggtgctttgtcacatattacgtgtaaaatggatggtccctaaattcgaaaaattattttaatctatctcacagtacttgttagattattgctactttcaatatcttttccaattataaatgtatttgatttgttatgtagtaaagtagtactgtgactggaacagaagccttcagtgtgattgtaaattgtgatttctctacagttctaagaacattagaaaaaaagagaaaatgttggagcatgactaactagaaaattgagcaatatgatattcagctgattattttaaagttaagtaacttcttctcctttacttttttctgtttgtattcctaggtagcagacaagtgataataagagttctggaattgcttacagaggatatgacacttattggtgaagcaatttcaacagatatctgggatgacagcagcctttttggtatagatatggtaagaatcaatgttttctttgggatatagggaatagtattttttaagattttggttcttttaagccggtttcattgtctcattcgtgttcaaaatcttttttctttttgactcaatatgtcccaggcttatgttataaatagcctggaacaggcctatttttccaaaggttctggttacttctaatagtggaacgtatattaagaccaaaaccaggccattagaggtggttatagctactgtgatatcattcttttctttcaggaacaattaggaaatacgtatttttaaagatcgtgagtttattgctatttttcttattttaaatttgtatttcttatccttgcgcttgtagaaagtcttcgttcctagcaatatcagcataattgcttattagctttgaccttaaacatacataagatagtttcagaacagcaatattaacattgctatgaacaattctaatgaaaagttcaagatttcctggcagttctttttgagatagactaatctcactaaggatatacagtcaaaatactgtgccttaaagctaccgttacccattcagcatacagttagatttttttttgtttgttttcactattgggaattgttttttcttcataaaaatgtagctcagagatgcctctctcccatccagttacctttaagatgttttccttattggtagtcatttttattttctggctatttttttctatttttattttatttttgcaaatgtaagcaactaagtatgtagattcttatcctctccccatcctgcataaaaggtggtatattatagacactgttttgcaccctgtttttataacttaaaaatacgtcttatgtgcatagaatagtaggtatgaggattattccctatctatctatacgtgagattttctcgttcttttttataggtagcaaatgcttcgttgtgtatttgttaacctagtctcttgatggatattattgttaatataaattatgtacaaagaataatgggcttatgctatttcataaatgtgcaggtatgtctctagggtagatttatttaagtgggcatgctgtttttctaaaaaacttttatttagcttcagcggtacgtgtgcaggtttgttatgtaggtaaactgtgtcatgggggtttggtgtacagattattttgtcacccaggtaataagcctagtacccgataggtaatttttgtggtcctcctcccactctctgccgtcgagtaatccctggtgtctgttattcccctctttgggtccatgtgttctcattgtttagctcccacttataagtgagaatatgtgtatttggttttctgtttctggattagtttgcataggataatggcctccagctccatccatgttgccgcaaaggatatgatctcatgcatttttatggctgcatagtattcattggtgtgtatgtaccacattttccttaatcagtctcccattgataggcatttaggttgattccatgtctttgctattgtgaatagtgcagcagtgaacatacacatgtatgtgtctttatggtagaatggcctcaagtgatctgcctgccttggtctccgaaagtgctagaattacaggtgcgagccaccgcgcccggctgagccatgttgtttatgtagtagtacagcagttcctcacttggcatcatagataggttttcggaaactgtgactttaagcaaactgacttataacaaacccagttattttttctcatcagcatttagtgaaatggcatggaacttgtaatgctgtttcattaaagtcagtttccaagaacctgttgaccaagttaagtgaaggcttactgtagtttattcattttatttctgagtagtattacattgtgtggacataccacaatttgtttatccattcacctgttggtggacaatggggttgtttctagttattacaaataacattcctatggacattccagttgttccacatcttcaacatctattatgttcagttttttttttttttttgggggggagagggcattctgatagatgtgcaatggtatcttagtgggttttaatttgcatttccctagtgactgatgattatgagcatcttttgtaatttttagagagcaagtctaggtttttttttaaaaaaacacttattcttaagtattcttttcaatgccattgtgaatgaaaattttaaaagtttttggattgctcattgttagtatatagaaatacaattgatttttgtgtattgatcgtctatttggtggccttgctgaacttactagttctggtagttttttttgttttgttttgttttctggtagatcccttaggattttctatctataaaatcttgttatctgtgaataaaaacagttttaagatcatcttatctgtgaataaagacagttttatttctttctattcactctggatacctttaatttttttaaattgcctaattgccctggctagaagccttagtataatgttggatggatgtggtgagagccttcttcatgatttagagggaagcattcgatctttcaccattaaatacaagattagctctagtacatttgtattttgtagatgcctttataaagttgaggaagttccatgtattcttagtttgttgaaagttttgatcatgaatgattattgtattttgccaaatcttttgtctctattgagatgatcatttagctttttgaagagcagaaaaacttaattttgatgaggttcagtttcttagtttttcttttatggatcatgcttttgatattttatctaagaaatctttgcctaacttggaatacaaagagtgtttcctatgctttcttttagaattattacatatgttttaggttttatatctttgattaattttgagttgatttttgtatctagcacaaggtaaggaatgaacttttttttttatgggtatacaattattttctcagcactatttgttcaaatgactgtcctttctttcctgaattccttaccaactaactatatgtgggtttacttctggaatctatttgatcggttttctcttatgatgccaatacccaactgacttaattattgtagcttatagtgaaggcttatagttagctatagtgaagcttattgtaagtcttgaaataaggtagtataagtccttcaactttgttcttgttttttttttctgatatgtagtcctcgctctgttgcccaggctggagtgcagtggcgccatctcggatcactgtaagctccacctcccaggttcacgccattctcctgcctcagcctcccaagtagctgggactacaggcgcccgccaccacacacacacacacacacacacacacacacacacacacacaaaaaaaaaaaaaacctgctgtggttttgaatggaattgagttgaatttgtagatcaattcaggaaaaattgacatcttaatagtattgaatcttctgatccatgaataccatatatatgtcttcacttgtttagctcattatttatttttatttttattttttttaacatggaatctcattctgtcacccagactggagtgcagtggcatgatcttggctcactgcactgtccgcctcccgggttcaagtgactgtcactacagcttcagcctcccaagtagctgagattacaggcatgtgcccagctaatttttttgtatttttagtagagacagggtttcaccatgttggccaggctggtctcgaactcctgacctcaggtgatctgcctgcctcggcctcccagagtgctgggactacaggcatgagccactgtgcccagccttatttagctctttaatttgtctctgcattgttttgaagttgtcagtgtataggtcttatacatttgagtatttcagttttgggtcttgtccactggctgacttttctctttatggatcttaatatttgatatgtgtagtaatttctgattggatgctggaccttttcaatgttaccatgttgagtgtcttgattttttattttacccttttagaagcactttgggagggttctgaagcactttgggaggccagcatgggagcattacttgaagccaggagcttgagatgaacctgggcaacaaagtaagatcttgtctcttcaaaaattagtaacattagctgggcatgtaggtgcatacctatagtcccagctatttggaaagctgaggcaggaggatcactcgaacccagaagtttgaggctgacaggtggttatgttacttgtagagcagtttcattttctcaagactttaaaaaattttgctagaatgggtctaaaatagtggttttcaactggggggtaattttgcttcccagaggatgtttggcaacgtcgggagccatttttgattgtcacacctggagtggtgctgctggcttctagtagatagaagccagaacagctcaccacaacaaagaatgttttagctcaagatgtcagaaaaccttgaggaagtgttaaggttgagaaaccctgatctagaagaacctttgcttggggttaaactctgctcctgagatgtgatcctttgggacctctattgaatgtccaaagtgatgattgatgactgtctactctgcctggttgaagactgagttttattgtcttgtgtgagccctgggagttgttcaatttaaatctcagtaatcatctttggcctgtatttacagagtatctacctataatctaagccacctaatctcagcatggtctgggtggaaacttgtttaggtctctgaaattctttctttgcatagctctcccacaattcctaaccatgtcagcttccacaggcatcttcatctcctaaagtcatcgagactgtcagactctttggatttctcttgcctgtgtttgctgtacagtaattgttttcaggtatagtaggactctcattgcttattttccttctctctggcatcacagtcctgcaatgacactatgccactttctagttgatttctggggaaggacaggagatgtccttgttattatttcatggccagaattggaagttttacgtaaagtttttaattatgtcatttaagcaactggcctatctgtgagttattaggagcttaaatgtacatttatctagagtgaaaattctggatcaactttagaataatcattcaaagtgtggagagttcaggataccttgttttttgctgtttgtatttcagtagagtagataattttagaaaatatggaattaaattttgttttttttgtaagaagtgttttgataagtaatattttgcatgagtaatcaacatgtgtacagtagtagccttaagaatgttatattacaacataatatttaagagatctatggaataccagagtatgtctccatgtaactggaaaacatatcttttttaacatttcaaaatatcataaatcatttgtcatttaatatctttcattttgaaattgtcatctgataaccttgccttccttgaagatttggcattctatctcttctgttaatgtgaattcctaatgtctggtcttccttcctctccctttcttccttcccctctcccttcctcccttcccttttgctgccttgtcagggcagtagaatcaaaatttattagtcataaaaatatatattgactcttacgtttatcagttttttttctctttatgctattttgatgtaagtcggtctatatttaattaaacattgttacaggctgtctgaaatccttgtgaatagaggtctgaatataaaaaaataaattacagatatttacataataacaatacccatgtaagaaagaaacccaaacttttatttttttcataacacgagcctcttaaaaagagaaacaaactgcatattttaaaatgggtgtattttcaagtctttcattttctgataatagttctgaatcttggtttttctttagtccttaaggttatcacactattttgtagtacttttaggagatttttcacatattgaagattttcaacaagtaaatttttcctttgaagtgtgaggaatgctttatcagttgtttcttaaattaacttaaattttcttggccagaacatttatctgtaaaagttagtcattcacttttaacttttggctgctggtactttatgattcaatgaattatttttactttaaaggttaattctgttgtacaagtgccagttggtatgttacaaatgctaaataaaacagaagtacttcaaattatatttgatttacttttacttgtttaaaaagaataaatgtctcttttctttggctatattttaaaagaagcaaacaagtaaaatttcttaatgttcatacttttgccagttttcaaaagaaagacggaagcagtatttttgttgagtcattaaaggaacaaaataataaatgttgctatcaatttagaaattaagtacctgaggatatataatcaaatctctaggtatttccacacagtactaatatcagtaacatcaatcatgtctggaaccctgtaactcagcatggaagggaatttcaatttccccccttaattgaatatttttatattactcgaagtaaataaaagaaaaaatattttcaccaaaattagttatgctgacctaaagtatgtcatatgtcattccccctagtcctccatcatcaaatcaggtctattttttccctatttacatgctaagtcaggttcaagatgcaaggagaaagtagctttcacctcctgccagataacctagactcttaggtctatattctgtttcttttccgcatttcttctgtgtcattcctgtcattgcagtcattggaaagcagtcttttcatctttatgactcattgcttctaaattcccatctgacctgctgtgaactggtaacttcaacatcaaggcatgttggtagaattgtagaatgttggtaggacttcaagaggggctaagaggattgtgaaagaaactaaagatctttgtatccagtaagggctcattaaggatatttggaccagattgtgaattgataactggtgtagtgggatctctaattacatagaccttccctgctgctgccaccattccaaagacagttattttaactcacatttcttgattgcccgttattaatatatgctaggcacttgggatatcaaataagatgtagtgctttttatgcctatgggtgatagatacttttaatatgacattagtaaaatagagataagcataaaggaataacacgtaaactaagatagtttaaatatagcacttactgtatgtcagacactaagcactatttatgaggtcatttaattatcatgaccctgcaaactccataactgaggcacagtttatttttcagggtcacttgtggttttgtatttatagccattatgttttattgccaatggtgctttgaaaacactatgaactatgaacttgggatgtcagtgagggctttttttttttttttttctcttccccagactcagagtctcactctgttgtccaggctggagggcagtggcgtgatcttgactcactgcaacctccgcctcctggattgaagcaattttcgtgcctcagcctcccaagtagctgggattacaggcatgtaccaccactcctggctaatttttgtatttttagcagagactgggttttgccagattggccaggctggtctcaaactcctgggctcaaggcaccactcctggctaatttttgtatttttagcagagactgggttttgccatgttggccaagctggtctcaaactcctgggctcaagtgatcctcctgccttggcctcccaaagtgctgggattagaggcatgagccaccgtgcccggcctcagtgagggctttttgtagatctgaatgaactgagttttaaattataggtaggatttggccaagcaaataaaatagcattttttttttttaatctggcggagcgtgagaatgaaccatgagccatgacaaagaggcatggatagttctgatcggagataaaggataggcctggtagtagatggaacacaagcacctagaccatgaaatgtgaggtgcaaatagtggagagagactggtgggataaatgagggtctgctggtaggggtcttttggcatgatgctgagtagtcctgcctttcctctgaaggcatgatgagattgcttttaatcagagaagtgccttgtgagactggcaggaggaaccgtgactggctgcagtgtggaaggtccattggaagcatgtgaggggcagagcctgctgcagtttcttactccaggtgccttgtagaatccacaacccattgtatattgcagaggtagtgtgtaagttgtgtttacactataaaatctgttttattggtaatatttaagacattttgctaacctggtatttcaattttgtaccttctgttgtaaaaactatgagtatcctgtgaggacgggtcttttcccccaccgtcaactcctttagggttgttgcttaaacatctttagcccaaagaattaaaaaatgtgggccagttactattgtttttcaatcctttcctacaaaacaaaacaaaacaatacaaaaagccattttttttatgcttagaagaaatgttggaaatagaactgtaaaactcattcctaaagtattttctttttatgatattttgagaagtactcaattcatcattagaattagcaagattattttaaacaatttcacaagtaaatagacttgaataatagagatgttgttcctagtactgttttcatggagaaatactgtatggaggaattaattgcctgtcaatataataagactgtcactgtatttccaatttgttttctctagaccagtagttgtttgtatgagggcgttttactttttctgttttaattttgtaaggattgttctactttcggtttaaatatttattgctttttagttttatttcttggggatcagagaaatatagccttaaatatacactgaagttttctttgtggtaaagtatgtttaaagttaatttttgtcagtgtttcttggaaacttaaggagaagttatattctttgcagtgttcaaagtttatgtctattaattttaattatgttcaaaaagactgagttaaaatttataagtccatatcaataacatgttttgttgatgtcctgttttattcagatcacagactcatttttattgagtctttattgttaaacatgtcatcagtagaaaattactctaatttattttgccctaaattattcactattcatattgcttagaatttttgttttaattctactactcattgaacttttaaccttttattcacaaagtttttttagaattttattttctttttttacttataatcccatgacagttaaggatttatatataaatttttaatttttgttttttacttcaatatgaaattgtttcatttataggaaaatttaaactttttatagtatagttatgcttggtctactctcaaaagtttttgccttgttttgcttatgtagatcattttgtcttccttttacttctgcagtgacattgttgtacaaccattatcattatctatgcaactttttcatcatctcaaatggaatctctgtacccattaaacaataacccctcattctgcctatccccagctcctggtacctcatataagtggaatctatatttgtctttttgtatctggcttattttacttttgtatttggcttattttattttatgttttaaaggttcacccatgttgtagcatgtatcagaatttaattccttttgaatgctcaacacccttttctttttttctttgagacagagtcttgctctgtcgccaaggcctgagagcagtggtgtgatcttggctcactgcaacctctgcctcctgggttcaagttcaatcctgctgggattacaggcgtgagccatcgcgtccggcctccttttcttgcatgtatatacaacataccacattttgtttctgcatttattggtcagtggccactttcattgtttccaccttttggctgttgtgaatagtgctgctgttaacctgggtgtgtatacatctcttttggagaccctgctttcagttcttttgggtatattcccagaagtggaatttgctggatcatatgataattctgtgtttttttgaggaactgcccattatattttccacagtggctgcaccattttacattcccaccagcaatgcacaaggcttccattttttccatattcttgccaacgacttgtgctttttgggcctcataccttttagttgttccctgtatagtcatccttgaattgaagaaattctggtatattagatttttgttcttagtttgcaggtatttctcattcttcttttcatatgttttcaatggaaaattgaaagttaagtacttcagttttttttttctttcttactgagggtgtccttttacccgctagtttatgggggcatatcagtatatctgggatatactttgtctatattgatgtgacttacaagacagtctactatgcatagattcttcttcatatttaatgtataccttttagtttaaaagatatgatttctcttgaagtagtaaattatttaaatttatgatggcataacattttccacttgaaaccttattatctaaagagagtttataaaatttgatatttaattgttttttaattatttgactttccttgatgcatttctttagaaatgttggtatcaatttgaggacagagatcatcatgtctcttgtactaatgcattgttctttcattatgcctgccactgtgttaggcgtatagtaagcataagaaatacttgacgaggggtttgcgtgttaacgttccaaattggaacaattaggcactagaaactaggaggaaattatggttcatttaccttttatattctattgtttgtatttattcattgttaagattcatcatattaaatacttaaaagattattgtatttttaaaatgtaggtggtttatcattcttttgtgctttttaaattatgtcagcaggcattggtaattctcacaggaataaattctgttttgatttgttttcctatttaatgaaaatgataatattttaaactgttctccatggcttttgtatactggcccctaaaattggttgttttcttctgtttcatgttgtgtaaatgttttcagaaggagaaactactcctggtgttgggagcccttggagaaaccatgtgctaccataaaagtagtatcagtttggagcagccagaggtgatgcttgtgcaccacagaatggcctttatcagcatttccctgtttgcagttcgactgctacaaacgcttctccctgttgaaaaggtaaggcaggcaatgctgctcatttgtactttacagactattataaataaatgctctgttgtaaatttcttctgctcttttcatggtgtgaaggtattgtgctttaggccattttcaaaataagtgtaacaggttatatgggaaatgtagaaattgagaaatggctaacattttgaacaattttgacaaatcatttgatgggaaattattttttaatcgtgctgttgcttttattgcatatgttttattgcagtctgtacgtttgtttattccttgttcattcagtgaataatttattgattgcttacagtggactaacagtattacttgctggatgtaaaactgaataggttagaattagtccctggcctcatggaacttagttttgtaaaagacaagacttggctgttatctatacatatacatatacatatacatatacatatacatatacatatacatatacatatacatctacatctacatctacgtatacatatacatatacatgtatatgtttgacttctttggtttctttaataactttgggatcacttgagggaagagattatgtcttaatatacgaatacatttttccatacatatatacatatataattggtacacttgtatcttttaattgattggagggcattgaaagcctactgatcttatctctgcagtgtgtgtcttggttcttatcattaatatcaagagtagcctttccttctcttcagctaggtacgtgttgtcagagttctttacttattcactatttcccaggttccttgacacacagaatacaaacaatagtttccattgctgctccagaaattattttatagttagcatatcttaatgtcatggaaccttttctttttcttgttttatctattcaaaatactgttagcagtgctttagtttctaagtattggtcaagttggtttctgaggactgtcctatttcttgtatttgttgtactttatgtatattgctggtgtgttgcatattttagtaacttaagggattttttttttttttggtcccatgcatttctcttgaaggtatcccactatttcctttctgtcagcaacttaattgcttaatatttttattttagcacctgatcaaaagaatttcagaagtcatctttggtaggattaaatatcctgatttttatttgattcatctagttaatatttggtaacttgttttatgtctaaaccatatttgtagtttgagttacgtaatatatgatttcataccttagtatgtcttttgaaagttgtttttttaattaacgtgttgctttaggtgtctttcacaaagctgcttttctgcccatgatagcaataaactatcttctgtgctagtctttattctagtacttttctttttcctacttttctattttacctagacctttcttttcttaagctttggtgttttcagtttttaacttttattcagaaaataaaatgttcatttaaaaaacattttgatgtacaaagaagaataaaaattcatttataatttcaagttagttttgaggcttttttcttttctgctttaagtccaattgacagcgtctataaaagttatttattctttttttttttttttttttttggttttggttttgtttttgagacggagtctcactctgtcacccaggctggagtgcagtggcactttcttggctcactgcagcctccacctcccaggttcaagtgattctccttcctcagcctcccaagtagctgggattataggtgtgagccaccacacccagctaattttcgtattttttttttttagtagagaccagatttcgccatgtttgccaggctgatcttgaactcctgacctcaggtgatgtgcccgcctcggcctcccaaagtgctgggagtactcgcgtgagccactgcacctggcctgtttattctcttttttttttttttaaccatttcttattatctaacatacattttccatttaattaaacacttcataaattttaatgggtactaatattttaccagcaagatgttctatgatttccacaagtattccagaaattaagcttttaggtttctttttttctttttttggtattttgataaataacactatgctgaattgctacttacgcatgtttactcatattttggattcttaaattcctagtggcattactagttcaaaggctgaatgcttaaacatgtttttattataagcataatttaaaaatattatagtttcacgagtttcattgtttttaactaaagaatggataaaaagagtagtacacggaaaagataattgtgagaatatatggccgggaaattactaaaaagaagcactttttgaaagtgcctaaggctggtgtctcttctgtgtgtttgccaattacagtttctgaaattgtgcactgttagtttaactagaacacttaaatttttaaatgatttttaaaatgctatcagaaaaaaacattaattctgtaaaggcttttttttttttttttaaactttcatatacattcagaaaagtacatagttcagtgctttttctactaagtgaatgcatctgtctttaaaaagtgaccacccccataacagaaaatagaatgttaccagcattccaaagaccccttctctgttacctctccctccttctccaagccacactcctttctgacttctgtcactatagatcaattggcctgttttgaatgttgtttaaatgaaattataaagtatgtactctctcaactccttcttgaggttcataactattgttgcctatagcattaatttgttaacttttattacaaaatattccattgtatgaagtctgttaaaagtgattttaatatgtgtaaatatttctttaaaatcttcttactgactgtatttttaaacgtgaggttatctctgaatttgaatgttagtggtaaaaatatctcagatcattcagacatcagtgtttcgtggtgtacttattaccaaaacaaaggagtgacacactaaaatgcaggtatgggagaaattatgaaaactagaaaactattccttatgcctctttgttgcccttagttattaaacatttgcagctttgtttcctagaattctgtagagcatatagtccaaactctattttcttttttttttttttttttttgagttggagtcttgctctgtcaccaggctggagttcagtggcgtgatctccgctcactgcaacctccgcctcctgggttcaagccattctcctgcctcagcctcccgagtagctgggattgcaggtgtgccccaccatgcccggctaatttttgtatttttagtagagatggtgtttcaccatgttagccaggatggtctcgatctcttgacctcttgttttgcctgccttggcctcccaatgtgctgggattataggcatgagccaccgcgcctggcccaaactccattttctaagtatcacttatatacacaatgtattatcaggtgatccaggaaaacggataaaacactgcattttaaatatagtattttgctttaaggaaaataacatcacttgtgttacttttaatttttaacttgtattcactagtcattatgtttctgaagtccttttctgttttgaagagtgacaatttttcaaggcataagcatcaagaatggaagaattccagtctcttaagaaaggaattgaatttaaaatatgggtgtcttccttaatattatataaatgaaaaattagtggtgctacaattgcttgctattaagtattgcaaatggtcaatctatctatgggtcgaagtattgatggaaaacttatcctatcagttgcatcatgtagtttttgattgtattttttcatctatgtgcttatttggacaggaaccaaaaagaaatcagtaatttattttacttagtgccagaataatgtaaagttaattttccatgcttttttttttaaaggtagttattgttttattgtttccgtttttaaaaacaaatcaattatctaatttttggtagttattttaaatatataacttggaactttattaaaacaattttgatcattgtgggagattgtaattaaggtatttgtttttagatgattatatttgttttgattaattgactaagtactttaaaatgagatctaaacaaaaatgctatttcattgatgttaaatttcttctttggtttatataaatgtaaggttatgctgccctctgtctgttgctagcccactaataattgaagtagaatttggactctgaaactttttgcctttaaagtggtttttttgagttgccactgaccaagtaggtagtttggatgttggaaaataaatatgaatctatgtagagatttcctaagtttaacaaaatgtcctctgatgcctgttttgaaactgatatttgttgatattaaatgattttggagaatactcatgtataggttaaaatgatacgttggtaatcttctgaaaaatattgtggttgagtaaactaaattggtaaaacaaatgaaggtaatttcatttggggaaacatctgggaagtaagagctaaaagtactagccctgttctggaagcagaagcacagagcattctaggaactgctgttactcttagctagtgatgcttaccaaggctaaggaagaatttgtaacacaaggtctttagcttttcagggaggtatataaaaagatctaatgacctggtgaagccagttgagtgactgagagcagtgcttttcaaacggtaatgttcaaacagatcacttagagatattgttaatcacatcttgcatattctgattcatcaggtaaagggtagggcctgagagccggcatttctaacagactcatagaattatgccatggctgctgagtggctagtttacaggaaacatttatagcccctcctcccaatgcacatgaggtgatgttgctgattattttttatctaatggggtgatggatttgcactgaaacatcttcacttttagttctgatggcatgtgactaatgcttatatatgcaggacagctatcttagattaggggtgtaaattgtgattagtccattgggccatgtaaagattagctaatgacattagcatggggctttgagttgttgagatagcaagagtttcaaatacaagtacgcagggtgaaacattggaattcctttgtggtgaagcgagaaaaggaaattaatatttattgagtgctatatgccatatgctctgcttaatgcttgtttaattctcacagcagctgttatttttctgactagagtcagagagaactctcttaaactagaacacagtgcctttagagttagatccattaggatttactctcttagcacagtgtaaatcgcctttgctaatttctctttatcttcctaactcttcaggagtggaaccccaggactgacagtagccctcatgaaatatatcccatttgtgattgttaaatgccatctatttgttgatgcctgccaaatttatacttccagaccagacatataacctgaactctgaacttacctgtatccagtgtcctttttgatgtcttcacttgggtgacaataaatgtctccaactgaacatgtcccaaacttcattctttgtttccccttccaaatatgttcttcctatagtcttgcctgtctcggtaaatgtcaactttgttgttcaagttgatcgttgatcaggcaaaaaccttagagtcagccttgattcctttcttttgctcatatgtggatataatccctgagcaaaatttgtcatttctcccttgaatacctatacagaatctgaatacctgagttaagcccaccattctgtcctgcctggattactgcagtaaagtcctctgtctcttagcttccacttttgcacattaccatcagttctctacagaccaattttgatacttgtttaaaatgttccagtggctttcagcagaggacaattccttatgacgacccaaagccttaactgatctggcccaccactcctttctgactccatccctcagaaccagctccactggctttcttgctaccaaataatagtttttgtaattgctcttccctcttctataaatgctttccctcagatagccacgtggctcctgacccttccagggttctacttaaatgtcatcttattagcgaggccttcctctactactttggagaagtagcagttccctgcctccactccccattacttctctgttcctcttcatctttcctatcctgttttaaaacactttttagccacacctaacatcttaggaagtatatcgatttacactctactttcttcagtgggatgtgagcttcatgcgggcagaggttgtattttgctctctgctgggttcccaggactggagaggtacctggcatatagtggaggaacatagtaaggcctaattaatattcaccgagtgagtgaataataggtgagcagataattgagtttctctttttcctcccccgcccacaaaaaaaaggaaagttcttcacagaataatgaaatttctctttactttctaatagctgctgttttactaatctggaggtttgtcatgtctgtgtaatctaaaattttgatttctgtagtttctgatcttcatttagcaactatattcatttaaaggtatcgttgtttagctgattcagctcttagactttcaggtagttaatgattatccttgaaataggttatccatgaaataaatcatgaccaaacccacttttgtaaagacagcatttcagccgtaatagtgagtcttgtcaagagattttctctgaacgtcaaatttttagtcctttttattcctttaattgatatttagaatcctgtcacaaaactagaaccatttttttaaaaaccataattctttcagttttaaatctattgatttaaggttataatgtgtataatatttcatttgggcatattgattttatactaattaaggggctatcttctgtattttagaactatttaaaatattatattggatttccactatcccctctaaaagacaaaaccaaagaaaaaaattcgtttctgttcaaatcaatctatagctatacttgatttcgtgttattaatatgtcattaataagctctgtcatgttcagctatgggatggggaagtgttcttgtcttcagtttatcaggttattggggagatttgcgtacatgtacagaaaatacttagagaaaaaggcctcatgccttagttcaatagcagaggtatatacaaggtgcagggctcaaggagagaagaagttggtttggggaagaagaaagtagttagtatcttaggctttgagaaagagttgatatttggacttgagacattttgtattgaaaaaagacagagatagaggtagatgatgtgttgggaaatgggattttctttggaaaaagtttcagttttttgacaaagaattgctaaaaaggaagttggattagattaagactatagcccactatgtttctctaaaataagttttttttaaacaaagttttaatttttttgtttttttaattcaccaaggcaagcgagtttttatcagagcctatgtcaacagcattatttctcctttctttggacatgcctatttctttggaatatccaaatattcatgaagctgttgtggcctatttggaacagctgaattctgaaaactacagtatttataaacgaactgcagaggccgtttattcaattgaatgcacctgtaacttcctgtctgatattgggaaagaggtaaaaagcttttttaatatctcttttaaatccctttgacatattttgaaaatttaatctatacttttcaaattgatggacatataattaaattgtcacaggtgggatacattattcctgagtgggtcaattatacataacctgttatttaacaggttaaagtaaggatatgatttgtatagaagtaaaacgaagactttaattaatggtgtatattcctaacatcagtgatttacaaaaaagcagtggttattacaaatgtcttaatatttaataatgagtacctctattaagtgacttactgatatgaactgaatgacagttgatgtaaccaaaattataagggctattttagtgcttacttgtagacatatttttgcctcaatattttatagatagttcttacatatatataaaggctgatttttgaaatatattaagtacagtgatgaactacattgtttataatgtattaggatgactttatggcagtgttacagcaataattatgtgtcggtatttatcccttttaaaaatactattagaatattagtatgttatcaatgaaagggttaatgggtcttagagacagacattgatacaagagttgtttattgtttgaaaataaggacatggatcctgaagatcttgaagaattagggataaaattcttactcattttggtgcctacagtagaatctatctgaacctatttattttctttgaattttttttttttttgacagccttctcagttgcctaggctacagccttgatctcttgggctccagcaatccatctgccttggcctcctaagcaactagtactataggcacatgctaccacacctggctaatatttaaattgttttgtagagatgaggtctcactgtgttgcccaggctggtcttgaactcctggcgtcaagctgtcctcccaccttggcctcccaaaatgctaggattaaaggtgttagccaccgtgcctggccttgaacttgatatttatgatttttcttacttaccactgtagtttgttttttttcccctttccttttgccatgttagtaccactgtcttcttgttttctctgtgatagaattttgaattgtgtctttaagttgaagtatttctgtggcttttttttttttttgagacgaaatctcactctgtctcccaggctggagtgcagtggtgcagtcttggcgcactgcaagctccacctcccgcctcagcctctcaagtagctgggattacaggctcgtgccaccacaaccagctaattttttgtatttttagtagagacggggtttcgccatgttggccaggttagtcttgaactcctgacctcaagtgatctgcccgcctcggcctcccgaagtgctgggagccactgggtctggcctctgtggcattttgtgtggtcagttaatcacacatgtgttcaatgtcctgtgtgttcctagtggtcaggctgctacaagaggcaggtttataataaaataaatacattagccctacttttattaggggaggtagagctacaaagaagtaatcaaagaaccaggcaacttgattgtaactttaagcttactcagagttaaataatagaaagtctcatgtggcatttagctagggaattttcctacatttctccacctcggctgacatttttaggttgcttgatgagaaagtggacttaaacaaatgtaaacagtctcatggtctctgaatggtctaatttcttgaagctgcttagttagctgttgagaatatcattgcacatgaacttgacatttattgttccattctgcttcttttgtagggagagaagaatctcttagaattagtggagctggcagaccaagccttgcgtagcttttcctatcatcagcatttcccgctaataaaggaaatcatcagcatttgttcaaagatgtaatattttctttcttaatgtgattacgttattattggacacttagggtgtgtgtaaacttagaaacagtgaaagtgaaactgactgtatatctttgttattattttttagtttaattgcttttatatgtgtctgatttttaaagggtatatgtacagctgcattaggatacttaactgttatattcaagattaaacttcaaaaatgtcatgcctacaatcaaaatgaataatccttggatttttatacatttgtttttggtatccatccagactattcacacacattgtttatttatctttaaagttttaattaataacttaaactgagagttttgtaacttttattactttgtacctttttcttatgtggatttttagaaaagactgtgtattggttaatttattttgaggacatcagcaaatttctatttagaacttagtgtctttattgcttttggaaagaataaattctgtgatgtgataatcattaactgagtaggggattttaaagacattttgggtttttaaaaatactctttaagacagaacctcctctgccctgaaacaaataagtgcttaggtgagtacttgctagtattggttatttttaataagatctcagtttgaggagttggagtaggaagaaatcccttccagtatgctttgcagtcttttgcttactaacttacttgcctcacatgtcttggttgttttaccttttcaccagctggaaatctgctcaggccagtccattactacaaggagaaagtcagaaggtgcttctccatatgttgtctcacccattgccacgagtgaaagctgaaacttaccactgctgtctggaaatcacgaaggtgaggttttgttttttcgtatgttttgtttttgagaacaaatagtagactctcttgttataccttcaaacttaatttacttgaccttttgtatgagatataagaactatatcccataaaagtagatgataattactagtcaattctggaaaatttgtactattaaattctcttaacttagtaagtccagcaattgaattgctttatttgaagttttattaagaattacatttatgttgtattaatgatggaaaaattataaggaaaattgatttccaggtattcaaaagtgatttctatgcccaggaaaccttttaggttgttgtggcctagattttatggttttaattctgttttttttaatgttattttttatttttcttttcttttgaaatatttatttttctgtcttcttaaatgataaaatatttcagcatagaatattaaatatttcaatattgaaaagaacactgtacataggacaatatttaaaagtatatatattactgcgtactcttgaaagtgtccttttgtatttaacactcttgtaagtactatttggttataataagtgtttacattttgccatttttacttctgattcatttttattcaaagaaaaatactagttatagaggaagcttctttgctttctcttctcccaccagcatagcctagccactcttacacagctggtgtatattcttcccatccagttgttgtatattatttataaagctgtatctttatatataaatattatctttaaataatttaaagaattttatatatagcatgattagtatatatagcaggatttgagatttgcctagttcattcaccttaactgctattaagtttgaatatacttccttttattgaatgataaatatttaggttcagtctcctttttattgaagtaagtttttcagtattttcagtgacagtctgtgactgtgtgcatacgtttgaaaatgtcatgatttcactttattttgaatagtaatttggctgcatataaaatacaggttgactgctagtttttattagcactttgccagtattgcttaattcttattcggcttctatcattgttgagaagtctgatatcagttaattatgatttcttttaatttttttctctagtttgttttaaaatattttccttttctgtggtgccctgcggtttcattaaaatatgtctccatgcatacatgattttccatttatcttgcttaggacttttcgctttgaacactccatctgccttcacttctgtataattcttggtcatgcttattttgaatattgcttttctcttatccttgctgttttctccaagtggaactcttattagacctgtgttagaccttcttagtttaccctttgtgtcttttaagccttctttcatattttccacatctttttaggttttatttgggtagaatttctcagtgttatcctttcagtacactaattctttcctcagctttgtctaatttactttttttgatggtgatatgtatatataacataaaatttattttaggccaggtgtggtggctcatgcctgtaatcccagcatttgggaaggccaaagcaggaggatcactggagcccaggagtttgagaccagcctgggcaacatagggaaatcctgtttgtacaagaaaaaaaaaaaaaatagctgggcatggtggcatgtgcctgtagtcccagctacttgggaggctgaggcaggaggattgcttgagactgggaggtcaaggtacagagagctgtgatcatgccactgcactcaagcctaggcaacagagtgagtacttcatttctggaaaaaaaaaaaaaaaaggaaaaaattttaccattttaactatgttctgagtgtacaattcagtggcataagtacattcgtattgttgtaccatcatcaccattacccatctcccaaattgaaactttatagtcattaaacaataactcctcattctccccttctcccagcccctgacagccacctttctactttctgtctctatgaatttgaggtccctaggtaactcatataagtagaatcatacagtgtttgtctttttgttactggcttatttcacttaatataatgttctcaaggctcatccatgttgtaacatgtatcaacatttcattcctttttaagacttaataataatctattgtctgtatatatgaacactccaattctgaaaatccaaaatctaaaaggctccacaatctgacacttttcgagtgccgaaatgacacttaaaggaaatgcacgttggagcatttccagttttgaattttcagattagggatgctcaactggaaagtataatgcaaatattaagaaatccaaataatttcaaaatctgaaacacttctggtcccaagcatttcagataagggacactcatcctatactacattttgtttattcatccgttgataggcatttgggttgtttccatctttttgcaattgtttatatacccagaagtggaattggtagatcacacagtaattctgtgtttaatttttgaggaattgccctactgttttccacagtgactgtactattttatgttcccactggcagtgccaaggattccagtttctcttcatccttggcaatactttttatctggattttttttttttttgagatggagtctcgctgtgtcaccaggctggagtgcagtggcacaatcttggctcacagcaacctctgcctcccgggttcaagtgattctcctgcctcagcctcccaagtagctgggactacaggcgtgcatcaccatgcccagctaagttttgtatttttagtagagatggggtttcaccatgttggccaggatggtctcgatctcttgacctcatgatccacccacctcggcctcccaaagtgctgggattacaaatgtgagccaccgtgtctggccttgtttttttttttttttttttttttttttttaataatagtaaccatcctaatgggtgcaaagtcatttcccatcatagttttttttaaatttatcaagttttgattatcacttatactgtttttcatgtctataccttttctttgctttctttaactgacttgttcttttttcatgtaatctttcattagtttctgttttttttttttttttttcaacttttattttagggttgggggtacatgtgcaggtttgttacatgggtaaattgtgtgctgctggggtttggtgtacaaatgattttgtcagccaggtagtgagcatagtacccaataggtagttttttgatcctcaccctctgatatggtttgtctttgtgtccccacccaaatctcatcttgaattgtaattctgtaatccccacgtgtcgtgggagggacccagtgggaggaggtaattggaatcatgggggcagtttcccccatcctgttcttctaacagtgagtgagttctcatgagatctgatggttttataaacatctggcattgtctctgctggcattctgtctctctcctgccgccctgtgaagaggtgccttctgacatgattatttcctgagacttcctcagccatgcagaactgtgagtcaattaaacttctttccttatgtattacccagtctcgggtatgtccttatagcagtgtgagaataggctaatacgttctcttcccaccttcccttgtgaagtaggccccactgtctgttgttcccatctttgtatccatgtgtatacgcagtgtttagttcccacttctaagtgagaatgtgctgtatttggtttttctgtgttaattcacttaggataatggcctctggttgcatccatgttgctgcaaaagacattattttattcttttttaatggctgagtagttttccatgatgtatatgtaccatagtttctttatccaatccactgttgatgggcatctaggttgatcccatgtctttgctattgtgagtaatgctgcagtgaacatctgggttcatgtgtctttctggtagaaagatttatatttttttgggtctatacccagtaagggattgctaggtcaaatggtagttctgttttaatttctttgagacatctccaaactgttttccacagtgactgaactaatttaaattcccacaagcagtgtatagggcttatagtactgtgttcccttttctctccaaccttgccaacacctgttattcttttactttttaataatagccattctgactggtatgagatgatatctcattgtggttttgatttgaatttttctaatgattagtgatattgagcattttttcatgtgtttgttgaccgtgtgtatgtcttcttttgagaagtgtctgtttatgtcctttgcccatttgtaatggggttatttgttttttacttgttgatttaagttccttatagattctggatattagacctttgtcacatgcatagtttgcaaatattttctcccattctgtaggctttttacttagttgatatttttacttagttgatagtttcttttactgtgcagaaactttttagtttcattaggtcccacttatctatttctgtttttgttgcaattgctttttttggagacttcatcatgaaatattttccaagacctgtgtccagaatggtatttcctagggttgttatagttttaagtcttacatttaagtctaatccattttgagttgatttttatatatggtgaaaggaagggggtccagtttcaatcttttgaatacgcctaaccagttattccagcactgtttactgagtagggagttatttccccgttgtttgttattgttgtcttttcaaagatcagatggttgtaggtgtctggctatatttttgtgttctctaacctgttctagtggcctgtgtatctgtttttgtaccagtaccatgctgttttggttactgtagccccatagtatagtttgaagtcaggcagtctgatgcctccagctttgttctttttgcttaagtttgctttggctattcggtctctttttttggttccatataaattttagaatggttttttctaattctgtgaagaatgacattggtagtttgataagaatagtgttgaatctgtaaattgctttgggaagtatggccattttaacaatattgattcttcctattcataagcagagaatgtttttccatttgtgtcatctctgatatctttctgcagtgttttacaattctcattgtgatttggctctgagcttggatgttattggagtacagaaatgctactgatttttgtacattgattttatatcttggaacttcaccgaagtcatttatcagttctaagaacttttgggcagagaatatggttttttcttttttttttttttttttcaggtatagaatcatctgtgaagagagagagtttaacttcctcttcctatttggatgccttttatttttcttgcctgattgatctggctaggccttccaatagcatattgaatagaagtggtgagagttggcatctttgtcttgttctggttctcaaggggactgtttctagcttttgcttgttcagtatgatactggctgtggctttgtcatggataactcattattttgaggcttcaatgcctagtttgatgagggtttttaacaagaaggaatgttgaattttatcaaaagccttttctgtgtctgttgagatgatcatgtggtttttctttttggttctgtttatgtgatgaatcacatttattgatttgcatatgttgaatcaaccttgcatccagtggataaggcatacttgatcgtggtggattagctttttgctgtcctgctggtttcagtataccaatattttgttgagaatttttacatttatgtccatcagagatattggcctgaagttttctttttttgttgtgtctctgctagggtttggtatcaggatgatgctggcctcatagaatgagttagggaggagtcactcctccttcattttttggaataatttcagtaggattggtaacagttctttttacatttggtagaatttggctgtgagtttgtctggcccagtgtttttttctggttggtaggctttttttattttttaatgactgattcaactttggaggaacacattactgttctgttcatggttttaatttctttctggtccaatcttgggagtttgtatatttccagaaatttatccatttcttctaggctttctatttggtatgcatagagtttttcttaatggtctctgagggtctttctgtggggtcagtgataatgtcacttttgtcatttctgattgtgtttatttggattgtctctttttttctttattaatctagctaatgatatatcaatcttgtatattcttttggagaaccaaaatttggttttgtcgatcttttgtgtgaatttttgtgtctcagtttcattcagttcagccctgattttggttcttctgctagctttcaggttggtttgctcctgcttttctagttcctctaagtgtggtgtcaggttgttagtttgcaatctttctaacttcttcatataggcatttagtgctgtatagtttcctcttaacactgccttagctgtgttctaaagattctgatatattgtgtttctgtttttgttagtttcaaagaattttatgatttctgccttaatttcattctttactcaaaagtcattcaggtgcaggttgtttaagttccctgtaattgtatcatttttgagagatcttcttggtaataatttctatttttattgcactgtggcctgagagtgtggttggtatgatttcggttttcttgaatttgttgagaattgctttacagctgagtgtgtggttgatcttagagtgtgtgctgtgtgcagatgagaagaatgtgttttgcttttgttgagtggagtactctgtagagtctcctaggtccatttggtcaggtgtcgagtttaggtcccaactatttttgttagttttctgcctcagtgatttgtctaacactgtcagtggggtgttgaagtctcccactattattttgtggttgtctaaaactctgtaggtctctaagaacttgttttatgactgggtgctccaatgctgggtgcattatatttaggatagttaaatcttcttgttgaattgaaccctttatcattatgtaatgcctttctttatccttttgatcattgttggtttaaagtctgttttgtctgaaataagaagagcaactcctgctctttttttgttttctgtttgctggatagatctttatctccattctattactttgagcatgtgggtgtcactgcatgtgagttgggtctcttgacagcatatagttgggtcttggttctttatccagcttgccactctgtgctttttaagtggggtgtttagcccgtttatgttcaaggtcagtattgatatgtgaggatttgattctgtcgccatgttgctagctggttgttacgtagacttgattgtatagttgcatcatagtgtcagtgggagatgtattttagtgtgtttttgtggaggcaggtaatggtcttttgcttccttttttagcactccattgaggaccccttgtaagtcaggtctcatggtaatgaattccctgagcgtttgcttctctgaaaataattttgtttttcctttgcttatgaagcttagcttggctggatatgaaatacttggtttgaatttctttaagcatgctgattataggtccccaatcttttctggcttgtaaggtttctgctgaaaggtctgctgttagcctgatggagttctttttatatgtgacctgctctttctttctagcttccttttaagattttttctttcctgttgaccttggagaatctgatgactatgtgtcttgggggtggtcatcttgaatagtatctcactggggttctctgagtttcctgaatttgcttattgacctgcctagtgaggttggagaaattttcgtggaaaatatccacaaatatgccttccaagttgcttgctctctctccttctctttctggaatgctgatgggtgttaggttcgttttgtttacataatcccatatttcttgaagtttttttttttaattcttttttctttatttctgtttgcctgtgatgattcaaaggagtagtctttgagctctgagatttttttcctcagttatgttattaatgcttccaattgcattatgaaattcctatcatgaaatttttgtttccagaagttcagttttgttcttacttaaaatgtttgtgtcagatccaatcatggatcaaaccaccattttactggtttccatgggtggggcttcagccttcttctatatcttgtcgagcttccttgccttccagcttctgaattctgtcattttagccatttcagtttggttaagaacgattgctggggagctagtgtggttatttgaaaataagaagacattctggcttttagaattgccagaattcttacactgtttttttcttacctgtgtgggcagatgttcctttaatctttgaagttgctgtactttggatggggccttttgcttttatattatttgatgccattgaggattttactgtggtataagttgggattagtcaattggcttggtttctgtgtgctttcagggccagagctcagctcagcacccctgggctgtgtgctctaaccctgggggtgcactgaacaggccagtggctttgatttctggtcccttgaggtcaagcatctgctgcactggaggagccgagatgttcccagactgctggcaacaactttccgatggtgactgcccgagaaagtgctctgggggggcgtggggcggtgctttgggagagtgcacttgtggtgggggtaaccatgggcaagtgcgcactggcaggggaggctgcaggcaagtgcacaccagtaggtattggctgtgggtgggtgtgtgcttgcaaaagcgctctgacaggaaggcagaggctgttggcaaaagacctatggggtggctgttggggagcatttcggcagggcagctgaggctgtgttgcaagctagtgagacagacaggaccctttgagaggctggcagacagggtggcattcagatcaggttggcccagtcttgtgggaaagatagccctgctctttctacttctggcagcgaactaaggctaaagccacctagaggagtatatcaagatttgggtgatgggcacctatcagggaacctgccccaatagtcacgtagtttcttttctgttttccctaagtgtcggctgggttgggaaataaagggacagagtacaaaagagggaaattttaaagctgggcgtccgggggagacatcacatgtcggtgggttccgtgatgtcccacaagctgcaaaaccagcaagtttttattagggactttcaaaaggggagggagtgtacaaatagggtgtgggtcacaaaaatcacgtgcttcacaaggtaatagaatatcacaaggcaaatggaggcagggcgagatcataggaccgcaggaccgcaggcaaaattaaaattgctaatgaagttttgggcaccattgtcattgataacatcttatcagtagacagggtttgagagcaaccggtctgaccaaaatttattagatgggaatttcctcttcctagtaagcctgggagcgctatgggagactggggcttatttcacccctacagtctcgaccatagaagacggccacacccaagggggccattttagagacccaccttcaagggcacattctctttctcagggatgttccttgctgagaaaaagaattcagtgatatttctcccattagcttttgaaagaagagaaatatggctctgttccacccggctcaccggcagtcagagtttaaggtgatctctcttgttccctgaacgttgctgttattctgttcttttttcaaggatcccagatttcatattgttcaaacacacatgctctacaatttgtgcagttaacgcaatcatcacagggtcctgaggcgacatacatcctcctcagcttacgagatgacaggattaagagattaaagtaaagacaggcataggaaatcacaagcgtatttattggggaagtgataagtgtccatgaaatcttcacaatttatgtttagagattgcagtaaagacaggcataagaaattataaaagtattaatttggagaactaataaatgtccatgaaatcttcacaatccacattcttctcccatggcttcagccggtccctccgttcggggtccctgacttcccgcaacaggcacctatggccatgccccattgcagccattactgcgccagaccctctgggctctgtgcagactggcattctgtctctggcaactcattgggcagttctcccttgcaactcaaaggtctgtgcaggtcatggggtctcccatagttaggatcctagaggatcgttgcaagagtgggctgctccatgcctgttgcacttgccacttccctaagagctgctcaaggccaggaacaagtcctctagtttcttcttttgtgttgttgtgaattttaaacatatttattttataatcttgtttagattatggtattagaatcctcccacttgttatggctattgaatcttccttatgttgtttattttagcagatactgttattttgattttcaggtcttctttggcagggtagctttttcttgtgatcttgtattctctagatggtggttgtatatttgtttctgccttgcctttagggatttgacagttagtggtgatgcaccttggaaggggtttgtaatgaagttacattttcatttgtgtatgttgaaataataaaaagaatcagaggaggaaagattgaagatagtgggtagcaagtagctaattaaaagaagctagtgcctttgaaagttgaaggcggtgggaccttgaacatgatggctaattggggttaggtgggcttagatatcacaggaagttgcaggagcctccttctattgagtctgtattttctttgagattgaaagtgagatgttgaatgtgtgaaatgactaatatgagtagatatttgataatatcaaatagtagcatttttgggctgcatgaagagcttagtcaattgtgtctataatcttaatagggagactcttctactttgcatgtttatctttggctagctggtgtggtttctgggaatgtgaaccttgcgatcaatcaagggttgagttatttcattgctgtcggggaggagggaatgcctgtggtgcaagtgagctgagtagttgaaatgacatgtcgactgtagaaccaaaggctgtaaagactacagggaagaaagtagaagggtttatggactggaggtcaaagaaggaccatatttcaagttgagtaagaagattagaaacctacatttatgattttagaggtagaacaagtgaaaagagaaggggtcctcagttatagggcaggtgagtatcattgagataaataggtcaagaaactaagatcactgtatttgggatagttattataccccgaaatttaaaatggtggaatacgatttgatatctttcttgaggcagattttaaataattattggaaataaaaatttttgcagataggaaaatatttggtgtaaattgagttattgatgtatatgatcattttggtatatgatgaatttcaagtaggaataatctggatgttaattttttagaggagttctaaaaaattaacatccagataatttttcctgtcatagaatgataggaaaaaaggaatgtcagaaataaatatgtatgtgtcagtttcgaatttgtttttaaaaaaaatgcactgaattttagtaattttgaaaattctaaattttaatatactatagtttttataaccaagtgtcatacattttgttgcaaaatttaaactgaaagaatattttttgttaaaactcgccttattatcctagttgtagaaggagataaaataaaagaatgtgaactttcatttaatgttttattttcttgttaactatttggaaatttatattagttgacactgttcttgcaaaatattgtgatttttcttttgtcacaaaagataatcatctgtatagtgcaatgtggttttaaaaaattcatgtgtatttactatcagggagttataataatccaagtcaaaagctccaaatgatgagatttcttgtagttagcccctgtgtcataaagatatagtatcttggtttggatataaggatttgtaaaggcatttcactttaattggctatgtctgtcagatgatattattccagtgtcttctggtaaatctccaaggcattgctgcagctttacctacctaaatgtaggagcgtgctagtaatgtggaggttactttttctgaagaggcaagttagctttttattgtaagacttaactttgaggacggtatggtaaagaggtaaaatagcttttaaatttagggatgattaaatggccaccacttccatgttacctacatctaacattcatttagcaatatttactggacactttaccatatgctagactgtagtgatataaagtacagaaaagagccttatcagagagcttatattctgataggggacagagagagatgtatgtaataattaagaaaaattccttaaatacataaaaagtatgtatgtgtatgtgtgtgtgtatatatgtatatatagttttctttataacactatatgtatagaatatgtatatatatatatagtttacaacactgcatatacattcaatgtatatagtgttttaaataaaatagtgttgtaaagacaatgaaaggataaaggactagagaatgactagtaacgtggactaaatttatgtaggctggctagggagggagggagaatttctagcccgaggaaacaacaggtgaaaagcctctgcttttcaggtgagaatgtactttgcgtgtttcacgaacaaaaagaagggcagtataatgagataatagaaaaatggtaccagattgggtctgaaaagtaggcagggtgccaaacattataaagctatgaattgtattctaagtacagtgagatgctatgaatgattttaacgtgatctgatgatctttctgaaaagatcactctcccattgtggggaatggattgtagggggtcaggatggaagcaagaagaccagtttcattgtagtagccctgatgagatgtggtggtgtagtggagatgaagagaaggaaatgaatttaggaggtattacggacgtggagctaattggtcttgctgataatgagagtaggagatagagagtgatcaaggatgaattttaaggttttggatctagcagttggattgatgtcccaaatatgggattgtggattgggtagaattctgttttgaacctaagtttgacatgcctttttatatcaagtgcatatgttaagtagactgttaaatataataatgctaatgctaataatttcattgataatgatagcagctaacatttattgagcatttactcttatgtatcaagtacttttataagtatattatctcattgaatcctcctaacagctctgtgagctaggtactacctctttctgaaaacggagatactttgaatttgtccaaggtcattcaactaaaagtggtgaaactgggctttgaaccctataggctcactccaaagcccatattcttaagcattgcaccacactacctttggagtgtggagcccagattaggtataaaattttcagtcatcagcttagagatgatattaaagccacaagccttgataggatcaactactgagagactagggaagagaaggctgtctaggatctaaccagttagaagttgggaacagagggagccagaagtggagacagaggttagaaggaagagtcacatgagaacagagatgaacacgttggatttggcatcgttgaggttgttggtgtcctctatgagaagctcctgtggaatggtaggaacctaagtcctgctgatgtgcattgaagagggtttggcaaatgaggaagtactgactgaggacagcgaactcttgtgaggactcgtggtgggaaggagagctgaaaaatgaattgttatcaagaggagaaagccagggccatagacacattagaatatgtcatatggtgattagaataatcatgtgaagaaaaataaaggtgctggagaaaaataagacaattttaggaagtaaatcttggtttcagaaggggatagtcacagtttagatggtagataagtatcttaaggaagtaggtgacagctattgtttagggctgaggctttagatctttgaaaaccttgtaatatgaacgaagttgctgtctgtggcatgaagttaacagttgaaagaaaaataatgtatgcaaatacatatgtgagtgtatgtgtgtaactttttgacctttgaattgttgataataggaagtagaaatttgcagaatgaaaaaaagtagtattcatgtaactcattatttattgtatttttaccttctatattgtatttaaattccattaatatttcaagtagctttttttcccctctcaccttaaatagctgctaacaaaatactattctctatcacatattgagaaaaaaattcctgatagttactctaagtgttggttcaaagtaattgtattttaggtacatagctgtattgatgataactttatataatcatatatatatcacatatataggacataaatatgtagcataaaaaattatatataataggtatattatatataaaatatgtattctttatattctatatatatagaatataaatatatatagtatataaagttatgtctcccataacttgaagtccttgaagtcttttcatgttgaatttttctttcccaacctttgtaagtaaaatgcaaacaccttaggataagtttcttactgtgtttatgtcctttgtgtctgtcatgatgaattaactttaagagattatggttgtctcagccgtttgtttacttaatttatcatgattatgcttgtggcagaaagtaatataatatgtatctcctacaaactaagaaactgttagacaggagaatctttttcattctgtcttgttaaaaaaagtttcaatgaagtaaaaactaaaatagaaatgggattgtaaacagaagaaagatggatcttttggaaaaatcagtgttgctaatttaaaaatactttttaatattattttacaggaatgtttaggtgtccataatgtcactaaacccgtgtcttcactttgcaatggaattcattttctacttcatccaaaagttctgtatgaaatctctgtatttggcattcaagagcccgaaagtgaggtatgacattaaacatgagtgaaaatattacagtaacttagatactcagctaaatcaaggtgatattctaatatagtttagatagcatggtgagaaactaaaaagaaacctgtctttggtgcattggttcagttgaagtgttatttaaataaaaataaatgttacataaaatgtgggaataaaaatacaggacacacttgatttcaaaaaattcagatcagtttacttacatttttcatctaagatgtagagaactatacagtacaggtagtaagcagattatttcagttagggaaatttttactcaagggacaaatgtacattaaaggtaaaaaattagaaatattaaggaagaaaaacagaacagaatgtaagatgatgctgtggaagtacgaacatttgaaagaaagagatgttaattatagcatctttccacatgctataaaatgttccaggtgtgtcaggtgacctagcgggacatctcatttgactggtttatcgggtctgtgttgttgagcaggtgaacactgctgccaaggccattctgttatacctgcttcagggacgattgatgatgacagcattgacctggaacaagtttattgaatctctctgtcctgtcatcccaatactacaggtattctgtgaaattcactttttatgataccatttatctttggctgggtgtgattgatttaaatgcatgcaaacagctaaactgtcaagttgtgagagaaatgaagagaagctgtgaaggcgctggggataagtgaacaggaagtgggtggctgtcttgtttctggcagaaagttaaaccaggatagctaatttgtctgtatatattttatatatctgggtgggaggttaaaaagtgaggtgcattcacagcattgactgtgaaaaatagaactcaaccttatataaaggcttttaggcagagctaacagtgctttttaaggagaccttacataactaacttgcctcatgagttctatccatgcatatgtatgattagagtgataccgtaattaacatgctcctagaaacagcttttttttttttttttaaaaaagcaatccttctggacattaaaggagtcagtttcctgtctcttttggatgaaaaggtggagttcagaaatgccatcataagcacagtcctcttttagaagagagagcctgggccttgtgccttgagactcacagattccatgcgtgtagcatttagagcactccatcttcttagggtggggatgggctgaggatctgtgaggtgcttcaccgaggggaggtgccactattagaatcttagaaaatagaaaaatcagcaagtgtcaagaaggttggcatgttttcctgaagttctcctgtatgtatgtgtattttcttttaaatacagttttatttaggctccttggctcatagaagttattttaaaaaataatgattttattcaactgaatccaaagacatttatgagttgctgataggacaatacaattcttattttcaagttgaaaagttatgtatacaattagacaataatttctctttaaaaacaaatctattagggctatgccgacacagaagatcctctgggtaactgcattctccttctaagcaaagcaagttctgacacagaagagatgcttccgtgtactacccgattaaagtccatgctgcgacttttgctagtgaaaaagccatcgtgagtacaacgtaatcttgtgaacgtcaaagattgatggaaacatgctaagaaagtatagtaactatatataatttgaaacaaaactaaagaatttttaaggagggtgttattccattactagaggaaaccaatgcgtgaaactaagcagatacaaggtcttgtatgtacttgctgacgtttcatccactttacagccaagttattccttgccagatcagcctgtgttacaggactgctactaagtgccgctcagtagtgccctaggcaagttggagagccatggagataaatagatggtaaaaattatagtgcattcccatcttctctttagaaattgttagccttccagagtgatccttttgtaaacatctgttctgaatattcagtttttcataagtatagtaggccagttgtctcaaataccagagttatgcaggtattttaatcccatatagctgtgttcttacttggggaactgaaaacatatcctttctttgactgccattaatataagcattgttttaattaatgaaaagaaggagaatgatactgtttttcttccttctctgtcattgcaacatgaatcttttctattattatttttaggtaacagtggttagattttcccttactgaaaaaagaaaaaaatgctgagtcgagatggataagcagggataaagaggaatagttggttgaaaaggctaggaagaatggacagacattcttttcacaatggataatttgtgtttcccaaaccttacatcaggaaaatacagcagcttatttatagacagatcattggactgaaagataaggaaataggtggaagttaactaaactattaagagaatggaaggaggaaaattatagtctttaaaatatctctgtattgtagagagtaatgttatgggtgatccaggaagaagtagggcagagggagttaacgtgcttgtgttctcaggggttgtcttctacacatgcagaaaagctgttccctgttaattaacatgctagtgtggtactccttacttgaacaaacccccagtttggagaattaacacaatagggggcatttcttgtttgtttttcgggcccaaggtcctcagtttaataaagacattctaaggcaggacacccccaggagcatagtgcaaggaaaggccagatctttctttgggtaagataagtctctattatatagaatttgaaacaattcaaatgacatatttgttttccttattgtattaattctaccccatcccatcaacccatccataaactccatgtagacaggaaccctgtccgttggctaatctttatattctcagaacttcatagcgtaccttatacataaatacacagtcatgcgttgcttaatgacatggatgcatcctgagaaatgctttgttaggtgattttgtccttgtgtgaacatcatagaatgtaccttacacaaacctaagcaataataacttaactacatacataacctaggctatatcctatagcctattgcttctaggctacaaacctgtacagcatgttactgtactgaataccatatgcagttgtaacacagtggcatttgtgtatctaaacatagaaaaggtttagaaaaatatagtaatataatcctatgacaccactgttgcatatgtgatctactgttgactgtaacattgttatgcagtacatgactgtactcaaaagttttaaagaatgacatacatgtataggaataactggattctggcatcctatgctaaacctaaaaagatgctaaatgtatataccagagaacaagatgcataaatacatgctttacatatctcatctctagccacctttgctaggggttatacctgtctctcaactgacaaccccagatgtgaatacagatatcattggcttagaatgtaaggaacaaaggaaaactattaggtaggtgtttagcctttctaagctctcttgaggtaactcaggaaatggagagggagaaagtttgcctgacttattagtcctctggagatgatatcagttaacaatattgcagtaaatatctactttgtgtttgattcaggaagtatttattgggtgtcttactatgtatctatgagctgtgggaacgtagcagcacacaacacagacatgggccctgccctttcagcatttagtgtgtaaccgggaatatagctcttattatcaattattctttattattaattgtcataaagtgagataaaagttatgatacaggggctcaaggtggcaggcctgcatacagaaggcaacctgctctagtctgtagtaggagggccaccctaatgatgcatgttttaattgttgtcttataggtagttcttaaaacctggcaacttgtattattgcttaaaatttgtccagtttccaggtagttcaagaacctatcagaggagtgacagatacatggttgtctcaatatctgccgcctcagtgacctttgtccactcagtggtttttctgtttctctatttcattgtttagtggcatacagtatttactcttttcttgaaaggtctcccacctccccactcagctgaccttattcctaatcccttccagataaggaaaaagtatttgtattttcatatttgacaggaatctgtttggcccctaatatgagaagattttgatacattgtagtgttatcacacttccattatgagcgtcattactctcctgtgggttcaacttaacatttggactgtggtcagcggtctgtgatactttttatggtggagaatagttcactagatttgaagacaggagttattgatttaattcgcagatgtacttattgaagtttactgatatttaatctcagtgagtctgtctcatttgtagttattattttttgtttctgatgtttattttataactattacattgaataaatcattataattatatatcgaagaatttttagtagaaaaagtaaattattactagtaatggcagtataattgtgactacttattgtactttgttgatatataattacttgtaattacaagcccttttaaaatagacatttgcatatcacgaaagttcgacttaagtactttgtgttctcagggtccgttcgctagcattaaagcttttagcattccatcttaccagtgaagaaggggctgatacaaagcgtcctctaatagacgccagagttctctccagagttactgatttattcattgggaagaaacctattgaactcagactggatgacagaagagagctggttattaaggtgactataaattttgagtttattactgtgtggtaatttgatacatttttatatcatgtattttatgtgacattcttcagtttgtgtatgtcctggggagggagagaagtatggggattcagggctggtttgaaattgtgttctggctttatctggcttctagatacgttgatttattgcagtggtcccaacctttttggcactagggaccagtttcacaggacaatttttccatggatcagggcaggagtattgttttgggatgattcaagtgcattatatttattgtatactttatttctattgttattacattgtaatatataatgaaataattgtacaactcaccataatgtagaatcagtgggagctctgaacttgtttttctgcaactagacagtcccatgtgggggtaatgggagacagtgacagatcatcagacattagttaaattctcttaaggagcagccagccaagatccctcacacacctagctcacaatacggtttgcactcctatgagaactgaatgccgccactgatctgacaggaggtggagctcagatggtaatggcagcaatgggcagcggctgtaaatacattttcctgtctttagctaggactgtacctatagcatactggactgatggagaattctataaagaaagctgtccactagtccactgttttcatggattcattcctgtgttttgtactttctcatttcactcaagtttgcaatctgtctgttttattttagactaacttgccaaggcctgtagtagtatggtagagccacatgtaatacagtcggtttttttgtttgtttgtttgctttttaatggggaaacacattatgttcttctaaactgaatgttcagggctttatgacagtgctggcagggggattggagagtcttcactggccacataccaggtctggttgggacttccctgagtactaagccattggtagtcactcctgtgccctgatgtatggaggaaggcggggagagggcattctaatacgtcttctgtgagtccatgttaggactggaagatagcagtgagtgggagaaaggagcttcatctttgttattttcttgtccctttttcctgatgctggttttgccacctcagattctgttctagcatgaagtgacagtaagggacttgtctggggggtagctttgaaggggtgctggacagcaagtcccagagtgctgtttgctctggggtcttctaaaagaaagaatggagaggcccacgggaataccagctggtggcttctgggagcaacagggaaatcttgagtcataggtctgggtcgcttttctcaggttagcctggtactacctgtaaagatgttagggaacatggttgttttctgttacctttgtaaggttgctaatggattaatgggttatgaataacttcctagcaaaaatgtatattaagaagagaggggccgggcacagtggctcttgcctgtaatcccagcactatgggaggctgagatgggtggaccacttgagcccagcctaggcaatatggtgaaaccctgtctctactaaaaatacaaaaaattagctggggttggtggtgcatgcctgtagtcccagcaacttgggaggctgaggtaggagaatcacctgagcccaggaagtcgagtctgcagtgagctgagattgcaccactttactccagcctgggtgaccagagtgagaccctgtctcaaaaaacaaaaaaaaaaaaggaaaacttatttgacatgatgactctttattttagatcttaagttccttcctgacctactgcatcattgttgcaaattttatttatttatgtatttattttaaacttttatttcagtttcaggggtacctgtgcgggtttgttatataggtaaactcgtgtcatgggggtttgttgtacagattatttcgtcaccctggtactaagcctagtacccgatagttatttttcagatcctctcccgcctcctaccccccaccctcaggcaggccccagtgtccgttgttcccctctttgtgtccttgtgttttcatcatttagctcctgcttataagtgagaacatgcagtatttggttttctgttcctgtgttattttgctaaggataatggcctccggcttcatccatgttccctcaaaagacatgatctcgtccttttttagggctgcatggtactctatggtgtatatgtaccacattttctttatccaatctgccattgataggcatgtaggttgattccatgtgtttgctgttgtgaatagtgctgcagtgaacatacacatgcatgtgtctttatggtagaatgatttgtatttgagtatccaacatctataaggaacttaaacagatttacaaaaaaaaaccaaacagctccattaaaaagtggacaaaggacagaacagacatttttcaaaagaagacatacatgtggccaaaaggcatatggaaaagagctcaatatcactgatcattggagaaatgcaaatcaaaactgctacgagggaccatctcacaccagtcagaatggctatttatttattttttttgtgagacagagtttcactcttgttgcccaggttggagtgcagtggtgcgatcttggatcactgccgcctccgcctcctgggttcaagcgattctcctgtctcagcctcccgagtagctgggattacaggtgtgtactaccacacccagctaatttttgtatttttagtagagatggagtttcacaatgttggccttttgtgtttctagtagagatggggtttcaccatgttggccaggcttgtcttgaactcctgacctcagatgatctgcccacctcagcttcccagagtgctgggattataggcgtgagccatcgcacccggccagaatggctattattaaaagtcaaaaaatagcagatactggtgaggttgtggagaaaagggaatacttacacactgttgatgactgtgtaaattagttcaaccattgtgaaaagcagtgtggcaattccttgaagacctaaatacagaactgctacttaacccagcattgtgtgaatttacctgtaattatgttggttatttaaataagttgactttttgagcttttgttcatagggcacaaactataaaatcttattggagaattggaagcagataaatgtaattttggtttttttttttttttggtttgtagttggagactgttgaaaaggtatatgaaatcttcacctcagatgatgttgatctcgttttgagaaagtcagctgctgaacagttagctgtgattatgcaaggtaatgtcttttaagggaaatgattgctgtactgctgataatagaattttagattgccatatggtactggcaggagttggcaactatggtttatgcgccagatccagcctgtggccttttttttgacagccctcaagaatggtttttgcatctttagagttgttaacaaaatccaaccaaaaccaaagaatatgcgagagaccatatgtgtgtgtctagcaaagcctaacaacatgcttactaacctggttctttacagaagaagtttgctaatgccttattattatttgacctgtaaaatgccatttgatagaattatcttctttctaaaatattagtgtacttccaatagtgaagtgcatgttccttcctctgtttactgagtgcatgcatcatattttcaatctgtaccatcttgcttagggaaattaatcaaataatacttttgtggtaggtaaaagaaaaatagtacactgtagctatgccttttctttaaacgtttatttttatttttttaaattatactttaagttctagggtacatgtgcacaatgtgcaggtttgatacataggtatacatgtgccatgttggtttgctgcacccatcaactcatttatattaggtatttctcctaatgctatccctcccccaacccccaactctgtgacaggcccgggagtgtgatgttccccgccctgtgtccaagtgatctcattgttcagttcccacctgtgagtgagaacatgcggtgtttggttttctgtctttgtgatagtttgctgagaatgatggtttccagcttcatccatgtccctgcaaaggatgtgaactcatccttttttatggctgcatagtattccatggtgtataaatgtttatttttaaaaacaactagtgtaatacactgttagctttgtttgtagtgttgttattccataggcttttgttctttgggttagttttgaatttttccccatacgtgatgtatgtactttaatatttatgagaaatgataactttgagtttatgtaaaaagatttttatggttagcacttcttgtcttgacattagtggaaactggaatgagagagttatttgaaaaaacatattccacatatttttagttttaacaacaatcacacagactacagaaaagaagactagaaaatgtggaaagccctggttaaaaaaaagatcaagaaaaactcgttaaagagtattccttcaatattgttaacatttcaaaagtatgccttataattttggtatgcactatattggggggcaatggaaatttttttttttaagtagcagctaaagattgttacaatgatagcttccacttcaatatcagtatgtgagtgtatgtgtttttcctaatgagaatataggagaaaatttgtctgcaagttgttaaatacttgtaacgaatatataatcaattacagttttgggttccggtaacatttgtgtgtgcgtgtgcacatgtctatacatataagatttttttatgtatatacaaaaacttctttattacaaacataatatgtgaatatatgcttattaaaaagaagctcaagttctccagaaatatatagtgtattataatcttgttccttttatatttgctattaatagtttgaggttagagatttttttatagatagaaaaatgttcatgttgtaagtcatattttacacatgagcttgtggagaattataaacatttgaaggtgataaatttggaagagtcaatgaaataatataaagaagataatttgcatgtataaatataagcattcatttgtacacttaaattctcgtagttttcagagtctgaactagttccataattctttttttatagttttgtattttatgtgacagaagtaagatatgctttttacttaaacattttcaaattggacaggtgtacgtaaagtaaaaagttaaaagtttcatactcttatgtcaaccccaggtctaagtatttttaatagtttgaaggttgtgtggatatcagttctgagtatttcaaaatacgtgttttaaactacaaaaaatgtgctttaacttttagtaactttttttatctacagatattaaaatgcatgctgtggtgaaaaagttatgcttaattgacaaaataattgagtatttaaatgaatgtgtgagtcaagatggcaaggtaaggctaatgtgcatctagacattgttttacaggctgttttgattaatcagatctgaaattgaactgagcagaatttggatgagtacttggattttaaattctaagtaacacctcctatctcattcattttttttttttaaattcgaaaagtggagtctctataaaggaaaactaatcctaaaatttccataagataggtgatagaagtatatacgaaacttactttcagtggaaagtaattcctagtatttatttacattttagtttcagataattttgatgaaaacgcataaaatttagagtaagataatattatggtctgtttgatctcacctgataattggtgaaaatgaaaagctgtgtttttcctcctggcccaggttgtagaatgtttggtacaaccatgcctcacactcttgaggaaggttttatgtggtgatccagtcatgcgtgtttcgctctcgcaacagtcttctcttttgaccgtgttattcagaggtaaataaaagaaaatctgctaataattagattgttcttaaattttaagtgtttcttctttaattgtaagtcacatttactttttattttactattagaacaacagcatttattagtgaatacactactaatgtaaatggaaaatgtttaatatttttgtggaaattgctttctaatcctgttgctgagtggaggctagagctgagaaaagctgaaacctctgattgttctttgtgccttgatgtagatgtcatctggtgctcagacagtaaactattatctataaagagagaaagttgcagctgctgttattactatcttctttccaatatctctttcgtctttcttgttttgcttatacctttggatcttggtacattttgtctgattatttcatttgacaggtgttaagagtataggctcaacctgtgtgagtagaaactagaccatcctaaatgactctgagcctaaatttattacattctataaaatgtggtttttaaaaacccattttaatttgattctaatttagtaaggtgttagatgaacacgtttcatgtagttttgtccttcctgtcttctctgtttttttttttttctcaatggagagcttggtaacattttgtactattttttttcttagagacttaggccactgctttttgatattttgcaagagtcatgtagaatcatctgaatgtgctgaagagtcacgtacaagcatctgaatgtgcttcatcttgtctattatcaggcatataggagataagtgagatttatgttcaaaatatgttattataatgtagtcattttattttagcatcttttcctcctgttggcttctgcttgccaagtgagtaagatgcagtttatttaagtagcagccctaaaaccaggtaaagctctaaacagattcagtgtgtttaggctcataacattttgagtggactataacgtttttataagattgtatagactgatcatctgaaagagcagcagttacggatttttagttttctttaatcctgttaataattgtcttcttattaacctcattcacttgaatttagttcctggtttaccttttcatttataattttcatttaaattattcaagcatggaacttattatgaacacctactggattcaaaagcacatttcaaggcaatataatctatacccttttcagtatttcagtttttctatttcattgctgtttgtggaaattactttcaatgagtttgagaatgaatatagtatcctccattaatggatttagtttcaggaaaaattttacttacttacttatttatttattgagaaagaatttcactcttatcacccaggctggagtgcagtggcacaatctcggctcagtgcaacctctgcctcctgggttcaagcatttctcctgcctcagcctcctgagtagctgggattacaggtgcctgccaccatgcctgggtaatttttgtatttttagtagaggctaggtttctccatgttggccaggctggtctcgaactcctgacctcatgtgatccacctgccttggcctcccaaagtgctgggattacagtcgtgagccactgtgcctggccgaaaaattaatttttaaccagctgcttaaccaagaaaacccatttctcagcaaacgtttattaagcacatgctttgtgctaggtgcaatgctaggcccttgggttatattggtgagcatggtaaatgaccctcatggagcttacagtagagttggagacattgacaagtaaatatacagtacaccacagtaatacttgtaattggggattcctggtgccagaggacatgctggtcagattggttggtgaaaagtatcagagattgtttctagggaatgtggcatctaagatggaatttcagaaatgagtaggagttcaaataggcaagattgacttctagatggagccgtggttgtgtgtatgagaaattgatgtgtttgagatggagctggctggatttggggagtgtggagtgaaggggaaatgatgggatgaggcagggagggcagttcgtgcagggcctgggagattttattaaacagcagtgaagagctgtttaaggttgttaaacaggggagtatgtgttttaggaagattatttctgtagcatggatagtggatcaaatgagtacaataaataacttctcagataacactgctttgaattataaactttatgttatgacagaattctatagtgtatttcagggttagaaattaacttagaaatcatttactataccatctgtgtgaggtctagagagatttagcaacttggccaaggctataaccaaaaaatggttattgggttatttactttgctactgagagagaatcgaaacttccttacctttgtttgtttctgttttaaataatcacagacctatacatccccattgtaaaaattcaggcaatatagaactatacaaattctaaaagttttcattttcttctcgttctcaatttccccaaagaagactgttctggttatcattaggaatatatttttccgaatgattttttctacatacacatgtagttttcattctgtatattacagtattgtgttgcttccttttttcaactggaaatgtaacttgaatatctttctatattatttcatgtgagtatacattctttaaaaaaccctaaaaactactgcactggtgttgcagaatttcagtttgctatgttactgggtatttgttttagatttttcaccatgacagtaatcatgttgtgtgatcatctttgtgcattcagtgttggaattcctaggtcaaagagattttataagataatggttaagttcctttccaaatcactctcaccaaaggtgtttaaaaatgcttattttcattacaactttgccaacactgaatatgtctcattaattttttttaatcttataggtaaaaatatataattgttttattttcttattttagttttagtgaagttatcttttcatatatattcaaatttcttcatctatggattacttattttcctgttgtatttactttctttttagtgacttgtagggttttttattataagataggcacaatccttatgcttgattttatgtgattaatattttctctcaacttttctatcctttaaatttatttattattatatttttaaccttaaacttaaatattttatggaaacatatagaacttttctgttatggcagttgggcaattttttatcatgctcttcaagtaggactttctctagttccagattgaaaacacttttcctgtgtttcaagtgttgtttaaaaaaattaaatttgaaatcaggcaaaggcattgctgtaattcttatttatttggaaatattatggttcattctattcatcactgatgtgaaatgtcttttattataagttaatttttacatgttctctgtttctttactttttggtttatggctatttttaatcatgccaattacataaggatgattttcttttcctgcagttaggaaaaatctcttctctcaaaacttcttattgctgcttccctgaatttgctaactgtgtattatgttgttattcctgtgagataacatcgtacttctttgtttagaatttcataggtttcaaggagattgtagcattgggatcattacagaagtgggaactgagacttaatgttaaagaatctcaccagggcatttagctaagtagtaagtggtagagctagtgttaagtctgtccattcagagcacttcccttttccatcatcttgtcataattaaaaggaaccaaaacaatgacacagcccaaggataacattttaaagtcaaatccaagttctgtgatcacatgtttgtagtaaagggcaaaagttataaaataagatctcttggtgaggaaactttagctagaattatctgactcggcataaccttcttagaggctgtatcagtttgtttctctaattacctaagactagacagtgtctagtgagtgtatctacaagtgtggctcctggactggcagcatctgcatcctctgagaacttattagaaattcacattcacaggctccaccctaaacctatccaatcagaaactgttttaaccagccttccaggtgattcttgtacatccacaagtttgagatgaaagcctgtgttttagtgtcaccttatctgggtttatgttgcatttcttttctcttcaaatcaagatattttaaatttgaagttcattctttctagacgtacaaatatttcataaagttgtgcttctttttattcagtttccttaatatttcatgaagattgtagtgtcgtgactgaagttggagcactattttgtcttctattatttgatgaagtatcgagaatggatatgtggtgagatataagaatttataagttttttactcttaactatttatctcaggtatctgatgtaatcttatagcaaggcatggaaatttctgatttacgaagcttatgctgtccatgctacacatatgtggtatgaattttgatttgaataaacagtattcaaaagcctattagctcagaaagtctatctcaaattttatttttaaacattactaaatataaactttaaaattactgcagtaatttttgtctttaatacatttttagtacataccttcaactatgtgtttttttcttaatatttcatgatttttaaaaaacctcggaagatatttaggacgatagtatatgattagcgctgatcttgagcaggatccgtgggaggagacgcacaaagtccacctgctagtcccaccactgcattgtatgaatcatttgttatgtggaatttttttttaaaacataatttactcttcataagcaaatctaggaagtagcaaacatgttgtttctatactaaatgatagactcagttgcactgcttgatttcatttgcagtcaacgaagtgaggtaagttgtatttgttagacaaaacttggtctactcagttgtttctttgtttttgtttttcttttatgaaataggtctgttaatccttccaataaaccttctttgccatcggtcttcagtttgcctgtttccgtttttagaaggtaaaggatttatttctctgattttcttgaaggacgaaatgttgttacagaaagggaaatcaaaatctataatttgtcacaattttcatttagcatttaaatcccataacttgggctttcatggttccttcacaatggtgctttgaagatttcagtaagtatatctccccaccaccaattttttattttgataccgttcaaatttacaggaaagttgaaagctatacggtgcatacttgtatgtcgttcagcctagagtcatcaattatttacatatgagtctctttgctttctctctcctaatatatatttttatttatatttaattctccctcacccaccaattggaaataagtttcagacataaattcactcctttcctatatattccagcatgcacatccttaagttaaggacattattctacataactgctacaatatgatcccatctaacaagattaaaaataattctataacatggtgtggtttctccagttatctccaagtatcttttgtgtatattttttcagaatgcaataaccagttaaggttctgcattgtatttggttttcatgtctctttagacttttgtaaaaagtaaattgtttttattgacatatatcgtacataaagcatacaagtcataagggtacagcccttgaatttttctgagtaaacgtacttatttatctcacacagattgacatagaatattactgacagaccggaaaccctttttgtgctttctcattaccttctaccaccccaaaatgtaatcctattttaatttctattgctgtacattatttttgctagtttttgaactttataaatagagtgcattattatattgctttttgctcaacttggagagatttgtccatgttgctgcatgaagcaatcaatagttggttcatttttattctatgtagtattctgtctaagaatatacaacacttttatttaccattctatttgtggatgtttaatttgttttctgttttgggctattatgaagaaatgactgctaagaacattcttgaacacgtgtcattgttggaatataggatatttatgtttagctttagtagatgttaccagacagtattacgaagttgttgtgctgatttacattcctaccatcagtggaaaagtactagctgccccacatcctcactagcctttggtatttgcattaccagtcttaatggtgtttagtttggctaaataatgaaactcacacgactgcagtagtcatgcttagaatgagatcacatttgtgggtgctgggagctgtcttggcttggaagcctcatgtcccaaatagaaaatatgttctctagtaagtgtgctgtaggcatagtttccaggttgcttataagagccacagcactcaagattgctcagagctgtgacatcccatcatgcatttatagtttattcctagatgtctcagtccagatgtggggagtcattttcatcataagcaaagcagcttagtaaattcttgacattccatatctatctgattttactgggtaaagggacagagagttacctcaatatcatgtttgtccgtaaagaggagaaagggttttattactcttttactcacagtaatgttggcatttaaaaaattgttgcccatctgatggatgtatagtgtatctcaaagtggtcctgatgtattactctttgctttttattattttcttccttctgtgtttttcaaacttaattttctgttcattttctaacttactggaggattggccattgattattagccgccctttcatttaaagctatcaatgtttctaagtatggcttttggtatattccacgaatttgatatgccatattttattatttagttcaaaatattttctaagtgttttgtgatttttttttattgatgcaagggttgtttagagttattgggggtaactagtgaagatttagtttattaggttttctagttattttattattaatatttagctaaatattgacattagaaaatattttctatgattttaattctttagagtttgttgaattttactttatggcccagcatatggtcagctttttaaaatgttccatgtgtacttgaaaataataatgtatatgtagtagttgttggatatactgttctataagtctcaaaatatatcaggtttattgatagtgttcagatcttccctgtgtctactttattatatgtgtgtgaagttctttcaggtagcagagaggcatgttaaaatctccactatgacattgtcattctggctgacaatgtattttgaggccatgtaatttagtttgtaaacatgctggtgggttgtctctatcattatgaaattatttctttatctctagcagtgcttcatcatatagaattcactcgatctcttatgactgtagcttccccagcttttatttggttagtggttagcatgatatgtatttttccatccttgtagttttagctgttctgtgtccttaaatgtactttttttttttaagaagtatatagttgagtttttttgtccaatctgacattatttacagttttaatggaatattttaatgcattttacatttactataattactaatatttttggatacagattattagcttgctattttctatttgtccaatgtggtttttttctttctttttcctctctggcttttcttgattaatttttaaaattagtccatgttttccagctgttaacttgtagttacatatacattaagtattttatttatttatttatttgtagcgattgggatcttgctttgttgcccaggctagtcttgaactcctggcttcaagcaattctcccacctcagcctcccaaaagtgttgggattacaggcatgagtcactgtgcccagctaagtattcttctatatacattatttctatatattttatacagatgattattcttttataatatagagattataatttacttccttgactgtgaactagtatttttaccacatcccagacaatgcaaggaccttagaacacattaattccatttatttgctcttcttttttttttcttttattgtcaggtatttaaattctatacatattttaaattctataagatgttattataattattttatgcagtaaatagtcatttagatttgtataccgtggtcgtttctgttactttttattgcttttttggtttttctgcctccatctgagaatttgtttttttaagagttttttattatttaatgtagtgcacttatattagcaatgatttctgtcaggttttttttttttttaatctaaaaattctttctgttttaaaaaatgttatcactaggtatagaattctaggttggcagttggagtccatttttttgtaggaacattggctgtcagttttattgttgcttctttgaaggaactgtgttccccattctcttaggagttccttcagctatatcccacagcactttgcttgcttgcttatttatttgggggagtttattttatttttatgggtatataatagtacatatttatggagtacatgtgatattttgatataagcatacaatgtataatgatcaaatcagagtaattaggatgtccattacctctaacatttattgattctctgtgttaggaacatttcagatctgctcttctagttattttgaaatatacaacaaattactgttaactatttttaccctattgtgctactgaacactagatcttattccttctatctaaatttttatgtacccattagccatcccttcttaattccccccttccccaccatcctttacagcctgtggtaatcatcattctactctttatctccatgagatcatttttttttttttttagctcccacatataaaggagaacatgtgatgtttgtttttctgtgcctggattatttcagttaacgtaatgacttccagttccatccatgttgtttcaagtgacaggatttcattcttttttacatctgaatgatactccattgtgtatttataccacattttaaaaaatccattcatctattgatggacacttaggtagattccatatcttggttattgtgaatagtgctacaataaacatgggagtgcatatatctctttgacataccaatttcctttcttttggatatatacccagcagtgggattgttggatcatatgtaggttctgtttttagttttttgaggaactccatactgtttccaataatgactctactaatttacattcccactaacagtgtgtgagcattctccttcctccacatctttgccagcatctgttatttttttttgtcttgttgataaaagcctttttaactggggtgagatatctcattgtggttttgatttgcatttctctgatgattggtaatgttgagaattttttcatatacctgttggtcatttgtatgtcttttaagaagtttctattcagatcttttgcccagcttttaattggattattattattattattttgctgttaagttgtttgagttccttatatattttgatggttaatctcttgccagttgaatagtttgcaagtgttttctctcattccataggtggtctcttcactttgttgactgtttcctttgctatgcagaagctttttagcttgatatgatcccatttacttatttttgctttgcttgcctgtgtttttgaggtcttacttaataaatctttgcccaggctaatgtcctgaagcatttctctaatgttttcttctagtagtttcatagttgcaggtcttacattaagtctttaattcattttgatttgattttcatatgtggcgagagatagagatctagtttcatttttctgcatatggatatccagttttctgagtaccattcattgaagagactgttctttccccaaattatgttctcggtgcttttgttgaaaattgaccaaatgtgtgtatttatttgtgcattctttattctgttttattggtctgtgtgtctgtttttatgctagtatcatgctgttttggttactatagctttgtagcataattcagagttaggcagtgtgatacctccctctttgttctttttgctcgggattgttttggctatttaggaccatgttttgttccatatacattttaggagttttaaaatttctttttgttccttttaggatgcaaatttacatgcatgttagattatttcaccatgttaaaggaaaaacttgagacaaaatacacatgcatgtgtctttacggtagaacaaaattaactttggtttaaaagatactgctattgaatctgtttttatttctaaacatatttcttggttcttgttgaatttattgatgatgaaaccatgttctcaagtgaaaacaataagctggaattcagtcatttagtgacctctatgatcataggcaattcatttatcagctttaagcctcatttttgatcatttgtaaaataggtatcatagtgccataccatgtaactgtgaatgaatgatacaaaataagcagtgtttggcataaagtaaatatcagtgttttagctgaacaccttttatgtttggttcactgtattcatggtccctgacttcaaggagcattagttatctccacaacaactctaatatagcatagaatgtggtaagtcctcaagaaaggatttaagtgttctggggagtttagaggagatgaaaagaataattgaaatactgtataaattatgataattgtttaaaatagggactaagagaaacctttgcattattgtgggttgggaggcattgaactagccctcatttgtggctcatctttttgagtagcatttaagaatttgaaagtttgtaattatttgtacacattttctttaggtaccatctacctgttcatgtaattggacaccatgctgtgagtccttactccatagttttgcccttatctgctgattgtttggccttgaagccggtgtcagatatgctgagaatagcttggaacctgtcatggtatcatgggagtgataatctgttgaagcaaatgaactctgaaactaaaacgcaagagtaagctcttatattagtttaaaaagcatttgcaattaattaattgtaattaattagttaagttttactttttccttaggtccagtagctttttcccttggtatcatctgattctgctttttaacagttataatttttactttcttttaaatattacatgtgtttattacttttaacaatctatcatatgggaaaactttaaatgaaaaagcattttactctgtactgttttagaggttaaagtctgatttgttcgtagatatgaatcactaggaaaagggtcctggattagaacaaaatctcagtaagtatatgcatgagtgttatcattagtgtgatggtgattacttttgaatatcttaatattctaatctgtctgtcttaagtgaataaaaatttttataaggaggaaaagtcaatataaacatttgggatgccaatgtaaaatcctaatattgacagatatgtatcagtttttcttctggctgtaagtcaaccttttgttaaaagaaaatgaagataaaacagcttttgggagagtttataatagaaataagtgtgagcttttatttaaatagctttatgttcctccttcattttttttctttttgtctagaattttagatgcattgaagttatctacagaggacatcctcactctgaagataacacacatggctagtgggctgcaggactgcctccattccattgttcaggctgcaacccacagggaagttagggctgctgtcaccaggatgagtttttatcttctgaatgacagattgtctttaaagggttgccctggtccatgtggggttaccttgaagtccttggcttggcacaccgcactaaacaggtcagtgtaaggtcaaggctgccagtttcaaagacctggattgcattgtattgtgttcatctcctaacctttgaagataagagtctatgcccttactgctgctatcatagaaagaaaaactccaggatttttatcatctgtaataatagccaaagagaaatttttaatttagttattgcattgttgaagggattattaataaacttgtaacaatttattcttagaaaattttacctcacaaaagcaaataattaggataagacatggatgaaacaaattgaatgtttatttctatccatgttataaatgagttgagacatcagtgaattgattaatagctgtgatacacctgccacaggctgttttgttttgcttttgttttgttcttaagtaaattatatcatttttctttttactctcaatttcatgaagttgattgccatgtggcggtcctttatagcagttaattgagaaggctctagcttgtcaatttaacatgcttaacttgtagcagatggttgcatttgcaacaagactgataagcaaccactgcaagcaggttttcattttattcttcatgtgactttagtataaaatgtataactttattatttaacataaaatgtgcagtttttaagctgctaggttaaatgagtttccaaaatatgaattcctttattagtttagctttaaaaattagtttatctgattaggctttccagtggtgtgctggtgcccactaatgcagccttgtgagagagctgatggttgaattttcaggatttttgtaaggtgattgttaaacacagccattcttaattatataaacttacaattaaataaattatatgaagacaaaaggtaatgaatatgcaaacatcactttctaattatgtggcaacattttactgttatctttgttcttgaggttatgcatacatatgcactacaggggtatgtattttatggaaataactacaatggagtaccactgtgcatctcttcacaacttcatgttacatggtagctccacattgtctacagtagtatatttacaccatggaaattgacaaacacaataagtcagcactctcagttacatatttatcagcacactcccgcatttaaacagtctcgccagttgaagaatgcataaatccttcactttaaataaatgtaatatgtccctatttgtcaaaagaaattttaacataaaagctgattgaattcattgcactaagttttctttctcttgtgaattaaaaccatagaaatagtatgcaataccacattacaggaaagactctcaaactgtgggtcagtggaagcctttagagtatttcaaattgcccaatagcagtaactgtatgtgagcatcacattttttatggttagtttcctcaggactagtgtaagtggagagtatagactgtgtatatgtttaatatatacacacatgcatatataatattcatcttgtatttggtttttaggcctgtgtttgatcatggcaacacagacactactgcctaatttataaatattcatgtatttctgctgtattatgtttcactaaggaatgtatcaaaaatatatatcacagaatccaccttttttcatgaaaactttttaaaaactttacttccagcaatgtatgtactaatgaggctttgggaaactttagttttgctttcattcagtttaatgatagaaaggaacattatctttttgactgattatctaagatgaaccaacagcttaaagggtgcttggagatagaagattcccataaatcatggctgtataaagtattgagatattgagaacatttttataagcttagtttaatatttttaaaatacagctatttcaaattatatcattctagacaaaacaaaatatagagaagcatgttcatacctgtgtgaatggttttttattgtattttaaaaataatgttattttttacacattttccatgtcagtaaatatactttgaggctaatttttcaaatatatgatatatccaaatgaatgttccgcaaaagaggtccttttaggagtgagtgtgtatgttagaataattctggctttgctcagatattttgaaattgtcctctcaggtcatttaaacagcagatgtaaggaagtcttattatattttgaagttatatttaattttttactaaaaaatgatattagcaaactcaactatccagagaagggtaaaaatgatttttacatgtataccgaaatgaacaccaccctaaaccatgactatttatcactattaacaaaagtatatttcagtttgacaaaaaacatggtttctaaaatctttttacttacggtactgtggcttctaaacataactttccaagatgattattttaacagcccaacattaatttatgtgtatgtttttatatgtgtatgctaacacacaagcatacaattataatctaatatcattttggaaacttattttaagaaaacagatgatagtcatggtttagtaggattacaagttgtcagaggtatctagagtcttctttcaactagtttctgttgagtttgcatgtttaatgcctctctactcctttcctactggaagtcctattgctactgtttttctccatttttcaccagactgtagactgactagcgaattggtttttctgcttttaaccttatgccactcatttatgttgcttcctgaatgatccttctgaaatacatgtcacctgtgggttctcttccatggtgtgctagatattaatagaattccaaccccttagcatgctgtagaaagttctttttgatctagctcttgcttaccttttcagctacagtttcctcctctctctctaacatatgctgtgtttctatgaagtgcaaatattggggttttatgaaactgcttgatattttagggcatacacttctgttttatacatccttgcttttacatagttaactccttggctgccttgtgaatatctactcttccttgagctccagggtcttcttactctgtgatgtatgtggaattctagttaccctgattgtcatgtggctttcctgcattacttctacagttgtttaaatatttgttttctcatgtgccttgggtttattacattcctttttatatccctcacatatcgcataagtcatagtatacagttggccatgcagcctcagcgtgaacacctcctttgaaggatattcattctgtttttgcgctgtgattattcgtaagttttttgttcttttagactgtacctgatcatttctacctgttattctgtcctttaaactcacagaataaataatgtcttcacatgtgacagctcttcatttaaacataactataatttcttctctattccccccaccctgctttaaatgatttgtttttttttttagatagactttaaaagccacagtgtccagacttctcatttgttcatgctattttacaagggtattgtgtttcttaggactctccctgagatctggacatgataccttatatgggtgtggtgctgtggcatggggtgaataggaagaaaggggctactgcctttcttttcctactgcttttccatcattcaacaaacatttattgatcacctactaggtgtcactcttgtaggaaatatagcagtgggcaaaactgatagggtcctgctctcatggaacttggaattaagacagctaaaagtataatcaaaagtagaaatgcttccaagcagactattaggaaactgcattagaggagcaccctatccctcttcagtagagagaaagtggttcagagaatgaagcttaagccaaggcataacaggtagaaggatgttaaaagtctatgggattggaagccgaaaagataccaggcacacagagaaacaaataccacatgatctgtcttatatatggaatctaaaaaagtcgaattcaaagaagtagagtagaattgttaccagaggcaagtggcaggtggatatgggtagggaaaagggagacgttgctgagaggttacaaaattccagttagacaagaggaatgagttctggtgatctcttacagcatagtgactatagttaataataatatatgtttcaaaatagctaaaagaatagatgttaaatgttctcaccacagagaaataagtatttgaggtgattggtatgttaattagcctgattggatcattccacaatgtatacatgtgtcagaacaccacattgtatcctaaagatacatacaattattatttgtcagttaaaaataaaacaaataaatggaatatagtttggtgcatgttatgtgacagaaatttgatactttgaatccgtaaatggatggtcagttgactcacaaccacttgcagaatatattatttctcctctagactaaaatgccatattcaacaaatattatacaaattaattttttttttaaatgccaggcaaagggataggccctgagttaggaaagagtgtcttgtgtcttcaagaggaattgaaaagaggatagtacacttagatttaggggatatgagggtggttataaaatggggttacagaggtgatattttaatgttacactggatatcatagaagacttcttataatctttgtgattgttaaatcataaatctcccaaagatctatggttgttagaatcacctctcaattttcataatccggcacttgccatcctactcagctgaatgtcattttggggatgtgagaattttaagtaaggaaaaataataatgagacaaacaccacattactaagaaatacagcattatatatccctggtgttggactgcttagtttagtattcctgttttaaaacttgctagccgtgtgactgtggaaaaacgacttaaccatatttttgcttgggtcttcttgtctttgaaatagaggtgcctacttcataatgttgttatgaagtttgacagaaaccctgctgttagaacataggctggcacaaggttggtgctccataaatgctgagtattaagattcgtattattgtcactcttattaacattttgatgcaatggctttagatttataaaaaataaaacattacagataaaattggatctcatatctcttgctgattgctttttaaaaaaaacgatttccaaactacttctcccttttaaataaaagttttattgtctactaatcttttagctctcttaaaccagtttttttttttaaagaaatcttagaaaattggctcatatccttttgctctgaacttaaaaagaaatttcatcctaagtctaccttcagtgttttccttgcctgttacaaactctagtagcgtccttgcaggcctttttttccccctcactttattaccttattttttcgagttggtcagaattaggtttgaagtactaattcttctcatcagtgaaacatgacattcccagtatgaaaagcaagtttcactgggcggttattagagtcagtgtttttccccttggtatttttttggtactttttctgaatttgttatttttctcttatgatatttgtcacttctagttattttagttacttgtccacatgttttttccactataagctcatgttcttgaaggcagatacccagtttgtttcaactttgcattttccaaagcatttaaaacagtgtctcataaaatagcatcctcacaagacatctgttaagtccacatatctatgatgaacagtggtattgtgtattttaaagcgccagaaaccatgattattgtcttttcattataggtttttacaggtgcttcctgcttgcactgaagatgagaaactgctaatagatatcatacattttttaaataaattaataaaggaacaaagaaaaaattcttcactagaacttctaaactggattctcgaattacttcttagacatgtaagtggtgttaaggaatttggattttaagtttgggaaataacttatttgtagaaatcattaacattatattatggaaaaggataattttatattgtctatgcttggtaaagtagtcttcatgtaatgaatggctcataacaacatggctttcctgatacgattgtgaatgtgtttattaaaattctgtacagtgaatgggacctacagtcttgtgtttaataaaacctgttctgcatgtgaactttctgctgcaactgtatttttaagtggggatttcagttcaggtggcaggggacagggtggatgtccagataggcatgttgagagttagctaacaaagccagatggaggcaggagggggtatagtgatggtgcagttataaagataaagtgtgttcaggccttaaataacggttactggaatatttacccttctagcccccactactgtcagatttttagctcttctaaaaattctaaattttttttttttattttttttgagacggcgtctcgccctgtcacccaggctggaatgcaatggtgcgatcttggctcactgcaacctctgcctcctgggttcaaatgattctcctgcctcagcctcctgagtagctgggattacaggtgcctgccaccacgcccagctaatttttgtatttttagtagagacagggtttcaccatgttggccaggctcgtcttgaactccggacctcaggtgatccgcccaccttggcctctcaaagtgctgggattacaggcgtgagccaccgtgcctggctctaaaatttttctaaatagctattctaaaaattttggctattcagatttcttattctaagaagcgtgtgaagaacccaagaagccaggtccctgttgttggtctatctgtctctttatgtatttatttgcaaataccgtatgaatttactcaacttagctaagataaagctttacacaaataagaagaaaaacaaaacaaaactagaaaagagggcctaaactgatataggacatagtggatcttataaggcaaatatgtttcattatatattaacacatttgcgaaacttagagataattttatgtaaaaatatgaattactgtgttgtcagaaatgctaactgatatgaatgtttgtgtgtatataaaacttatttagaggtttattatcgtcttaggctgttttctgttgtttttaacataatatcagaagctgggtaatttataaaaaacaaaatttatttcttacagttatggggtgcaggaagtccaggtttaagagggcatatctggtgagagccttcttgcagtggggactctctgaagagtcccgaggtgatgcagggtatatgtggtgagggggctgagcatgctgatgtgctatctcaggtttttctcttcttacaaagccatcagttccccttccatgataacccattaatccactatccatgaatggattagtctattcatgagggtagggccttcatgatccagtcacctccaaaggccccacctctcaatactgttactttggggattaaatttcaacatgaattttggagggaatgttcaaaccatagtaattatcttttcctttattgtagattggtgaaggtagggactgttttgttcattattgcatacccagcatttattatagtgccttgcacatagtgagctctcaataaacatttattaactcagtaataagctatgtagttaattacaagaagcacacaaaaccttaattttatcactagttaagatttaacaaaaatggaaaccatgtattactttcaaggttacttatatatgcaagtatatttatagactgaatttctagaattgtaattgctgagtcaaattgtagaggtgcgtgtgtgctgaggtttttgtggttttataaatagataacttattttgaattagatggagattttttcatattcggtcttttcatgaattgtatcttgatgtccttgctggttctccgccacaattgggttgttagtctcctttcatttcttctttcctgtcctttcttttcctcccttcccttctcccttccctttctcctttgctttttccttccattttcctcttccctcccctcccctttccttggagcgtgatttcattctggtacctgcaacttggacattagtgtagagatctttcaccttttgattaaatttattcctaaatatcttaattttttttggtagctattttaaatgaggtttttttttgggggggcgcggttactgtatagaaatgctactgattttttataagttgattttgtatcctgcaactttattgaattcatttttaagatcaaagttttttggtggagtctaggtttttctagatttaagattatatcatcagcatagagggacagcttaacttgccttttttctaatgtggatgccttttatttctttctatatactaattgctctggctaggatttccagtaccatattgaatagacatggtgagagtagacatccttgtcttgttcctgatcttagagaaaaagctttaaacttttcaccattgagaatgatgttagctgtgggtttttcatatatggcctttattgtgttgggattccttttctacttaatttattgagagtttttattatgaaaggatgttgaattttgtcaaatgctttttctgcatctgttggtataatcatgtggtttttgttcttaattctgttaatttggtgtatcacatttacgcatttgtgtatgttgaaccatccttgcatccctggaatgaattccacttgattatagtgagtgatctttttattgtgctcttggtttcagtttgccagtatttggtaaaggattttttatatctgtgtttatcagggatattagcctgtaattttcttttcttgtagttcccacgtctggctttggtatcagtgtaatgctgccgtcataaagtgagtttggaagtattccttcttcatttggttttaggagtacagagattagtattaattctttaaatgtttggtggaattcagcagtgaagccatcaatcaggtcttgggcttttttttggtgaaagactttgcattactgatttaatctccttattattggtctgttcagattttctgtttcttcatgattccatcttggtagctctatgtgtctagaattttttccacttggttgtccaatttgttgacatgaaattgttcataatagtctcttacgattccttgtgtttctgtggtatctgttgtaatgtcttcccttttcgtttctcattttgtcttctttttttattagtctagctaaaggtttgtcaattttgttcatcttttcaaaatctcaattcttgattctgttactgttttctattgtttttccagtttctatttcatttgtatctgcccttatcttcattgttttctttttactaagttttggcttcatttatgcttctttttctagttccttgaggttgtttacttgatatctttctttttgacatagatgtttattgttatgtatgtccttcttagacctgcttttgctgtatcccataagttttggttggtttggtgtccatttttgtttgtctcatgatattttaaaatttcccttttagctttttctttgacccactgattgttcaggagcatgttgcttaatttttatgtatatgtgaatactccagaattccttcttttggtgacttctagttttttatcactatggtcagaaatgatattagatatgatttcagtcttgttatatttgttaagacttgtaacaccatacatgtactgttaattttgtagtatgtcataaggtttatgtatattttataatttattcatagttatgaaattaaaattaaattcctacaagactctagatgattgtactataattttaatgcagtttttgaaaaggatttttggtacagttacatttacttatttggttttgtatggtattaaacctttcttcggaaagcttctactttatctcatatattatcaccacaagtgttataaataatactacttttaagagtgcacaaaagtgaacttaagtgttcactatcagttgggtttactccctaaatattatgctacaagataaattaatatatgttatataactaccaatgtttaggataaagggaacctggaaatagaaaatcaagtaccttttaaagtttatcctttgaagtgagtaaaataagtgagaaatgatttaagaagctcagtaaaataacatttccaagtaaattgctttgaatgtatggacatacatgaaaagatatacaaaagttgtggttgcaaaaacaaaattaggcagatatgaacgcctgattagtcagaagaatgctaagaggaagtgaaaagaaaaatcagctaacttcccgagggaagatttaggaactttctcttgtgaaatttttttccatgtgttttatcaagacattcacttattacaaacatattgtaattcttaggcaatttaggagtttattgcacctctaatctgtttttaatatgatattttgtttatagtaacctagaagtgctgaatttgaatacctttctttttggaatgcatttttttgatggaagttcacaaatgtggggctgttagtttttttcttcttttggtgaagctcagcagaactacacagcatatatattttccttggctggctttcccgtaacgggctcaatgtgcactcagacattattgagggtcttgcagttacttttggcatagcttgctgatggatgtaaagttggatatgatgagtggtaactgtgtgtgtaaacaaaatgagccatcattatagaaatggttgccttttagaggtcaacagtgacaaaataatggcccaagtagttggtttaaaattaggattgaatcctaacgtctaaagacaaaaacttcagatatgattaagcacttgacatctgtaggcatcagtagagacatcttattctactctattgtacttgagaaatggtaattcaccctatattttacaagtggtattgctgaggttcactgaatttcagtgttaacatgtaaatcaaaggtgaaaagagaaaaaaaaacttcagtaatcttcaagtggaagcaagttattaataggatgagattctttgggagaatcttaatttttaggtatacacatactgtttcagtatattcatgtattaatagtagcttctacttaatttttatcagcatatcagaattaataattcctaataataaaattgttttacaagatggagtttgcgtcttggtataaacagtttgttcattttgtcagtagttttgggagtcagaaggcacgtgaatgtgagtcagcttttggatatttagggctcagaacattatagaaaatttatttatttttatgatttactaaatgtgtatttcgattcttttattcatgtatgaaacataaaagttgcagttatgtcttattcaatcttaatttatccaaagacatatattgcttaagataaaagaaaaagttgggaaaaaaactatttagatgttaaaatactgtaaaataagagcaaaatgtcactactagtttccaaaagctctcagttatattatttataattgtatatatctctatatactataagcaatttagaggtttctttacatattttcatttcttttccctaaagagaatgcagttaattttgagttgagctcttttaggtgaaggattttataagaacaatagttacattttgattgtatctctttttgtatgtttttacatgcactagtgatgtgacactgtgctgaggatggaatattaactagctttggagtaagatgcttcttgctctgcccttgtctgtctaagacttagacaattatttaacctctttataaatctatgttcccatctgtaaaacaggaatgaaaatgcaaatcttctagtttattcaaaaagtcaaatgaaatcttactatcttttttttttagcacagtgcctgaggcatcatagatgattaataaatatcccatatatctattaatgcttctgattaatgtaacgttttcttttgtcaatattattagaaataatcctcttatattcctttatctattttttttttagttgggaaaagaggaaaaactttagaaagaactagtatttgtttactagcctatcaaggtggcaaagattattgcagtaataatccacatagcactggcttgggtgctgtgggtcttttcatgtcctgtgtaattgtatgtattggtacattttttacagggacaatttggcaatatatatcaaaaaattaaaactactataatattttgatttagtaattttattgcagaattcatacataagataaaatccaacttgagtacactgtgtgttgcagcttagtgaaattatgcatcattgattatccaggagttagtgtggtaaatccttattgttgaaaaacaatcagatattaaactaatgtttttgcagaaatattgttaataacgggaagtaggaaaaaatggttacagtagtgatttttttcacttgatacgggtttgtgaaaaatgtactgttttaattctgtttatattctcagaaacaaaaaggagagttatatatcaatatataatagtggcaatttctgtgtggcatgattatgtgtggttttgtttttctcgtcctttttttctattttatatgataaatatgtttttcttttgttgagaatatattaaacatcttttgaatttagaacatctctactaatgcagtaaaggcccacacctactagttaggtaatatagctcttactagaacttgcttagcaaccaaaccctttataggaaacaatatatagttcaattagtaaatacattttttacaaatttcattttttagagtgcaaacccactgttagacctcttggttctgacagagtcacaggcacgagaagaaacagatgatatccggactgctgtcaggcaacaacttcagaaagaactgattgctctttttgataccttgctgctcaatttcatggaagttactgacaggtaccatttgtaatattgcaggtttaggtgcatttatatagaacccaagttttctttgattttcaaagttttactttgtacttctttcaaattaagaaatacttctttcaaatacttaaataataatcagttatagtgttctgtttgtttttgtttcagtttaatctgttacagcctgattgtacctgcttggtctctttcactacacacatgcactcacatatgcacacacacagttttgttctctagggtttaattcctggttctctcttaattatctacaaatctacttgagcagtcatacctatgcctatgactttatgattatctttacactgatgactttcaaatacatatctctagttatgaattctgttttttaaaaataaaaatattaagatgaaagtcactattttaaccattttaaaatgtacatttgaatggttttagtatatccgcaatgtttgcaactgtcaccactacctaattccagaactttatcatcaccccaagagaagccttgtatccatgaaaaagtctctccctattcacacattcctctgggccctggcagccactagtcttctttctatgtctgtggatttgcctattctggatatatcacataaatgaaatcaaacaataatgtgacctttagcgtctagcttcttcacttagcatcatgtttccaagctccttgcatactgtagcaaatatcactacttctttctatgactgaataatattctatttatagatatgccatgttttgtttatccattcattcattggtggacatttgatctgtttctaccttttggctattatgaatagtgttgctgtaaacactcatatacagatttttgtgtggacatgtgtttcagttctcttgagtatataattaggagtggaattgttggttcatatggtaactgtaatggtaactctatgtttgacttttcaaggaaatgccaagctgttttccacagcagctataccattttacattcccaccagcaatgtatgagtgtttcattttcttcatatcctcaccaacacctgttattatagcatcctaatgggtgtagactggtatcattttggtttttatttgcatttccccaatgaaaaataattttgagcatcttctcatgttcttatggctatttgtgtatcttcttcggagaaatacctattcaacatctttgaggatttagtatcagtgtgcatcagggatattggcctgaaattttccttttttgttttgttttgttttttgctttaaatatgtcccagagattctggtacattgtgtcttcgttctcattgatttcaaagaacatctttatttctgccttcatttcgttatttgctcagtagtcatttaggagcaggttgttcggtttccatatagttgtgcggtttggagtgagtttcttaatcctgagttccagtttgattgcactgtggtttgaaagactgtttgttatgatttgcgttcttttgcatttgctgaggagtgttttacttccaattatgtggtcaattttagaataagtgcgatgaagtgctaagaagaatgtatattctgttgatttggggtgaagagttctgtagatgcctattaggtccgcttggtcaagagctgagttcaagtcctgaatatccttgttaattttctgtcttgttgatctgtctaatattggtagtggggtgttaaaatctcccactgttattgtgtggtagtctaagtctctttgtaggtctctaagaacttgctttatgaatctgggtgctcctgtattgggtgcatatatatttaggatagttagctcttcttgctgtattgatccctttatcattatgtagtgcccttctttttctcttttgatctttgttggttttaagtcttttgtatcagagataaggatggtagctcttgcttttttttttttttttttgctttccatttgcttgataaatcatcctccatccctttattttgagcccatgtgtgttttttgcatgtgagatgggtctcctgaatatagcacactgataggtcttgactctttatccaatttgccagtctgtgtcttttaattgtggcatttagcccgtttacatttaaggttaatattgttatgtgtgaatttgatcctgtcattatgatgctagctggttgttttgcccattagttgatgcagtttcttcatagcgtcgatgttctttacaatttggtatgcttttgcagtggctggtaccggtttttcctttccatatttagtgcttccttcaagagctcttgtaaggcaggcctggtggtgacaaaatctctcagcatttgcttgtctgtaaaagattttatttctcctttgcttatgaagcttagtttggctggatatgaaattctgggttgaaaattgttttctttagaaaggttgaatattggcccccactctcttctggcttgtaggtttctgctgagagatctgctgttagtctgatgggcttccctttgtgggtaacctgatctttctctctggctgcccttaacattttttccttcatttaatctttggtaaatctgatgattatgtgtcttgatgattatgcattcttgaggagtatctttgtggtggtctctgtatttcctgaattggaatgttggcctgtcttgctagattggggaagttcttctggataatatcctgcagagtgttttccaagttggttccattctctctgtcactttcaggtacaccaatcgaacatagatttggtcttttcacatagtcccatatttcttggagcctttgtttgttcctttttattcttttttctctaatcttgtcttcacattttatttcattaatttgatcttctatcactgatatcctttcttggtgaccttcggttgggatctttgagtggacgtgctgttcctttctgtttgttagttttccttctgacaggcccatgtgctgccggtctgctggagtttgctagaggtccactctcgaccctgtttgcctaggtatcgccagcggaggctgcagaacagcaaagattgctgcctgatctttcctctggaagcttcgttccagaggggcacctgccagatgccagccagagctcttctgtatcaagtgtcggttggcccctactaggaggtgtctccccgtcaggatacacgggggtcagggacccacttgaggaggcagtctgacccttagcagagcttgatcggtgtgctgggaggtccactgctctcttcagagtcgtcaggcagggatgtttaaatctgatgaagttgcgcccacagcctcccctttctccaggtgctctgtcccagggagatgggggttttatctataagtccctgtctggggttgctgccactttttcagagatgccctgcccagacaagggaaatctggcaatctggccatggcagccttgttgagctgcagtgggctctgcccagttcgaacttcccagtggcttagtttacactgtgagtgtaaaactgcctactcaagcctcggcaatggcggacgcccgtcccctcaccaagctctagcgtcccaggtcaatctcagactgctgctgtgctggcaacgagaatttcaagccagtgaatcttagtttgctgggctccgtgggagtgggacctgctgagccagaccacttggctccctggcttcagcacccctttccagcggagtgaacacttctgtctcgctgctgttccaggcgccactggggtatgggaaaaaagaactactgcagcttgtttggtgtctgcccaaatggccgcccagttttgtgcttgaaacctagggctctggtagggtaggcaaccgagggaatctcctggtttgtaggttgcgaaaaccgtgggacaagcgcagtatctgtgcaggagttcctcaggctcagtctgtcacggcttcccttgggtggtggagaaaattccccgaccccttgcgcttcccaggtgaggcgatgctccaccctgcttcagcttgccctctgtgccctgcacccactgtccaaccagtcccagtgagatgaaccgggtaccttagttggaaatgcagaaatcacccgccttctgcgtcgatcttgccgggagctgcagactggagctattcctatttgaccatcttgccagcaatccccccaacctttttttttttttttttaaaaagggatgggggtctcactatgtcaccccggctggagtgcagtgacacattcttagttcactgtaacctcaagctccagggcttaagagatcctcctgcctcagcttcctgagtagctgggactataggtgtgcaccaccacacctggctaattttttttactttaattttattttatttcatttttttagaaatgaggtctcactgtgttgtgttgctcaagctggccgcaagcaatcctcccacctcaggctcccaaggcactgggattataggggtgagccacagcccctggcccagtgtaatcgttacttgtattttatatgacattctctagttggtattttatgctttccttgaaaagtctcattttgatagagactattttctgccattttgtctggttcatttttttctattactatgagtttaagtaaccttttatagccagtaagatagcccattaagcccattatactttcttggtggttgattttccctcttttgcatacataggaaatgctcggaacttctttacgtttttcaaacgcagctggctctgaaactgctccagtgtctgaaagtgacggatgcgcctcatttctatggcctgccgtcccttgagcggaccttacgagggatggctaacctcactgcgtttccgggatggagctcacactctcctctcacaaagcctctagatatctgtgtgaagtacttgtcaggtctccttgaggtaagtaaaaatagcatatggtagttatttactattagttgcttttactttatgccaggccacaagtgcattatacgttactctattcaatgtagaatattatacattatttatataagtcataatagtgaaatgttttagtgatttttattaatagttaagtaaggaaggtcacttttataaataccctcattttcaaaagaaataaatggaaacttttgatgctcaaaggaagtgttcgctagagcatttcagattttggatttttggattaggaatgctcaaccagtaagtatatgatacaggtatttcaaaatccaaacaactccaaaattcaaacacttctggtcccaagcattttgtatacggcatactcaggctgtacaatgttaaaggatatttgttttttctttttcttccagtttgtgcagttctagatgctactgctatgaacattcttatcttttggtgaaaatgagcatcttttttgaaattttatcttctgttattgaaatatgtaaatatagccaatttttatatgttgaccatgtatcaggcaattcttatttccaatatcaaaacaaaagcctttaatttttcacccttcagtatgctgtttatagtttttttttgtcaattaagaaagatcaagttaaggaagttttcttttgtcctgttttgctaggagctttgttttttaattcataattgtatattgcttttttctgtatcttttaagataatcacatgatttttcccttatattccattactgattgattttaaaatgttaaacaaccttgcatttctcgaaacatttcagttaggttgtgatgtattactctttttatatgttagtggatttcgtttctcaattttttagaattctgaagtttttagaattattctatttcctcatgtaaaaaagtttttcgaattttgcatcttttttctcttaaagaatttgtcaggtttttaataatcaaaatcattccgttcttatgactaaaatgggagaatgtgagattgtaagaacgtgactttttcaaccattttaaatcttttcctttatataactttcttttttggaatagctgatttgcattggtgtgattttgttctctaatgttaggtagaatttgatcgtgaaacaatcttggtttgcagttttctttttgggaagattgtaaattgtgaaatgaaatgactttttttttttttgagacagagtcttgctctgttgcccaggctggagtgcaatggcatgatctcagctcactgcaacctctgcctcccgggttcaagtgattctcctgcctcagcctcccaagtagctgggattacaggcgcctgccaccacgcacagctaatttttgtctttttagtagagacagggtttcaccaggttggccaggctggtgtcgaactcctgatctcaggtgatccacacccgtcttggcctcccaaagtgctgggattacgggtgtgagccactgcgcctggcctgaaatgactttttaaatagatctaaaatcgttcagagtttctttttatgtgtgtcagccttagtaagttatgtttttgtagaacttaaaaactttttatctaatttttaaaatttgttactgtgaaggtattcatcaaatcatcttacacttttaatgtctgctgaatctgtagtgaggtcccctttcattgcagacattaattattcctttctcaatttttcttggtttatctttctaatagaatgaacctttggctttgttgagcctctctttaacttttttctcctgttttatttctgccaatatttattatctccttctacttttagtttagtttacagctcttttttctaacattttaaggtagaggcttacgtcattgatttttttaaaagtctttctcaaatgtgtgtttttagctctaatcctctaagcatggccttatgccatgtttttatcatcaatttaggtcaaaatatttctactgtgatataataaatacgacaatgatatggttgtacatagttctatgagaacagcctcatcacagtggcctgacaattttgcatatctgcccttgggcttcatagacaaggcttaactacagccaatctaaatcttggcagaatttcctgtgatccttctggaacatgagaatatgaaaggcttatgagcagctgactatgcaagattgattctcacttacttcacagtctattaggaagtcagttaggagcccgtttcttattggttcctaggttccgacgagcactgggctttctgccttgctctccttggggcatagctacagcttataaaactgctttactgcagcacggcatgggcttctccgcaacagagtgtcctacatctttgttatagtcatctggcccctttgtttcaatgtcatcctgtgcaagggatactagtagctggcacctttgtctattcttgcttttgctgtttatgtaggtaataaactgtctgaatccaaaaattactcattgttttcttactggacaaatctgtcagccttgttttgattgctaactgtgttcggacctcaagaatgattcttgtaggaagcactgtagagttagattttgaaagataagtaaattgatagtgatagcaatagacattctagacatggaattttctgataaaattgtatctataacctcctgtttttttttcatgctgtgggtgacttcttgacatcatataatctctacctattgccagattatttttcagaaacataaatttttcaatccaaacctctttttttttcaagagcataagactcaatattttgcatttagagatttgcctccattgtagttttttcccacatctctgaattttcagttatatctggctgtttttccaaaataaaaatgcactttaaaaagactgcttctttcacatagtttcctctcttttagggatggcaatatctacaaaaaatttaagatctaacttatttatttaccttcatttagtaaaccttttcttattcttccaaggttggatacttacctaatactgtttggcctttcctgtaggttatatacctgtaacaatttatatatgtggctattacttaatacattatatttttatttattttactttatttctttgagacagggtttaccgtgttgctcaggctggaatgcagtggtgcaatcacagctcactacagcctcaacctcctgagcccaagtgatcttcccacctcagcctcccaagtagctggggccacaggtgtgcaccactacacctggctggtttaatttttttgtagagatgggtctcactatgttgcccaggtttgtcttgaattctttggcgcaaatgatcttcccactttggcctaccaaagtgctgctattacaggcatgagccactgtaactggacctttattttgttttctgcattgctctagtagactatgagcttataagtatcatctttgggctatttctactatcccatggctactgcattgacctagcaccatggtttttacatagtggttagtgaatcagttaattaatatatgtgctacataatacatatatattgtgtatagtttttaaattaagatacagtttgaaaaacattttggaaatgtagcataaatgattataaaaatatgttttattgttgtatttttattactaaataatgatttaaataatgtatatatatattttatctggtcttatctagaacttttttccaaaagcacatattgtttttaaaacaagtttaaagatcataaatactctttgctgtactgtaaaatttaatatgaatttcactggagtccctttaataaaataaatttcggagaggttccaagatggccaaataggaacagctctagtctacagctcccagcatgagcgacgcagaagacgggtgatttttgcatttccagctgaggtaccgggttcatctcactggggcttgtcggacagtgggtgcagcccacggactgtgagcagaagcagggcggggcatcgcctcacccaggaagcgtaagaggtcagggaattccttttccaagccaagggaagccgtgacacatggtacctggaaaattgggacacttccaccctaatactgtgcttttccaatggtcttagcaaacaatacactaggagattatatcccacgcctggcttggagggtcccacgcctatagagcctcgctcactgctagcacagcagtctgagatcgaactgcaaggtggcagcgaggctgggggaggggtgtccgccattgctgaggcttgagtaggtaatcaaagcggccgggaagctcgaactgggtggaacccaccacagctgaaggaggcctgcctgcctctgtagactccacttctgggggcagggcatagctgaacaaaaggcagcagaaacctctgtagacttaaacgtccctgtctgacagctttgaagagagtactggttctcccgttacagagtttgagatctgagaacagacagacagcctcctcaagtgggtccccaacccccgagtagcctaactgggagacacttcccagtaggggccaactgacacctcatacagccgggtgcccctcttgagacgaagcttccagaggaaggatcaggcagcaacatttgctgttctgtaacatttgctcttctgcagcctccgctggtgatacccaggcaaacagggtctggagtggacctccagcaaactccagcagacctgcagctgagggtcctgactgttagaaggaaaactaacaaacagaaaggacatccacaccaaaaccccatctgtacgtcaccatcatcaaagaccaaagatagataaaaccacaaagatggggaaaaaacagagcagaaaagctgaaaattctaaaaatcagagcacctcttctcctgcagaggaacacagctccttgtcagcaacggaacaaagctggacggagaatgactttgacgagttgagagaagaaggcttcagaagattggtaataacaaacttctccaagctaaaggaggatgttcgaacccatcacaaagaagctaaaaaccttgaagaaagattagacgaatggctaactagaataaacagtatagagaagaccttaaatgacctgatggagctgaaaatcatggcacaagaactacatgacatatgcacaagcttcagtagctgatttgatcaagtggaagaaagggtatcagtgattgaagatcaaatgaatgaaatgaagcgagaagagaagtttagagaaaaaagaataaaaagaaacaaacaaagcctccaagaaatacgggactatgtgaaaagaccaaatctacatttgattgttgtacctgaaagtgacggggagaatggaaccaagttggaaaacgctcttcaggatattatccaggagaacttccccaacctagcaaggcaggccaacattcaaattcaggaaatacagagaacgccacaaagatactccttgagaagagcaactccaaggcacataattgtcggattcaccaaagttgaaatgacagaaaaaatattaagggcagccagagagaaaggtcccgttacacgcaaagggaagcccgtcagactaacagcggatctctcggcagaaactctataagccagaagagagtgggggccaatattcaacattcttttttttttatgatttgcttttttttttttttttgaagtatttattgatcattcttgggtgtttctcggagagggggatgtggcagggtcataggataatagtggagagaaggtcagcagataaacacttgaacaaaggtctctggttttcctaggcagaggtccctgtggccttccgcagtgtctgtgtccctgggtacttgagattagggagtggtggtgactcttgaccagcatgctgccttcaagcatctgtttaacaaagcacatcttgcaccgcccttaatccatttaaccctgagttgacacagcacatgtttcagagagcacgtggttgggggtaaggttatagattaacagcatcccaaggcagaaaaatttttcttagtacagaacaaaatggagtctgctatgtctacttctttctacacagacacagtaacaatctgatctctctttcttttccccacatttcccccttttctttttgacaaaactgccatagtcatcatggcccgttctcgatggtcgctgtctcttcagagctgttgggtacccctgcagacaggctgtcacttcatgcttggaagattgcacagcggccaggcagaggcgctcctcacttcccagacgaggcggccaggcagaggcgatcctcacttcccagacggggtggcggctgggcagaggcgctcctcacatcccagacggggcagccgggcagaggcgctcctcacttcccagacgggacagctgggcagaggcgctcctcacttcccagacggggcgcctgggcagaggcgctccccacttcccagactggacagctgggcagaggcgctcctcacttcccagacggggcgcccgggcagaggcgctcctcacttcccagacggggcagccaggctcaacattcttaaagaaaagaattttcaacccagaatttcatatcctgccaaactaagtttcataagtgaaggagaaataaaatcttttacagacaagcaaatgctgagagatttgtcaccatcaggcctgccttacaagagctcctgaaggaatcactaaacatggaaaggaacaagcggtaccagccactgcaaaaacatgccaacttgtaaagaccattgatgctaggaagaaactgtatcaactaacgagcaaaataaccagctaacatcatgatgacaggattgaattcacacataacaatattaaccttaaatgtaaatggtctaaatgctccaattaaaagatacagactgggaagttggataaagagtcaagacccatcagtgtgctatattcaggagactcatctcacgtgcagagacatacataggctcaaaataaagggatggaggaagatcaaccaagcaaatggaaaacaaaaaaaggcaggggttgcaatcctctctccgataaaacagactttaaaccaacaaagatctaaagagacaaggccattacataatggtaaagggatcagttcaagaagaagagctaactatcctaaatatatatgcacccagtacaggagcacccagattcataaagcaagtccttagagacctacaaagagacttggactccacacaataataatgggagactttaacaccccactgtcaacattagacagatcagtgagacagaaagttaacaaggatatccaggacttgaactcagctctgcaccaagtggacctaataggcatctacagaactctccaccccaaatcaacagaatgtacattcttctcagcaccacatcacacttattccaaaattgaccacatagttggaattaaagcactcctcagcaaatgaaaaagaacagaagttatgataaactgtgtctcaaaccacagtgcaatcaaactggaactcaggattaagaaactcactcagaacagctcaactacatggaaactgaacaacctgctcctgaatgactactgggtacgtaacgaaatgaaggcagaaataaagatgctctttgaaaccagtgagaacaaagacacaatataccagaatttctgggacacatttaaagcagtgtgtaaagggaaatttatagcactaaatgcccacaggagaaagcaggaaagatctaaaattgacaccctaacatcacagttaaaagaagtagaaaagcaagagtaaacacattcaaaagctagcagaaggcaagaaataactaagaacagagcagaaatgaaggaggtacagacacaaaaacccttaaaaaaaattggtgaatccaggagctggttttttgaaaagatcaacaaaatagatacaccactagcaagactaataaagaagaaaagagagaagaatcaaatagatgcaataaaaaatgataaaggggatatcaacaccgatcccacagaaatacaaactactatcagacaatactataaactcctctatgcaaataaactagaaaatctagaagaaatggataaatttctggacacatacaccctccgaagactaaaccaggaagaagttcaatttctgaatagatcaataacaggctctgaaattgaggcaataattattagcctaccaaccaaaaaaagtccaggaccagatggattcacagctgaattctaccagaggtacgaagaggagctagtaccattccttctgaaactattccagtcaatagaaaaagagggaatcctccctaactcattttatgaggccagcatcatcctgataccaaagcctggcagagagacaacaaaaaaagagaattttagaccatatccctgatgaacatcagtgcaaaaatcctcaataaaatactggcaaactgaatccagcagcacatgaaaaagcttatccaccatgatcaagtgggcttcatccctgggatgcaaggctggttcaacatgcacagatcaataaacgtaacccatcatataaacagaaccaaagacaaaaaccacatgattatctcaatagatgcagaaaaggccattgacaaaattcaacagcccttcatgctaaaaactctcagtaaattaggtattgatgggacgtatctcgcaataataagagctatttatgacagacccacagccaatatcatactgaatgggcaaaaactggaagcattccctttgaaaactggcacaagacagggatgccctctctcaccactcctattcaacagtgttggaagttctggccagggtaatcaggcaggagaaagaaagaaagggtattcagttaggaaaagaggaagtcaaattgtccctgtttgcagatgacatgattgtatatttagaaaaccccatcgtctcagcccaaaatctccttaagctgataagcaacttcagcaaagtcgcaggatacaaaaaatcaatgtgcagaagtcacaagcattcctatacaccaataacagacaaacagctaaatcatgagtgaactcccattcacaattgcttcaaagagaataaaatacctaggaatccaacttacaagggatgtgaaggacgtcttcaaggagaactgcaaaccactgctcaaggaaataaaagaggacacaaacaaatggaagaacattccatgcttgtggataggaagaatcaatatcatgaaaatggccatactggccaaggtaatttatagattcaatgccaccttcatcaagctaccaatgactttcttcacagaattggaaaaaactactttaaagttcaaatggaaataaaaaagagcctgcattgccaagacaatcctaagccaaagaacaaagctggaggcatcacgctacctgacttcaaactgtactacaaggctacagtaaccaaaacagcatggtactggtaccaaaacagagatatagaccaatggaacagaacagagccctcagaaataataccacacatctacaaccatctgatctttgacaaacctgacaaaaagaagaaatggggaaagcattccgtatttagtaaatggtactgggaaaactggctagccatatgtagaaagctgaaactggatcccttccttacaccttacacaaaaattaattcaagatggattaaagacttaaatgttagacctaaaaccataaaaacccaagaagaaaacctaggcaataccattcaggacataggcatgggcaaggacttcatgactaaaataccaaaagcaatggcaacaaaagccaaaatagacaaatgggatctaattaaactaaagagcttctgcatagcaaaagaaactaccatcagagtgaacaggcaacctacagaatgggagaaaatttttgcaatctacgcatctgacaaagggctaatatccagaatctataaagaacttaaagaaattttgcaagaaaaaaacaactccatcaaaaagtgggcgaaggatatgagcagacacttctcaaaagaagacatttatgcagccaacagacacatgaaagaatgctcatcatcggagaaatgcaaatcaaaacgacaatgagaaaccatctcacaccagtcagaatggcaacattaaaatgtcaggaaacaacaggtgctggagaggatgtggagaaataggaacatttttacactgttggtggaactgtaaactagttcaaccattgtggcagacagtgtggtgattccttaaggatctagaactagaaataccattttacccagccattccattactgggtatatacccaaaggattataaatcatgctgctatattcatggaactagcccaaatgtccatcagcaatagactgggtgaagaaaatttggcacatatacaccatgtaatactatgcagccataaaataggatgagttcatgtcctttgtagggacatggatgaagctggaaaccatcgttctcagcaaactatcgcaaggacagataaccgaacactgcatgttcgtgctcataagtgggaattgaacaatgaaaaacttggaaacagggtagggaacatcacacaccagggcctgtcatggggtaggaggagggtggagggatagcatcaggagatatacctaatataaatgacaagttaacaggtgcagcacaccaacatggcacatgtatacatatgtaacaaacctgtacgttgtgcacatgtactctagaactttaagtatattaaaaaaataaaataaacttcattttttaattataaatattaaaaaaggttcaactgtcagtatactaattagttattttctgctgtctattagaaatgtatgaattttaaaaaacaggtatattaaagagttaatgataatatttcttagaaagtcagctcctctagtgcatttaaaatataattcagttagtctagctagtggcctatctatctcattaagtttttcaaaaaaacaactcctggatctagtgacctttcgaatggtttttcatatcttgatttccttcagttcagctctgattttggttatttcttgtcttctgctagtttggggttgatttgttattgctgctctaattctttcagttgtgatgttaagttgttaatttgagatctttctaactttttgatggaggcatttagtgctacgaatttccctcttaacactgccttagctgtgtcccagagattctgatgtgttgtaactttgttctcatgagtttacttgtgtaacaaacattcacgttacccgtgaacctaaaagtttaaaaattaaaaaaaatatataattgaacctataagtacctagtttatagcattttttgtcatgtgatttataaatactctatttatcaaccttttacagagtcagtctcctctagaaaatgagttttactctttgaaatcaggaataggtgaggacctgccacagcggtaactaaagaagaagtgaagtgttgcctcatttatgtttagaaactatcagaagtgcttttgttttaaaattacgtgcaaagactttagatcacacctacgtttcaaataccagaaattgaaatgaactgttaatgtattggagaacaaaagggcttagttttaggtaagaagtgtaggcaaaaaggcagtagtccattctgtgttcagttgtctttgaggtaataaaatttagtaacagtttgttagctaaaggatacataaaaagcacagtccctgttatgtaatgtttcgcagttataaaaaatttgattagccaatcttgctttggtttaaaaaggaggtcgttttgtgcttcataaaacatctcgagcagaaaatctttatgactttatgttaaatggcaggcaaatattaggaaagaatccgtcacttttgttaaaaattgtagcagggtaacatttaatcttgggactatctgcttagtttattaattacataaacaggtatccctgttgtactactaatgactaaattcatcttttaaagaataaagtaaggcttatgtgagagaacattgaaacaaagtcattgttggtccaaatgatttgcttcatagtttcttagtaattaaagctgtttcctttttggaagggagccatatttctaataaaagattagcttgtttctgcacagtgaaatttgaatatgagtatttgctttttgtagctgtgaaatgagactttttaactaagcatgattaattatgataggtgaataaactatgataattaaatctttaaatcagatacatgatgtataattccagaggtctgacaaaaatatcaagttgaaagaaaatactggcaaaggtcttggcttgtcatttataagctagaattaaaaatcattacacagatcacagatgttagatatctccaaagatgacttagaggaagataataaggatctgatcatttagatattttatttttcaagtagtcacttaaaattttaaatttttgaccttggggaaggggcagctgtgggcacagcttcagcaaacttaaatattcttgcctgccggctctgaagagagcagtggatctcccagcacagcactcaagctctgctaagggacagactacctccttaagttggtccctgaaccccgtgcctcctgactgggagacacctcccagcaggggttgacagacacctcatataggagagctctgctggcatctggcaatgcccctctgggacgaagcttccagagtaaggaacaggcagcaatctttgctgttctgcagcctccgctggtgatacccaggcaaacagggtctggagtggacctccagccaactccagcagaccagcagcagaggggcctgactgttagaaggaaaactaacaaacaggaatagcatcaacaccaacaaaaaggacttccactcagagaccccatccaaaggtcaccaacatcaaagaccaaaggtagataaatccatgaagatgaggaaaacccagtgcaaaaatgcggaaagttccaaaaaccagaatgcctcttttcctccaaaggatcacaactccttgacagcaagggaacaaaactggatagagaatgagtttggtgaattgacagaagtaggcttcagaaggtaggtaataacaaactcctccaagctaaaggagcatgttctaactcaatgcaaggaagctaataaccttggataaagggtagaggaattgctaactacaataaccagtttagagaagaacataaatgacctgatggagctgaaaaaaacagcaccagaacttcgtgacacatacatgagtatcaatagccgaatcgatgaatcagaagaaaggatatcagagattgaagatcaacttaatgaaataaagcaagaagacaagattagagaaaaaaaaaaaacaaaagggaatgagcaaagcctccaagaaatatgggactatgtgaaaagagtgaacctacgtttgattgatgtacctgaaagtgacagggagaatggaccaaattggaaaaaactcttcaggatattacctaggagaacttccccaacctatcaagacaggccagcattccaattcaggaaatacagagatcaccacaaacatgctccccgagaagagcaaccccaagacatgtaatcgtcagatttaccaaggctgaaatgaaggaaaatatattaagggcagccagagaggtcgggttacccacaaagggaagcccatccctgttagtcttaccagcggatctctctcagacaccctgcaagccagaagagagtgggggcctatattcattaataaagaaaataattttcaacccagaatttcatatctagccaaactaagcttcaaaagcgaaggagaaaatcctttacagacaagcaaatgctgagagattttgtcaccaccaggcctgccttacaagagctcctgaagaaagcactaaatatggaaaggaacaaccagtaccaaccactacaaaagcataccaaattataaagaccattgatgctatgaagaaactgcgtcaactaatgggcaaaataaccagctaacatcgtaatgacaggatcaattcacacataacaatattaatcttaaatgtaaacaggctaaatgccccaattaaaagacacagactggcaaattggataaagaggcaagacctatcagtgtgctgtattcaggagacccatctcacatgcaagacacacataagtttgaaataaagggatggaggatgatttaccaagcaaatggaaagaaaaaaaaaagcaggagttgcaattttcatcactgataaaacagattttaaaccaacaaagataaaaaaaaaaacaaggcattacataatgataaagggatcaatgcagcaagaagagctaactgtcctaaatatatatgcacccaatacaggagcacccagattcgtaaagcaagttcttagagacctacaaagagacttagatttccacacaataacagtgggagactttaacacctcactgtcaatattagatcaacgagactgaaaattaaaaaggatattcagaaaaaaaaaaagggatattcaagagttgaactcagctctggaccaagcggacctaatagacatctacagaactctccaccccaaatcaacagaatatacattcttctcagcaccacatcgcacttattctaaaattgaccacataattggaagtaaaacactcctcagcaaactcaaaagaatggaaatcataacaaacagcccctcagaccacagtggaatcaaattagaagtcagcattgagaaactaactacaaaccgcacaactacatggaaactgaacaacctgctcctgaatgactactgggtaaataacacaattaaggcagaaataaattagttctttgaaaccaaagagaacaaagacacaatataccagaatctctgggacacagctaaagcagtgtttcaccaaatgcccacaggaggaagggggaaagatctaaaatcgacaccctaacatcacaattagaagaactagagaagcaatggcaaacaaattcaaaagctagcagaagacaagaaataactaagatcagagcagaactgaaggcgacaagagacacaaaaaacccttcaaaaaaaatcaatgaatccaggagctggtgttttggaaaagatcaacaaaatagatagaccactagcctgactaataaagaagaaaagagagaagaatcaaatagacacaataaaaaatgataaaagggagatcagcactgatcccacagaaatccaaactaccgtcagagagtgttataaacacctctacgcaaataaactagaaaatctagaagaaatggataaattcctggacacatacaccctcccaagactaaaccaggaagaagttgaattcctgaatagaccaataacaggctctgaaattgaggcaataattaatagcctagcaaccaagaaaaggaccagagggattcatagccgaattctactagaggtacaaagaggatctggtaccattccttctgaaactattccaaatgatagaaaagagggaatcctccgtaactcattttatgaggccagcatcatcctgataccaaaatctggcagagacacaacaaaaaaagaaaatttcaggtcattatcactgaggaacatcaatgcaaaatcctcaataaaagactggcaaaccgaatccagcagcacatcaaaaagcttatccaccatgatcaagttggcttcatccctgggatgcaaggcccgttcaacatatgcaaatcaataaatgtaatccatcacataaacagaaccagtgagaaaaaccacatgattatctcaatagatgcagaaaagtctttcgataaaattcaacatctcttcatgctaaaaattctcaataaactaggtattgatgagacatatctcaaaataataagacctatttgtgacaaacccacagccaatatcatactgaatgagcaaaagctggaagcattccccttgaaaaccagcacaaattattcataaactctttaaaaggatgctataacatttttaaaaatattataagcatattctaagttacaactgtgtactaggagggcaccacacatctttttttttttttttacagactttaaaaggaaaaatattgaaactaagaatttttgtttttgttttgaaaaattacaggatctcactctgtaacttaggccaagtgcagtggtgcaatcatagctcaccgcaagctccagctcccaggctcaagggatcctccctcctcagcttccccggtagctgggactacaggtgtccactgccatgcctggctaatttttttcttttttaaagtagactgggtcttgctatgttatgtaggctgaagaatattttcttttaacaatggtaaaatacccataacataaaatttaccatcttattcatttttaagtatataaactaaaaatattacaactttataaggtaaggattcaattcatacaagtcagtagacagttatatatttatctttatataccattgagaataaagccaccatgaaattgtttacatttgtttttcaggtcattacttctttttatgtggagcgtggaggaaatgctatgtccttcatgggaaaaggtgttacaaagagcacaattctttgcttgcttcacttatcccatgagatgatggcccaggctgggagcttggtgagcgcgttaaagctgtctatcttctgaacatttgcttgaaagggaatgtgctgtgtccaacacatttcaagcatataaacttgccacatgaaaatgtctcttttgacttttctttttaggtaacgtgaatgatttttgactagaatatttcttagaagttgtatattaacaaatctgaatcttatttgaaattgattcaaatgtgcatacactggaaaactacattttgtctacattatgggaaaaatagcttctgtcaaaaaattgttatgtttaactttttaaagagaaacaaatttttttgtttgccttttttggctgaataatggattaaaaccaagtctaaaatacattttcacgttgttttcattaaaaattcttgttttaaccttcctgcattttatttttagaaacttacctcaaatatttctgtttcccttttttccctctaggagtggatgtcactttggttcttgcctttgggtagtcatagtgaagaacatattcctactcaacaaggattggcttggttgattccattatgggttgatcgggacccagaggtgagtgtgaaggagaatcaagtgtattgtgtttagattaaaaaacaaatgacacggggccaggtgcggtggctcatgcctgtaatcccagcttgttgggaggctgaggtgggcagatcacgaggtcaggagattgagaccatcctggctaacacagtgaaaccccatctctactaaaaatataaaaaaattagctgggtgtggtggcaggcacctgtagtcccagctacttgggaggctgcagcaggagaatgctgtgaacttgggaggtgaagcttgcagtgagctgagattgtgccactgcactccagcctgggcaacagagcaagactccatctcaaaaaaaaaaaaaagacacaaaacatatatacatatacatagttatattatgggattattgtagtgactctaccttatgttttatttaagccctgttttagcttaggctgccataacaaaataccacagactgggtggcttagacaacagacacttcttttctcatagaagttttggaagctgaaagtccaagatcagagtgccggcatagtcaagttctggtgagggctcttcttctggcttgtagacggctgccttcttgctgtgtattcacgtggcctttccttggtccatgcatgtggggcaggggagggaggggtggtatagagacagatttgtctttttttttttattataatgttaccagtcttattgagataggaccactcccttatgatctctttaaaccttaattatctcctagaaaccctgtcttcaaatgtagtcacttgagcataaagacttcaacatatgagttttggagggacgcaattcagttcatagttttccatccctgagcccctgaacttcatgttcttcttccatgcaaaatgcttttattctccctcaacaacctcaaaagtcttaacttattcccaaatcaactgtaaagtctaaagtccaaaatctcatctaaatgtcatttaaaccacatctgggtaagtctccagatataaaccctcctgaaacagaattcttctgcaggtgtgaacctgtgaacccatacaagttatatgcttccaaaagatgatggtagaatagacattcccattccaaaagagagaaataggaaaaaaaggaagaagtgatgggtcccaagcaagtccaaagcctagcaaagcaaatttcattagatgttaatgctcaaggataatgttctttggcttgatggtgtgccttacaggcccaccagagtgacagcatctgtctagatggctctgtgggatgaccccacccctttggctgtcttcaagagccccgcccataaagctgtcttcaagggcagccatgttcctgaagcactgggcagggtcatcattctggcccacagaaatcagaggtctttgaaaccaaggaggaaaagccacccttgagtcctgtggtgggattagcagcctggggatctctgaatcattttttgggtcattcttttcattgaagaatacagtagtcctcccttatcagaggtttcattttccaaaagcaccctgaagatcagtagtagccaaaccctccctcacaatgcctacatcattcacctcacctcatctctttatgtaatcattgtatcatctcacatcaatacaagaaggctgagtgcaatacaataagatattttgagagagagaccacatttatgtattttgtattataacatattgttgtaattgttctagtttatttttagttattgttaatctcttactgtgcctaatttgtaaactttaccatagatatgtatgtgtaggagaaaacatagtagttatagggctcagcactatctgtggtttcaggcatctactgggggtcttggaatgtattccccatggataagggagggaccactgtagcacatatttgcttacagaatccaggaagtccaacagctttccttcattctctgcatctttctctgtcctctttagttcaaactggcaatgtctttgctgatataatcccatctctattcctggcttctgctgagatgtctgattaagtccatgaattgcacccgtgatctttttcttaaatgggtattcagccacaccctccatgttctctttagaacaagctttctcattttttttgcacagataggctgagaatttttcaaatcttgttcttgtttctttttgcttacccattcttaattccttctttaattcatctctctccctttgcattttgctataagcaatcaggaggaaccaagccaatttttcaacactttgcttagaaatcttctcagctaaatatccaatttcattgctcacaagttctgcctttcacaaaacactagaacatgaccacagcttaaccagttttcttgctactttataacaaggattgcctttcctcaaataaccttttttaaataacactttcctcatttttgtctgagatctcatgagaattacccatgtctacgtttctggcatccacctcaaaactcttctagcctgtaacccattacccagtgccaaagtcactttcatgtgtttaggcatttgtttcagcagcatccccactccttggtacaaaaatctgtattagtgtgctcaggcttccataacaaaataccattgtctgggtggcttaaaaacagaaatttatttcttacagttatagaggctgcaagtccaagatcagagtgtcaacatggttggtttctggtagggcactcttcctgatttacagagggccaccttctcactgtgtgctcatatgacctctccttggagcacgcacatggagaaagatttctctccttcctgaggccaccattcctagtgcagtagggtcccacccttataacctcatttaactgtaatcacctaatagctctgtctccaaatacaggttggggattagggcttcaacatacgagtcttgaggagacacagttcagtacacagcaccctcattttcaatcaaatttgttcgagtatagattgaaaatataaaagagaaaaggttatagtatctattaccttcagaagagtggaaaattattggagaagcttagcaattttgaaaaaaataaaaaggatctggaaattatagacatgcaacacttaagtgtcatataatgaaattaaattaaatgcaaaaaattgcatttgcattacaatacaaaattttgtattatttctttccagttttagccagtttacttttttcaagtaaaatatgctattacaataaaatcttatttatagaaatatttgaaatacattttttagtcacattgaacttggacttactacttgacaattttatgactgcatttttaaaaaattctatagctgtcattgaaactatatttttggattcgaattcagaaatttaccaaaacgtgtggcttgaacagcagtggttctacagcaagcatattataccacatcaatcttatttgggaacgtttttctcttgaataacttttgaggaaaatacgaaatgccttgtaaaatgataattgcctctttgtttagaagttttaagaaagttaaaatcatttatttggaagaaacaataaaaaattaagaaaggtagaacaaagaatagctaccttttttaagaatgaagaattgaaattgtgttcataaaatgtaagtgccctatgctttccttagaaaaaggcttgcaaactataatttttatgcatctttttatacccagttttactttgctttgaaatttgcttatatttaatttttcctatattactgctttcttgaatcatggaatggaggacactgtcttctataggtgtctcttataatttaggatcataaaaccaatggatttttttaaagtgtgatatttatgtaccagaaaaactaagaattcatgttaggaaaaaggcttatttgattcaacaactttctctttaatttgaacaggtgagattcacttcactgggattaggatcagcactgaccacccttgaaacgggctgtgtggccttagcaaacagttgtcagaacatttccggtgggctctggggaactgtggtgaacattcttctggaccagtcagaatgtagtatggtgcgccgggaggtatgtctgtcttttctcctttttttccttagaaattctttgtgatggtatccgtaagcgatacttgactgccgctcaacatggtggactgaccactgaccatgatctcttctgtctgtgaacacccaaacaaaatgacagtagaggatttaaaaggtattcatgcacaggaaaaactggagtccttccttccgataagataaaatcggaatatactatattttaatgtgaactttttttattatgcattgaaaggtagttcacaggaaaaattacttttatattatctcagcatttatgggtctctgatatttatgaagctttagtatagataagaggctgtcaaaataactctttgtagtatttatcatataacatgagagggaaaaataaaccctattttaattctttctgaatagcttgtggtttttttttattgctgcttttgttaaagtaatgattcatgtaaatggttttaaaacaataatcaaattgtacttagaggcttatgaaaaaaaacagcagctcctgggtccaccattagcagtcgccagttccaagctcaaaaggctagttttgttgctgtttgccttcatgtttttaagtagtgatgtttatatttatggctgcttcttgatttatcaactttaaagcttttccatcacttctagttatcatggttggaaatgtcagtttcttagaatcctcttgttaatcctgtcattctcccattatggttatttcatctttcattaagcagacaatcaatgctcctatttgtatgattatttaatttgatcatcttcaggatctagtcaagttggacatttgtggtttgtatttctagttagcaagtttttattgaaaggagtctgtataagagaagggagaaagcggggcagaggggtgcgtgtgtttgtgtgtgtgtgtgtgtgtaatctgaaaggggatagtagaaacctaaaattatatttcttaaatgctaccagaagaatttatgttatacaaatcattttttaataaagctgaattctgaaataggaaaagatatatttcctgatgaaataatttcatatgctgttaggtcattacctaacaaggtcattacctaagaaggtcatcacctaacaagaaatacagtttgacaattctcataatgacctctcagcatgtgcagttgaccagagatgtcttttgctattaattacaatatattggttatttcagagatgaccacaagatggcagtattgacctttttttttttttttttttttttttttttttttttttttacattttcaggcggcatttattcttcagaatctccttgtaattccaatgcctacagaaattataaaggattatacttggcaggtgggtgattttaaacaattatcaacctagtagatgtttcaaattaattggtgataaattttcagtataagtagtatatttcattattgatgaaactatatacaagacagcaagggcctcttaaaatagaacgtagaatttgttcttatgccgaccagacttaaaaattcttctctatagtgttcacaataatttaaagcaaataataatagttaacatatgtttactatgttttaggcacccttctagaaatgtaagacatagtaacttgtataattgtttgagttgtgaactgttactatccttattttctaagcttaggaacttttgcatagagagtttaaatagtttgtcctaaatcacacagctagtcagtggtacgcctttgctttgagtctaggcagtctcttacccactttgctgtattacttctctaatttagtaataataaacaaatttgtagatagttaaatatgtgttgatgttaacatctttttttccttttctaggttagtgcacagtgcgggttatagtgtatcttgctttgttttctgttgggttaactttctttttcatgttctgaatatcacatcagtaaatggttacctaacatttttatagcttacattaaaaaaattctagcttcatgggatatatgtacatgtttgttacataagtatattgcgtaatggtggtggggattggggttctcgtgtactcattacccaaatattgaacattgtacccagttaggtaatttataacctcagccgcctcccccactccctccttgggagtctcagtgtctgttatgtctgtctttatgtccatgtgtattcattggttagctcccacttatacgtgagaacacgcaatatttgattttctatttttgagttagttcacttagataatggcctccacctccatccatgttgctgcagttttaggtaatttggaagatacaaaagtacacttattggggatataagatgtgctgtttctgtccttttacctatccatatattttcaccttatagggatatatttatcatattgctacacctcactcctcaaaatcctgtataaatctaaggtttatttttaagttttaattagactatactcttagaggagttagtgaaacaagctgaaccgtagcaagggcaagtttccgcacatgacccgaagcatgaatccaggtggttgtcaaggcccaggtagcatttaactcttggaaggcttacctctccaaactttacaaacccagggtaaccctaccagtcattgtaaatcccaggcttgtaatttgctcgtaatttctttaacattgccttctgataatggctgcttatctactttccatgttgtaataaaaccaggagacaaaactggagggaatatgcaggattaatagttatattaatagtgtagtagttttggtacctgttatccggagactacattttaaaacatgttgtttttggctcaaatacaaataatctctactcccattgttaaactagtgacccatgtacatggatatacttggtgatgtactaccaatgaatttttaattattgaaataagtataaaggcagagtatattaaagttcctgggacattatgttgtaatacagaaccgtatgtagctgttcatatttttctcttagaaattaaatagtaaagttcctgtttgttgctggtggcatgcttactgcagtttattggttttgttattctccagtcttcatcatggaaatccttttctactaaaaagtggaaaatagtgatttaagttagcttttggagttttggccttgctaagttggccaaaataaaaaaagttggagagccactgctgtcccaaacaatagttgattacaacttttgctagtcttaggaaaaattagataaataaggacaatcttgtatgctttttaataaactcagattttcttcctctcttttcagtctttttttttttttggttatttttgtttgtgtaagtgtccttccttggcagtgaaaatagttaactcagtatatctgtcatccaattttaagaaagtttagtggggtctgaaattccaaagtagaaacagcttctgcaagaaggaaacaagatggttgtctctgggtgcagctagtggggcacatggtcctttgcaaccatgaaaaaggggccacatagccagtattttaaaattcaaacagtctttggtagaattatgaataataatcttattcaacaaaatgtttcatttacttattttagtgtccctttcatagtgttgtggaggatatagcatgaaacagcatgtttaggagctttgttaaaattttattttggttgaggtaaatatttgattttttttttttaacaaagagaattgcttctattgctttgcactttgttttcctgcctgcagtctaaattaatgcccgctagtgctcttgtttcataggctttctgaagcattctctttataattactactccttttcctctccttcctctgcacagtagcataaattcctacttcatgtcatgacatagaattgttgtacttgtgaatagtaataatatgcatatatgaattatgaataatattatagctgagtttcccttttattgttagatgccagaaagtagagcccttttatcaattgtgactttttctgtatgtacttaaaaaaaaaaaaagatggggtctcactgtgttgtccaggctggccttgagttcctgggctcaagtgatacgcttgcctcagcctcctgagtagctgggaccccaggcacatgctgccacacccagcttaccttctaagctttattcatggttgcactttttccatatctctggcttttttctttcttttattcctgatatgcatttactatcatgttacaatttacctttccttgtaatgggccttaaatcttttctcggacaagataggaagtaaataatttaaaacaatttatttttttaaagtattaaataattttaccaaccactgcaattcccattttaatcttccttttaaagacactaacatttaatgtcttaccactaaattaggttattttccatatttgcattatttcttaccatttaacttaatcttcctgtgtagaatgtttgtttctgacaggactacattttttatattttaaaaaatgtttctcccaacccctaccacagagaaagtaagtgctccatctgtcttgactgattcattaaaatgtgcaaaacatttgagttatccttttggtcttaatatcataagtaaatacagttagaaataaagccttaattttcatagcataagtccccttttatttttctgtggatgcagaagcatactggaagtggggtggtcaccaagaggaggagcagatgaagtatctcggcctgtcttcccttgacatctagcactcctaccaggggccttgataccaggcccctgctggatatgagaacccagttcctgctgtgtcagtctttggtgtgtcacagctcttttatattcaggacactaacttttcagagggatatttacaaacattggtcttgttcttgagtcaaactcagcctcattcaaagctacatcccagctgggtgtggtggctcatgcctgtaatcccaacacttggggaggctgaggtgagaggatcacttgagcccaggagtttgagactagcctgggcaacatagtgagaccccatctctaaaaaaaattttaaaaattggcctggaatggtggcatgcacctgtagtccctagctactcaggagactgaggcaggaggattgcttgagcccaggagtttgaggccacagtaagctatgattgtgtcactgtgctgcagcctgggtgacagaacaaaaccctgtctctaaaaacaaaaaccctgcatactacattctctgccaagaagagaaaacagagccaatattcagttgacacgaaactgtattgtggctcccaactgtccagtgtttttcagaccagtttcccacagtctgactaggagttaagactcctgaatgtggatggtttcataactgggtttagtttgaagactagtgtcagaaatccgtatccctgaaactttaacaaccaattttagagttgattataacaagaaatctattgattagagatggattattgatgtaattttctcagttcatttctgtaaacatttgttgagtgtctaaatattggagattcacagataatccaatttagtattcttgggcttatggcctacaggggatgacatgtacccaggaaacattgttataatcatgttatgtatgatgatggtagcttatgcataattttaataatatttcagttctttccacttgaaaatgatctcacatttaaatgtaaagggtaatttcatgcacttaaataacataatgggttgtcagtttgtgatttaaataaacttgttcatgctctagttgctttccatgtttgtgacaggactttgaattggtacacagactttttaaactttattttgaaaaaacttagatttataggaaatttgtagaaacaatacaatttttatgtactcttcacccagattccccaaatgttattttacacatttacttcagctctgtctagtgtcttctttctaaactattggagagttgtagacataatgcttcttttcctctgaacacttaagtgtggatttcctaaaaataaggatatcctcttacataatcacaataataattatcataattaggagattactcaaggattttcagttgtcccactgctgtttttaatagaaaaaaaagaaaaaaaaatccaatcctggatccaagatccagctcaggaatacacattgcatatacttgtcttacatatttgctttcgttcatctgaaatagtttcaaaattttaaatatttatgatcttaacatttttgaagaatgcaggctacttatttgttgtaatatacttcaattagatttgtccttttccccaggtttagatttgagttacgcatttttggcagaaaaaccatagaagtgatgggttctcagtgcaacatgtcaagagatattatatctctctttcccattgttggtgatactaactttgattacttagtaaagatagaatctgcctgttttgtcctttgtaaagttacagttttttcttttggaaggaggtgctctgagactgtaaatatctgtttctcatcaaactttctttcactagttttttgttttgttttgttttacttttttttcccccataggttattggggaacaggtggtgtttgattacatgagtaagttctttagtggtgatttgtgagattttggtgtacccatcacctcagcagtatacactgcacacagtttgtatcttttatccctcaccccttcccacccttttccctcaagtccccaaagtccgttgtgtcattcttaagcccttgcatcctcatagcatagctcccgcttatgagtgagaacatttgatgtttggttttccattcctgacttacttcacttagaataatagtctccaatctcatccagatcactgcgaataccattaattcattcctttttatggctgagtagtattccatagtgtgtgtgtgtgtgtgtgtgtgtgtgtgtgtgtgtgtgtgtgtgataccacacacaccagtttatccactcattggtggatgggcatttgaattggttctacatttttgcaattgcaaattgtgctgctataaacatgtgtgtgcaagtatcttttttgtataatgacttcttttcctctgggtagatacccagtagtgggattgctgaatcccactggtagttctacttttagttctttaagaaatctccacactgttttcctagttttaaattccattcatgattcttacctgaaacagttattacagaattgttgccaaatgatttcctaactccatcatttctttctatgtttattacatgctactgtaaggaagaacttttcattcttccttgcttatttagtgattcacttatttacaccagcatggattgaagattcttaagtttgtttaatgggctataatctgtttctatcattatttgtttcaatgttcaaatcattcttgctttggccaggggaaatttcttcataatggttcttgtgtctttatcaatatttgagccatttccttacttctggtacagcaaagtgttctagactgtccagctccatcctggaatcagatatttgctccaagggctctgatttcttttcatggagaatggtatttagaaaccaagatctgcgttctagatgtattcattgttcctggggtgtcattgcttctatgtcctgtgagtgaacaaagctagtaattgtctgtgtatatgttttaaatagtcagctcatttatagttatatattattttgatatttgatatgattaatatgtattatttttatcttttgtttgttatgaagcatcatgagtatttccagaagacaatgagtacttggtaaactgatatcattgtaatgatattcatattttacatgtagttttggatttctaatgtatttagggtcatttttacagtctttggattatagcatttttgttatatatgacaataattcatttttctccttgaaaatattatatcttcttaaatgttattcttactttgcttctagtaccttttcaattatagctaatgggtatattagcactgacactaggagtataatatgcattttaaaattagtattctgatttattgcattcttgataaagatgttttcaaattaattggagcttgatatgacataattaatttgcagttttctttgtaaatgtatttgtaatggcattctggtgatttgaagagctttcttactttccttctcagctctctctggcaattcagcagacgatctggcagccccagaactcacctgagggcaaggctagtcatgatacagaagtcttgagacagagcaattagacctgattgctctaatttccccactatgctagaagataaccccatcaattactgatggatgtatggagcagagcctagtgtgtgcatgaaagacttcattgttctggcccttgaaccattagttatctgtgaaagcctgagcctggccatcctttgtgcatatcctgggcttggctccattataaagctctcttaataagtgtagagaatggggattcaggcttaatgcttagttaaataaaaaataaaataatttttatgtaatatgtgcctatttcagattactcggttttcttttgagcagttcaagaatattttgaatgcactaattgaactttttagaagaaatttttttttcaagtaataaatacatatggttaaaaaaaagctaatagagcttatagtgaaattcactgtccctctccattcactgagacagttttacctctgattttaattcttcagggagttaccactgtatatctaaatagcatgtttgcaataatatatttattcatacactactttagtacctaaggatttagctcatgtacacaatttcctgcagataccacagtatctcatagtaccatagtggtattactgctcttatttctccactggtcacacttgctcttcctggttttgtcacccatgcatcatatcttttgaccccaacccattttgagatgagtaagacatggctgagattgtacctgtcctttcttcagtctttcctctgccgtttctaatacccatctttaatagttttatttttactttttgctttgtgagcgttgattatgtttacattctcatctgcagtctcaattttatctgtaggttgcttctaaaagttgaaaaccgtaactcactacagagacacttagtgggctgtgattacactttcttatctcggcttccaggaccaactcatctaatactcagaggaaaagttttctggtatttgtatgtatgtatacatgtatatgtgtgtgtgtatatatgtatatataaaaatataatttaaaaattgatttgggtgatttattttcccttgaggttcctgtttgttttttcttacattgtgggtccatatcatgtctcatgtctaaagtttttctaagctcttaatcatcctttctcttctgttagaatttcttttcctagtcataattctcaaaatgattgtagtggtaactagtgacaagtgcatgagagataaatatcacaagttcttgcatatttgaaaatgtctttaaattgcactggattgatagtgtggttagttaccatatgtttggtgaagattgttcctcccaagaattttgcttcactgtattctagcatccagtgctactgatgagaagttgaattttcatctgactctttttacttctttatggctgatgttttctttcattatcatctctttgtcctcaatgtttagaatttttttattatgtaccttttttccatttttcttgcttgacatttattaagctccttaatttgaagatttggatcttctatatatttttttggctctgacaaatcttttcatatttatttcttttaagatgaatttcctttttttgtgtgttatattttatctttccagaaattgtaagtcccttattaggcctcttgaatttattttctctgatttccttttgtatttctatatcttaaacctttttgcactattttctatgatattaaattttttgttcataagctaaattagcttcttcaatcttggtaggctaaataatttttaccatgatttataaacagaggaaaaatagaacagattctaaactttatttgatagatttagttataaatttgtgtctcttattatgactttcttacctatattttctaagtctgtgtttatattaataggaactagaaaagaatttttaatttattgaagggaaaatgtgattaaactaggttctttatcactgtgacaattttacatatttagagaataattgcaagagttctaataccatatttacatgtgtaacttctcacttctaaaatacttaaaaactaaagaaatgttagattttagaagacagtgggtttgtaactcttgtcttcctaacagttggtatggccatcagcctcagtaggccttgaacagaataaagaatcagcagatttaagatctctcaaagagctgtagatgtcatttttttctgtttttaagatttatacagtttacattctcttctctattttcattaaaggtttgtgaattttgggttgtggtaactgatagaggaagcattcatgtagacataattttgcaaaaatatgaaaaattgcataattttatataatctgtatggcaaaatatttttaagtggttctttgtatcattataaaatatattttgaaaactagtttttgtacaactttgattaatcacttttgatttattgaattttttagatggagtgaagctagtaaaccctctacaattcttgtcttatttgttaattccttccctatattattataatgaggactctaatttgtgatgttaagcagtttattgcaaatctcttgggtgtttggcgtgttttgtacgtttaagtatgttataacttgcttaaaagatagaatttcttgaagctgtgaatgttaagattgactgtgattttgggtgaatacttcattctatataataaaataaggtaatgtattaaagggcgccagtacctgtaacatataccttggttaataaacaggagccacataaccccattcactttgtattactctctattttacctgattcttctagacctctgcatttaaaataacgacagtgaccaccatgtgctggctgttcattacagtagtcttatttcttatataaattgctctgtttaggacgagtaagctcacagtgttggtagatttattacaacacagcagtaacaacttcatagtcataaaagacattgaatattgaagaggtttaattataatgatgtatataaatgtccttaaaaagaagtgttaatagaaataaccttgttagtgtaatcgtgcctttaacttgtgaattcctttgtcttcctgaagagtaagttaaaatatccatcttcttttggtgatggggagggtgagagaacagacacacatacaaatcttatggttaaaggtcaacttgcaatatgttttgaacgtatctttcctgttggctcttagatttctgtttgctatcttttatttttctctctcttatggcctgttttgaaatcttaactttattatcatttcccagaaaatagaaatatttataaactaatggtaggattatttgcaaacttcaaaccaatcctcattgcttgctttttgctattagatactccaggaaaagtagtaagtcacaatgcaaaaaattgtttgggaaaaatgcaaagagaaaaattgtgtaatagcagattcttttcagcctcctggtggcagttcatgtgtgtgtatgtatacatgtgtgtgttttttttccttgtcaggattaattcagtgggaagtaatgtgacagattttgccatatggatattgatggaccttttcattttacctggcttagtgataggtataaaaaataattctgaacataatatatggaccaccttatttcatatattttaacacctattattttactattatatgtaggttgaaaaatactgcttttattgtgtttttggtgcaagtatatgatttcttggttaaagctgatcattccatagaaacattttaaatgaaatggcccctcaagagaaagatcagctttgtcccttcacgggggtgtttaggcagcaaagacctagagtattatggaataatttgtcctaggtcaggctgctataactgtgtaaggacaaaagcagagtggaaggagatgggagcatctgggacccatttgtttcctcgagaggagacaatggatctttttaaggaaattgttggataaatcagtgtctcctccttctttccctctcttcctacagggtccctgtgttcatgatgaggactctggcctatcgctcattggaaaacctgcccttcaggctcttttatatcactgccatttttatgaacatttgaatcagatggtaaagcattgttacctaggacggtgtatgtttgatttgaatttttctgcttttgatagaaattcagaaagcaatgatttaaatggtaagtacgatatctttgtatttttatttttgtaatatgtaacttgtaaaaactgttaaaaatacatatatttgttttaaaaatttgaaaaatgaaagtatacagggaaaacattcatttccagttctaccacccagagagatgtattttcttcccgtcttctttctctgtatagcctttgtttgttttatgtaattatgttcatatcttgtgtacatttttgtatttccttctttcactaaatattctgcaagcatttttctatgttataaattcttcatggaaattatttttgacatcttattaatactttataagttatgcccatcagtacagttttatagtttctttctctgttaacgtctcaaacttttttggaactttcacttctaggcaatgtacagtttttttatccttcttgtgaatgagactttttcccactatattttctaattcattttgctcatgtatcaaaaagttatttattttagtatgttacttatttgtcacaatattttcctgaaacctttttattccttttgtttgtaggttcttgtagatttgctaagtataagatctgagcacataaaaataattatatcttgtaataaatagtaatttaataatataaatagcttttatttttaaattcatttttataataattttttagaatcttgccatagtttcaaacttacagaaaagcttcaggaatagtacaaaagaattctcaaatgttaacattttacagtatttacatcttgccacatgtgtgtgtatgtgtgtataaataaacggatatgtatgatctatatatactctttttgagccatttaagagtaagttgaagacatgaagttcctttatccccgaattattaagtgtgaatgtgtgattcacttttctgtttacttcttggaagaatcaagaaaatgagatttgatgaagttttgaacattttaaatatccctcttagaaaagtgactcacttaattgtttagatttctctggatcagttacttagagcatggcccttaaactaacagcattggcatcttctgtgaacttgttagaagtgaacactcagggcttccactctgacctggggtattggagcctctggggctggggctgaagcagctgctttagcaagctctcagtgattcttatgcacattaaaaaaaaactctccttagatttttttttttttaaatagtggtctatctcagaagccagatccatataagttttttcctttctttagttttgaattggtttcctgtaatgcgtacccttttaattaattgttacagttcctaggagggtgtccatgttaacaattttctcgttgttgcaggtttagatgactcattcaagttttggagggctccatctaggacaagtcaggatcgagatccaagttctctctccacctcagaaacaacggtacttgcaaagaatgcataagtcctttattttgaatctctgaaaaaatttgagtttgcctagtgggagagttaagaatacaaagtgtaaggttataacagctatgatttattcgaagtgctttctgcagaattttgctaaattattgtattcaagctgcacatcagtcatacattatagatacttatcttgcttttctgtgtgcgcaagccactctgaagtaaagtaactttgtgatcattagtgctataggtagcagaactggagtttgaaccagggtgtgtcttgctacggtatagctacactgaatatccctttagttgagaattttcaacctctctttcctaccttttttgatagtacgaaagtgtgaaaatatgtttttcgttagtattagaagagaacaaatcctacatgttaaaaatggttgattaccctgaaattgtgcttaagggcagggcaatatgaagaacattcaaatgattctagtgtggtgctgacagctttaaacacacttctaaatacttgcatcacatagaagtttatctggaatacctgaaatttatatatgcctgtttgcatgccttctttccttcccctttcattcatgcattagttgctttttttgcagaaaagtttgaaacactgagtatttataaggaatgattgatactaggtttcagttatttacaaacatacagaatcatttattctcaactgggaaatgttacttttaattttaaagtgtttttgaaataattagtgtattatacaacatatcaggaagggaaagatttgatacacctgtttccaggaacaaaaataatatgagaataataattatacagacattataatgtaaagattatgtttaatctatctcctagtttctcaaaagactgatactttttgctacagttttaagtctttttttccctagattcaagagaagtatttgtgtttagtgctacattggacctttgtatggaaaagtaagataattacccgagttccactagatgtcatgctttcctttccaaggtggagatagtgtgtacctttgtctcaacaagagcagtaatatgataaatgccaaactgaattgtcttaattggttatttagttcacagaaggacagcatgaaagtgtgcttaaaagtaaattttgtttgttagcctatttgtcaaaagggctatagactagccttgaaatctttgtacatatttcagtttttttgcttttagtaggtactcagtaaataataattgctctaattaactttgagttatcttagctattttgtggtgagcactgaagtcatatttatcctatacaagaaaacctaaatacaaaaagcaaaagcatatcaaccttttgaatttctctattttgtaataacatttaatcttacaggttagaatactagattttctgagaaaatttggaaatatgttattaattgtagtcattattaaagaaagaagcaccccaattaaagtgaaggtctttaacttgtttgtgtttgaatgtaacacagacttttagaaatatataccaatggaatcttttcagtttttttaaaagaattttgtaatatgtgtaaaatttatttcttattattttctctaaaggctagtgtattctgttagaatttttacagaatttactttttactttctttttcgggaggtttccaaacaacttttagaatgggtgacttttagttacaaaaatagtcttcgtaccctaattctactagttatattttctttaccatacccaagatgatgtgtatctttgtcccaacaggagaaaaatctggagagtgttttcattctgccagtgttactttaaaccaaagctgtcagtacttcgaccaaggcatactttcttatgtataaaaaaatgttgaagttacaaattgaggtataagttgagtggatgtaaatcttattaatcagcttatctgcttatttatatctttgttttgtttatctcagaattgagaaaaaatgcaatcctttattggttagttggctggtttttccattttatctttccaaggaaagcatcatcttttgatttgggtcatgtcatccagcatgctctcctgggttactatccattttgtgctgttaatgccaagttagggactttcatgctgttacctaatgtgtattagttccgttgtttggcaagcttcgtaaggattgttgggtcctgtatgtttgataaactgcagatagagtaagcagagtgtcattgttagctttggggcatcgcccttgtaaatgcttcctcaggagtggcctctatcgaactcaatattctcctcctctggggtaggaggatgcagccattaggtggtgtttttcttctcgaaatcacgtttatatccaagatggatagctgtttgtgcctcttacacacctgtgtgcagcaacagctttatgaccaaaatttggtctcttctgttgttcctgagcagaactatgtctgtatttttttaaatttatcaattgtcaaaataaaatatgtgggaaatataattcctttctttttgagcctttctttgtgaaatatgtgatctttcaaacttttttctggaacacagatttaaagaaaactgattttagtttttctaaacatttaaagagaatttttacacttcatagtcttaaaacaactgaaaagcattgttactattttgcaaaagaggaaattagggcatggagtgaggtcccactccatggagtgcatgcttgttcaagttcctagcatggtaactggtagaccattcttttgagtccagaagtatgtttgcttcctccttcactctaaggccagatgtgattgatcccataaaagatggtgtagtcaagggacagtgaggtttctttagagggaaagatgaaatgaaaagtggttttgtgtaggaagtggccactgaaatgggctttacaatattatccccttctcttttatatgcatacaaacatttgcaagggactgaaaagattcaaatattccttaggattcagtgaccacttaacaaatgacaaaagtctacttgagaacataaagcatacttagactttctaactaaatatgaagttgtgttgtactgaaggcattaacattcagaaaatgcaagaggttgtttggagtagaatgtgggacggaaagctaaagtttgatgacctgactaatcagataggagttagttaagaaagctgaatcagcttttggatttgaagaggtaagatataagagctataaagataaagatgtaaggatatttcagcagcatggaatggcatgaaacattacaactgatatgagagaaataacgtattgacactcatttgatggtagttaaaattgttttatagaaggaagagtagacagaggatagtttaagcagggatggatccaagaggctttctaaaagaaaaatagttttgacataggcatcactgataggacatacaaatacctccagcatggtgaccccaggaaaacttgaggaggtggtagtttgtgtgatgatggagagagaaagaaaatgttatactctgtttaaataaatttcagctacctgtggattatccagagtctaacaacctcttatatttagttaggaggaaaatacaagtgagacaagctcttggaaatttgtgctcttagattacacacaggatggcacaggaactgtgactgtgttgtggtgatgatctgtctctttaagtggtcctttggttagacatgcaagaatcgtctatcatcttctgctcattccttcagaggacttttctgagctttcttttttttacatatattgtacataatccatttgaattatgaatctattagttgaaataatttaaacttcttgttataatttggttagaattaatgattacaaattgagaagcatgccaaagctttcctgctcctgggcatatagagaaaggtattatttattaaaatgaacacatgaagcttagaatctcttagaaacccttcatatcttatatttttccatgttttcaaaatgtggctagacttgtactttatttttttcacactacaatccttattttctccctttgtacctttttaaaaacaattaaataaacttttttggcaccagtactgcttttgagggaagttgatggaactattacaagatcattttggcaaatacaatattcaagttctgaattaactttcaaaaaaagttaaagtgtctagtgaaatcacttgcttctgtaaggcagatacaaagaaaatcatttttgtacattgatgcatttttgcttatatgacagaaattgttttttacattccagttctacttggatatggcaaatgactctgctattttcagtgatttcaaagggactttcttaattttagctgcttattttacactgaagcataatttagaaaccttctttagttaccaaatctgcttacaaacacactgaagaacaatttttttcagtttttataagcaagatttgagtccattttatttttttattttcccctagttttgagctaaaatgacaaataaaattgtatatatttgagatatacagtgagattacttgacatatgtatatgtgatgaaatgattaccacagtcaaattagttaacacatctgtcacctaagagtcaaccttttttttttgtggtgagaacacttaagaactactctctttcaagtagactgtgcagtgttattaaccatattaaccatattcaccatgctacacattagaccatattaaccatattcaccatgctacacattagatccccagaacatactcatcttatctgaaagtttgcactctttgaccaaacatctccccttttccccagctcctatcccctagcaacatccattacactaatctgagtctgttttaggacagtacctttaagtagcatcagcctgctctaaaaagcttgtattgtcttttgtaatatctgtaaagtaataaggctagaaatatattcaaattcagatttttttgtcttaccgagggattataaattgaagatctcaggatatgtcatgtggcagatgtgaaagcgagggaaaagtctagattgtgattttgcacttagaccattctaatgaattgagcaagtgatagatacaagaattagactctcgctgttgtaagaggacaaccctagttatcctacttactgtgaggtacagagcagagcagcgagaagcttgacaggaacggatgacttcagcagactaagtttgctcttaaactaagccaattcctcctccttcacctgggatggggcagctgaagttagtctagctgaagttccgcggggacacagggggatcagggagaaagaagcaagcctctcctcgcaaacaaggccagccagctttctcaagaggtacgtctgaggacttcctctgattctaacgaatttatgctgtcatgaatgcagttctggactgagaatcctagtctcaactcagacaaatcccttaacttgtggtccttttctctaaatgaggacgtggactaggtcaggctttttgtacctatagcttcgtaggctcatactgcaccttccagtagctaatacttaatgccaaaattgtctagttattacttggattttaaggtgaaaagtaacatgtttacatatcgatgtactttatcaaatgtaaccaaatactatcgattggagattatatctaaacaagcaaagatttgagcatagaactgggacaatttgctttaatacttttttgcttttagttattaaaatagcaatatattagtttagcacacttaaaaaatagaggctagtagaaatataaatcatccataatcaattttaaagcaccatataaagcaatcattgtgtttccccaaccacatggggtaagttataatacaataaggtactttctaaaagcatcttttctaaacttgtgtatcccttctgtggactatactaaggaaaatcacatctttattaatgcctgacctttgtcatgaatcacaactttgctttcttctaatgagccaggtatttagtgggcccttataagctttcttttcccacaccgatcgttgaaaccgcaaaccaggtacctattctatttatatcagtaataaggccttcttgagtctttatcagttgaaagaatgttcagtgaaatgataaaggatttcagcatcattatccccttaacttttcttatacaaccaaaagagttgtggcaggagccagatatattagcttgtgcatagtttgtgatatcagtcttggcataggattattttcttcacagaactataaatgttgtcttgatatctgttgacaggaacattttttcacatatctctcattgccaaattgtaggcaaatatatttttaaaaataaacaagcttgctgggcgcggtggctcacgcctgtaatcccagcactttgggaggcagaggcgggcggatcacgaggtcaggagatcgagaccatcctggctaacacagtgaaaccctgcctctactaaaaatacaaaaaattagccgggcgtggtggcgggcgcctgtagtcccagctactcgggaggctgaggcaggagaatggcgtgaacccgggaggcggagcttgcagtgagccgagatcgtgccactgcactccagcctgggcaacagagtgagactccgtctcaaaaaaaaaaaaaataaacaagctttaggttatttttacttagtatctggatctaatactatataaaataaggcatttgatgtttgtttatgattgacttatttagactgaacttttttccagatttactttttagattatgtgcttagcctacattttttagctgcagctttctcacttatttcttggcatcatgactgttatacttacttaatgtggtgaaagatggttaagggctcaagttaaaagggggatttaaaaaactgtatattccatttttagtaatttcttcaaatttatattctctttactattagaaactgcaaatgaaaataaccttagtttttgctttcatttcatcatggtaattctaaggtactctaagtgttaagatatatacacaatcaatgtacaaatactgtgagctatataggatctgagtctggaatgatggtttataacttctatggatagctaatgttgtgttgcatgtactgatatggaggctacccaggtatgggcacttcatgttacttcacagaagagaaattgatggtaaggaaaagagttatctgacctcaccacataagtgtttttcaactaagaggtgcttagttgaacacctcttagcgcaaacacatcactttgcgctttttcagtcttagaaggtcggtctgctcattataaacctgtaggtgaaattgtacttgctttccacggattttgttatatttaatgttgtattctgaagcaatctcagcaaactggcacaattttttagtgttcttccttgataggaggtgaggtagagaaaaatcttttaatacttctaattttttaggcactattaaaatttatatgtgccatttggaacattaaaaatatctttattgtcaatcaagaaatgcaaaatatcacaataaattatagttaaggtggtatattttagcctttctaacatttgggcaatgagggaattggccttatgggaaccttaaactcctaaatgggcctgaagtcaatactgctcctttgagttactgatttatgtaaatgataacaattcctttaagaagtggaaatgccatttaaaaaaactgctgtaactcccaagatatggaatcttttctagttatcctaactagtataattttgtcttaaacctccttgtttaaggatatcttgtgtgtatgttgcctgtgtttcattttccgtactgtaacattaataagtaaaataatttactgattcataggtggcaccttcattggggagtactgaatttcagccacttgtgcagtcaacaacacttctacctgaagcctcccatgaccagtttgtggctcaaggtatccttttagtgaagacattctaccttcaaaaagaaaaatgacaagttggtccagacagatattttgaaagtaaatgtctaaagaacaaaattttaatgaaataagttgtagaccattatgaaatacatttagaaccaatatatcagaaattaataaaataaatgctcttaactaataaatggaatttggctcttaaataaatagtccaattcctgtgtggctccttattaggcgctcgtaggtatttgacatttgaatttgggaactgatgggtataacttaactttattttttcccttcttttgagaaaacactttgctacaagtaatccacttgaaagtaaagcgattctggttttaagtattttctaaggctatgcttccatttaaaggcacataaaatgtattgagtctttattttattagaaatgcacaatatacaacttgggacttatttttattaatggcaatatataaattttgctccttgtgctgggaactgcttccaaccctgctgtgcttcaaatttgcaactttgctttttttttttttttttaaattctagagagtatataagccttattcagtagcattaaatttttgacttgaaaggactatactatctaaaaagaaagtaattttaaacactggcatacatataagtatatgcagaaaaaatactttctgaaacatttagaaaaacttgctgaattaaaactttgaactttcattacaatatttgttccaataatttcctaaacagtgttccatattggtttttagtaattcatgttcactatatataaaattatttaactgtagaaaatactcatttgatcttcttaagaacaaaaggagcaaactcagattatttaaatggctcaggacatagggcatgaaatgaaattcgatcatgaatttcatgaacatttatctctaaaagcatgttgccttactctgatttttaacatctttattgagatataattcacataccatataattcacttgtttaaagtgtatactttattggttttaagtatattcagagttgtgcaaccgtcaccacgatcaattttaggatatttccatcatcttgcaaaaaaaccctatacccattagcagtcactccctgtctcccccattcttggcactctacggaatcactaatctactttccttctttatagatttgcccgttttggacattttgtatgaatggaatcatataacatggtcttgtgtgactggcttctttcacttagtgtgctgttttcaaggttcatccatgttctagcatgtatcagaacttcatttatttattgacaaataatattccactgtatgaatatattacagttacccattcatcacgtgatataggcatttgtgtggatatacaggctttctgttttttgtttggattacctttgattttaaatttattttattttcaagtattaacgctttttttttttttttttttttttggaggcagtctcactctgttgcccaggctggagtgcagtggcgcaatcttggctcagtgcagcctctgcctcctgggttcaggagattcttctgcctcagcctcctgagtagctgggattacagaggtgtgccggtacacctgcctaatttttgtatttttagtagagcttgggtttcatcatgttgcccaggctggtctctaacccctgacctcagatgatccacctgccttggcctcccaaagtgctgggattacagacatgagccaccatgcccgtccacaaatagtatgctttcaatgtatatttatgcaattttactctttgccaatcatttcagcacatatatatgaccaaaaaaaaaaaaaaaagcatataaaagaaagaatacccacagaaaggggaggcatgaacagaggatgaatcctcacaattttttggtgatatatgacactatcaggtatattccttttttttcaaaacttggaaataagagatcagggtgtcaaatgtcctccttagttttacaaaataaattagcaagaaaattgaaaaaatatgtatcaatttatattctgaactagctctctttacagaaaaattcaaaaaaggtttctatatatgcttgctctagaagtgctgaagatatgtaatacatattttatgaatactgaaagatttcccttgaaattgtttggacaattttcattagaattatctcaatttaattttttccatttttatttccaaagatttatcattattttttaagagacagggtctagctctgtcacccaggctggagtgcagtggcatggtcatagctcattgtagtctcgaacacctggactcaagtaatcctcctgtctcagtttcccaagtggctgggattacaggcgtaatatttgaggggaaaagaacacaaactctcatgtaaaaatgagcagaaaacatgaaaagataattcacaaaggacctaaaagtagcctttatctttggaaaaatattatacaaattaatactacccgaagatacttttttatttattaaattgccaacaattaagtattggcagtacattcttttggcgaggctgtggaaaataagcactttcatacattgttagagaaaatgcaaattagtataattttggaagggaatttggcaatagataacaaaactatgtatttacctttgattaaacaattccacttctaggaattctcttttatttatctccagcaatataaaaatacatatgtacttgataatttagcaagcattgtttgtaattataaaacatggaaacaacacaaatgcctgtaagtagaaggatagtttttgatagatatataacaatatatagataatgataaacatataacaaaattacttataaataaaatttatttttaaaataacaatggagaactacagctattagaaagagggggctgggcacagcagctcacaccaataatcctagaacttttggaggctgaggtgggagatacttttcacgatagtgagactgtatctctacaaaatataaaataaattagccaggcatggtggcacacacctgtggtctcagctactcaggaggctgaggtgggaggagcacttgagcccaggctttgaggcttcagtgagccatgattgcaccagactccagcctgggcaacagtgagaccatttctccaaaaacgaaaaaaaaaaaaaaaaaaagaggggaggatatcttcaaacagatatggaccaaattttaggaaatattgtcaagtgaagaaagaagcacaatgataaagagtatttatagtttatgatatttacagttttctacttttgcatatgaaagaaggggaaatttaaaatacgtgtatctatttgtgtagaaagaaaacaggaaggaacagctggaaatgaatgagattaattatgagaatgggtgggagttagttaggaaataagagaggatgggaacagtgtagaagagattgaggggtgggatagtgacccttctctgcatgtatcttcttgtataggttgacttttataaccatgtatgttttacttgctgaaaaaaataaaatcaacaaaaatgggaaacaataacatggaatacaaaccaattaatccagctacatttcacatgaatagcattgaagtgagagaggaagtaaccccagtaactctcagacatatttttaggactttagtcctcagactattggcaaaatgaactgtaaccaagcattgaactctagttactagttttattttttgcagtattattagttagaaattctgaaactacttattgtgttcataaggcaaggcaaataagtaaatatattgtagacaatgaaagccagaatttttactttcacataacggaaattacaaatatggaagggaaggaagatgtttaatgttggattatatttggagtgttggattatatttggagctttcagtatgaatcaattattttgttttttaagagatgaggtctcattctgtcatccaggctggaggacagtgctgtgatcatagttcactgcagttgccacctcctgggctcaagcgatcctcccacctcatcccgagtagccaggattaaaggaatgtgccgccatgcctggttcatttttaaatctttttgtagagataggtttctgtatgttgctcaggctgatcttgaactccttgcctaaagtgatcctcctaccccagcctcacaaaattctggaattacaggcaaattaatgatttttaattcgtagataaaatatgtttatgtgcccaggggtatgtatgtgcatgcatacgtatatacacacacgttttctagcttagaaacaatgacactctaaatagcaatgtatacatttagtgcccaaatcttgctttccaaactccattctccactttagggaatcgacactttggaacaaatatccaattttagagcttggacgaggaaagaacaagatgaacctggaacatcttgctgtgccagaaagtaagggaatgctcaaaggttaatggaggtgttcactaatgtagggtgcaggtaccttattactgttctaaagtctaaaagtattttggagaaaagggagctctcatacagtgttgttgggaaccactgtggagaacagtatgcaggttcctcaaaaactaaaaatagaacctaccctctgatccagcaatccagctgctgagtatatatctaaaagaaaaaaaaagtatatcgacgagatagctgcactcccatgttgattgcaacgccattcgtgatagccaagatagggaatcagtctaagttccgtcagcaaatgaatggataaagaaaatgaaccatatatgtacacaatgaaatattactcagagaaaagaatgaagtcctgtcatttgcagcaacatggatggaactggaggccattgtgttaaatgaaataagccaggcacagaaagacaaatattgcaactcatatttgggaactaaaaaaaaaaaaagttgaactcatgaaaatagagagtagaatgagggttaccagaggctaaagagtggagagccagagataaagaagggatggttagtgggtacaaaatacagttaggaggaataagatctagtgttcagtagcacaacagggtaactatagttaacaataatttattgtatagttcaaaataactaaaagaatggagttggaatgttcccaacacaaagaaatggtaaatgtttgaggtgatggatgtcccagttaccttgatttgagcattgcacatagtatgcctgtatcaaaatatcatgtgtaccccataaatatgtacaatgattatatatccataattaaaaatttaaaaataataaaaatagtaagattttactctgaagaaaacctaaagattatttgaatttggacacacctttggcccctcgagtttcagaaaaaggattgtaaatcatctttttgttctcagtgtctgaatacgtggggcatgaagtcatgttctgccctttctgacctgtctcttctgcatacgacaatgtccgtgtgtacacatctacacatctacatccacacatggtggaaggtggaggtcaggagtagtaggggtagcctgacccctaacctcaaggttaagatgagccaagaagctaaggcaattccccaactatacattatcattttcaggaactttcctatgattataagaacttttgagtattgtacatagctgtaaggtaaataataattcttatgtttattttcaataataggtcaccaggaaagtacatcaccacggccacctcatgattcatctctttctgctcccctgcccaaactgtgtgtttttgttactccatctcttctttcagcaatgtgcagcctcttggacaacctcttgacgattgctcccagagacactgcaaaggcttttcgacaagctcatctcatagaacttctctgtaggtaagagataaatactcctagagaggcatgttagttgagataaatttacacaaactgtattcatgacttgatacaagatttcttgtgacctggaaatacagctttattcttttttaggctcattgaactctaggattttgcttttgccagaattgtcttggtggtttttattttacatctattaaagcacttgtattagtttgttatcttgactattaaggccaaagaaaaactcctgctttctaaaattcatggattctaaaccttatttatcctccagcacacttaaggaatatggtgctatcccctgttcttaatggatgtgagggactttgggaattcatctttttagtggtcatatcagaataatgtccctgggttgaaaaattattggttaaattcatttggagttattttgttaagggaaattaaacttttcatcaaaaagtattctgataaaatttagggaaattaaattcaaagaaaaattatttgaatttttattacttatttgatattaatcagtctgtaacataatttttctgaatttctaggaaggtatagtagaaaaggactagatattgaattcaggttgacctaaggtctaattatagttcattcactcagtagcttgcagccttgggaaattactccctactgtgtcattaacacctatttaatggggttagtgtgagaattaaaagtgatggtatctaggatacccccttaagtattacttctcttttcttctggtgttcagtttattctagccaaccatacccacctccttttgaccacatgtttatttgcatttctctgtctctctgtccctttacctttgaacatacaccatctgaaatgtcttgcatcttcttgccaaatcatagtgtcttctctttctttctgggatattaagaaaactctagaaaatataaactctaaaagaagtattccttgtttcacctcattcaattgtaattattcctttaacatgtatgatacgcaatggagtatgagtttgttctggctttaatatttattgatcatttttttactgtacctactcggattggaaaagtaactgctagtcagttggctttccttcctggatgctcctgcctgaagatgaccaaaatagagctctagggataggatcttctttgcttcttacgagtcagctaagagtctgatgtggcattgaggccacaggggcattaaaagaccttttatggcaaaggcttatcatatttccgtacctgtttttcatttttgactttaaaaaaatcctacttgttttactttatttttatttttttatttttatttattttgagacggagtttcactcttattgcccaggctggaatgcagtggcgcgatctcggctcactgcaacctccgcctcctgggttcaagcgattctcctgtctcaacctcctgagtagctgggattacaggcatctgccactacacccagctaatttttggtacctttagtagagacggggtttcaccatgttcaccaggctggtcttgaactcctgaccccaggtgatccacccaccttggcctcccaaagtgctgggattacaggcgtgagccaccgcacccggcctgttttactttattttgttttttactttctaaatatgaacagtgttcttgctattttagccagtatttttgctattttattaggaaaataaccaccaagtttcctgttactcatgggctgtattatattttattctgcttttaattaggtttccttagatattttcttcacagctctttgcttctcacttttctctgacaagatattttcctgtttgaaggtaacccaggatacaatttgaaattctttgagatatctttttataaacattttctttgcttataaagatcctttctcttgaattgtattcgagttacctttaaacttcaaattctgatttcttaatctttaataaaaagtatactaatcttctgaaggattttctttttctgatcgtcacagcattgcagatgctaccctcatacagacatgtgtccaggaactcagagccctgctgccttcatcacctccagctgaacacactcaggctcaggtaagcatctcaagtctgtttgtgggtttgtttacgttaggtgtcaaaaataaaaatcttgctgaggagatactagtcataggaaaaggatgaaaacctctcaaaatatacatggtatgatgagattattcgaaatacgttacttgaaattttaatatgggacatgtctggatgttagaaaagagaggtggggtttgaagacctagattctattcttgactccatcattaaccagctttaaatgtatgatcaagtgtctggatatcttggagcaccactttaataataaagagggacattggtatagttcacttcctgcttctgtgattttaggctatctctgttatttacaccaaagttaaagttgttaaaatatttggtggctaagttatgtgtattttcaaaacccaatttgataaaaatgatttattcttgttccttcacagatatttagttttaaattcttgcctatagctagaatctatttataaaacatgcttaacaattattcatgtagctgttgctaacagaaattttatttcaaaatcaaattttaagaagggctacaagatttatttaggaggtgatgaattaaaggtgaagtagaccaatatctcttgctttgagatgtgttctttgagctgaataagacagaccccattacaaagtttgggaatgctacacgcatggtctttgaagctgttgtcctggtgcagtgttttcacctgagcatgcctattgcataatgactgtctcctccatttttctgctctccatccagcaaatctttgttgagtacttgctgtgtgcctgaatcttctccaagtgaataaaacaaagacccttccctcaagttgggagaatagataattagaaaatccatatatgcctgaagatgatagacatctcagaagaaaaactaaagcaggggacaggaagtgatgtcagagttggaagggtagggctattccacttaggatgattaggcagtgtcgtgggacccaaagttagtgaagaagctagtcctatggtcattgcaagacccctgaggttggggtatgcttggcctatccaagaaacagcaaggagggtggagtcgctggagcagaatctatgagggcaagatgaggccagaggggcacagtcagctccatgaagtcaggaccttgctggctgttatgttccattgtgttctgagtgtctggcatagggcttgtctcatgacaggtgctcacttgatacttgtgggatgaatgaataatagcagtagcaaacatttatgggcatttgtttttgttaattcatgtaatcttcacaagaatcatgaagttatcattaatgtcattttataaaggaaatgcctgaggcccagagagatgagtgacttgtccaaggtctctgacatagattccaacctatgcaggtcagttccagggcccacattcttaaccactgcaccagctggccttatgtagattaaatgcttctgggctcttggtatttatataagatcattcactcatttcagaaaattcttgagcctctgctttaccagattctgttctaggtgctagtgatatatccttgaacaaagcagatgagcatctctcctcacgtagagtctgtgccataaatgcaggagacagacagtgaacaagtaaataaaatgcattgtatcagatagtcacaaatggtatggaaaaaagcaattgaggatgggtaaaagggtgtgtcagaaaggggaggggcctcctgaaggtgacacttaagcagaaagctggggaggtgagggagcaggctgcgagtgcctgcggcagatggggtggccagagccctgctggtggggtgatactctgctaaaggtatgatggattaaagtctgtggtcagttggttggtatttttttttaagagggccatacatagaaaaagagttactttatcaactactcttaagatatgaatattttatttaatcttgaatgtgatcatatacaaaagaatctttagcaattcagcgttttctctataacacttcttcttgcctcacctggcatggtttatctatttatggtaatatttcatacatccagaggtcagacttgctataatttcagtagtgtagagtatgaatgtaatatgaagtctcaagacttcacggcagtaaacaaattaaatttcacaaactgaagagtttgtgaagcctggagccacctacacttttatataaagtaagttggcagattagataaagggaggacgtattcatcaggagaagtagggcagaactatttgtaaatagtctgagaccattgacctcagagacacatactccacaaatttacaacaggctctcgactcttcattacactcttacaaccccagaataaggtgagaggaaaaaaagtgtgtgtgtgtgtgtgtatgtgtgtgtgtgtacagagagagagaatgactgatttcagaatatctttataaaattcacttatatgtaactggctcattgcttgagggtagtggacaaatgagacatcacagctcattctttaattgttacatattcagaggattatttttctgaaaagtacttttgccagttaatacttaacaatattagcatcaggcaaattccagagatggttttgttggtaatattgaagatgatttaattttttcttttataattaataatagtaattttatgctgagggcaaaaatagaacatatttgcattttatttgtagcaataactaggctagcttccccccacccctgcttatgcactttgaagggtgtttttgtaatctttctttctttacaaaattatagactttatggctttgttatacacttttccacttcttccataatattgatttcataatttgactacttgaaaaatatgggacttttttttttcttttgaaacagggttttactctgtcacccaggctggagttcagtggtgtgatcacagctcactatagcctctaccttctgggcttaagtggtcctcccatctcagcctcccaagtagctgggactgcaggcccggctaatttttatattttttgtggaaacaggatctcaccgtattgcccaggctggtctcaaactcctgggctcaagccatctgcccaccttggcctctcaaaggactggcattacaggtgtgttagctaccacacctggccaagactttacttctttaaatggaattcaaaacttgactttgaaaacattgctttgtttggtgtatagttgacagtattaatatggctgttaatgacatgcttatgagaaaaataatgctttgtctgctatgtgttaatttcagatcttgaaaaattatggttaatattttattttttattgtgttacaaaagtaaaatgctgtatcactgagatgggctttttatatggcatgtttgatttgaccctgtctccttttcaaacaggtttcctttctcctggaatacctatcctctttgtccaggcttctgcagtcatgtttattggtggagcctgaccttgtgattcaggatgagcttgtgaaacctcttatcaccaatatcattggaattctcaccatatgtaccaaagatgtattaggtaagcttaattgttttagtttagaatgtaagtgaataatactgaggaaaaaaaacttactctgtttcagatattcacttgaaggttactttttgagtttctttttgctagtattttggaaggctttgataatgtgttttatagtttggatgccttttaatggtaccaattaagacaagtgtgtagtataataaaggactacccttgagttttcagtttaaatgagggcaaagctctctgtgtgatgttagaaagtacagtgagttctgggtattaactattcttataaactatggctaaggccaaaagcttaataaaacattcccaataacaagtataagccaatctagaatatatcacaaatttcctaaggtcctaaattattgaaatgtatatatattttgtgatctaatgttatctccaggggaaaatattctatgatgaaaagttgaatgtaatgcttagtggagaaaattaaagcaaagtaggatctttgtcaaaatctaatataattgttttgaaaatgaaaacaatcatttataatgaagtaattgaccatttggtaattctctttgcctttcagttttatttgaactatggatttacttggttttaggtctggaaaatgaagtgtgttatgatacccagcaaagccagttctcagcatctcatcagtgttaaaatgatctcgatgttaaaggaatagtaattccttagaaattcaacaagtggcagtgataccctaactaagcttattaggttagactggacaagctcaacaaggtgatatcacccccagtctctaaggagtgaacattgattctggggagaagagggtgaggcaaaaacatcttagaaattaaaatagtttgtaggcttccaaagctcaactctacctgagacaatcttattactatttctcttcctggtttttcttgagaattccttgagaagcattgacgttgagttcatggaagatacacaagatgtatgcaagactagtgccacaaaactgtggtgaatagatgacagcagctggaggacctttggttgattgtttgatcccaaggtcatatagcaaaaggtggtctgtgtatcttggctgctattggctgccttgtgaatgctttttattgatcctcttgcttttctgtatgatttgagctttgaaaattaattgaaagtagtatatatttaattacataaaagttgtttaacccatcattaattatatcaagcgctgaaaggaaaaaatgtcaatatctgaatgtatatctattagctggttaaattaaaaattgttttctcatatctagcaaaaagttttaaaagttcactaagaatatttttaaagaagtttttaaaatttttttctgaaaaaaataagttttaaatgattttataagaatttattatattgctgttgtttttatatgaattgctaatttatgtatgtaaattgacacattgtgatgatatatatatataagtaaataaattacatgaaaagttattcagcaagtataggtgcaaagctaaatttggtattaataggtctttaatttttaatttaattttcagcttaaatgttttattcggctcttcttaagcctgtattgaataaaaacagtaagctctatacttagcctttttatgtacaaagtacagatatacatatagtacataaagagatatacagtatatgtgtggaattaaaatcttgtggggatggcaatgaggaaacattttctgaaataaactctttagagagccactaatgacaaaagggttgagaaacaccaaggattgccctggggaaggtgcagttttcaagtatctcataggtgctgaagtacacctagatggatctcctcggggttaacgtcctataaagtttacattatagtggaattagataaaagatgacagatccccctgaaggcatggtcagagagagtcctcagcgactgctctccagcttccatttacctgagtggagagaagggaaaatgggtcctcatcctagaattgctacatccttagccataggaaaagctgcagaatcttcttttgcgtcatacttttctttgtgggatgatacttttcttggttcttcaaagaaattctttcttttctaccttgaccttggcacactgtgctttcctttcacccctgcccaaagctgctggaggggataaaggaaataggggaaaacttactctgacaaaagtagcacaaacaatgacatatttttataatgtgccaatatgtagttctgcagtcatggcttaatatttagtttgtcacaccttctgattgttcttgagtatgctttaataagaggagagtttgtgagtgtggctttatatgcaggagggtggaggggagatatcttaagaagcaatggaaaagaagttaattgaaataaattttggataatgctgaattagatttgtcttcatttgataagtgcacacccctcattttaagtgtaatgaagcgtctgtggtaagttttatatcttgaaaggttcttttccttctttgtgttaataacttgaagtgttttgattaattttatagataaagagttaatatcagctttttatcacacatggacacatttatttaatcttctggccatgctcctgaggaaagctggtgccatcacactcccgtttgttaccgtggccctggccaagcactggacagcggcgattggtaagaagatacttgcataatcttgggggctttctgctaataaaacgagataatgattctgcctgtttaggtatgtaaattcactaaagttaagtaattatagcatggcatataaaagaggtatcagggtgcttgctttgaaaaatttgcagtgttcttgagccccccaaaaatgcatttttgaaaaattgaaacacattttgagataacataaaagcgagttaggaaagcctgtggttttattattttttaagctttttaaagatgtcatccctgaagctctgttttattgagaacattatattggccactgttggtttttttaaattttactttaagttctgggatacatgtgcagaacgtgcaggttttttacataggaatacatgtgccatggtggtttgctgcacctatcaaccgatcatctaggttttaagccccacatgcattaggtatttgtcctaatgctctccctccccttgcttctcatcccccgacacggtgtgtgatgttccctaccctgtgtccatgtgttctcattgttcatctctcacttgtgaatgagaacacacagtgtttggttttctgttcctgtgttagtttgctgagaatgatggcttccagcttcatccgtgtacctgaaaggacatgaactcattctttttttatggctgcataatgttccatggtgtatatgtgctgcattttctttatccactgtgtcattgatgggcattgggttggttccaagtctttgctattgtgaacagtgccacagtaaacatatgtgtgcatttgtctttacagtaggatgatttataaaactttaggtatatacccagtaatgggattgttgggtcaaatggtatttctggttctagatgcttgaggaattgccacactgtcttccacaatggttaaactaacttatactcccaccagcagtgtaaaagtgttcccattttctccacatcctcgccagcatctgttgtttcctgacttttgaataatcaccattctaactggcctgagatggtatctcattgtggttttgatttgcatttctctaatgaccagtgatgatgggttttttttcatgtttgtcggccgcataaatgtcatcttttgagaagtgtctgttcgtatccttcgcccactttttgatgcggttgtttgtttttttcttgtaaatttgtttaagttccttgtagattctggatgttagacctttgtcagatggatagattacaaaaattttctcccattgtgtaggttgcctgttcactctgatgatagtttgttttgctatgcagacgctctttagtttagatcccatttgtcagttgtaagcctgtggttttataaaggtacatatgatatgattataaaacaatgagataaattttactgtgttggtatagaaaccagtatcctttctgacatatgtacattgtatgtggatacatcttcatatataaaatctggtatacatgataacatggaaagttaggatacaaataactttctcatcacatcagaattttcttatagtacagaaatgccaagagtatagtataattatttttatgtttttcatgatagttgcccactaaaataaacatgattattttaaaataactaatctttaatttttcatgaagcctcctaaattttagcatagaaaaaagctgttttttaacataaatattcataactgacatttatgtaacctttttaaacaacctacttaaatgtactcaaaattgagttattttaagcttccaaagtacctgctaattcaactgaccgattttttttaacatttattttatcatttgatcattcagtaaacttaaatgcatgatacaatttttaaccaaagcgatagtaagaattatggcaaatgcatgtttaacaaggaacagaattgttaattttctggatgtaggagttctgagtctaccatggagtacagtgtccacgtaggatatcattattttgtttaaaatataataattgaaagagattgactgattaagacattgggattttcttcttgtatttattgggggaaaattagtttatcacctgaatcaccaataatatcaatagaaagcatgatgctacccacattagataaatctggcctgcagcttgttttggtaaataaagttttattggaacatagccacactcacttacatattgcatatggctgctttcatgctacaaaagttgaggtgaatagttgtgaaaaagccagttacctgcagagtataaaatacttactacttggacctttacagaaaaagtttgctgacctctgacttaaacttatttatctaacactatttctttagtgataaaataaatacatattaaattcaaaaccttccttcaaaatatgtgtacagttttatgtaataatagtactaatcaaaagtaacttactgcataaatggttttcataatagtaatgttaatgaaaacattaataacaattatcattttttttgccatggttttatttttgtttatttttatttttttaaatcaattgccatctcatatgcccatatacatttaaaacatgtcgtggtcactccgtaacttgtgttatctataagagtcttttctcgaacttgactaatatttggacatcatttaaatgaacataattctcatgaaaccctactgctgactactttatttttcttatgtaactttaatttgtacaagccaaaatctaagtaaaaatttttatggttataattatcacacaagcataaatctaaaatataaaatcaaacaaaattataaatccaatttttcaagtttataaaatgtaaaacaacacatgtaattttgattaaacaaaatcagttctcacaacaggaaattaataatgactgtttcagtgtaaattcctttcagtttggtctgttctttccactctgtattaagtttgtgaatcagttcatgaccactcatgtgctgtctgaactgctatgaaatatttgtttgtacattgtgccaacactgcatactaagtcttgcttttaagttctggttggcaccagctcctttaacagttgcaacacaatcacacaagttggtaatctagatgatccagagtatagttactttaaaatcaacttgatttcctttttgttgaattttgaagaaattttcaaacattcacatctgaaattattcctttagatatgttctgcacatgtgcaggcttgtctgccacgtgtcctgccctgtatactgccagcttgcaattcctttctgttctcttgaccgaagaagcaaaagggcatctccaggctaagagcaaaacacatttatgctgtagtccaacagtggcttcacttcttgatgactctcaggaaaatcagaaatctctagaacaacttagtgatgtaatccttcaggtacgtcatttcttggtttttcaaaaactttatttagcgtttaaataaattgactttcagtcatggtcttgttaaaaactgtctcagtcatttaaattaagaaatagtaatgcttattatgactgtttaaatgatacaaaagtttataaagttaaattaactatctcctccttagccccacccgcttatgttgaccagtttcttcagtgaatatgatgtaaagatttgaagtgaaatattactaatctaaatctaacagttgatcaaaacagtgtttcatatcatgaccaaaatggatatatttcagaaatgcagttatggttcaaaatttattgtaattttaaagatatatctacgtctctgaaaatatattctaagtgacatttgatttctagaaatggaccacagatttttggggttggttacatgtataggtaagtggacttgtctggcacatttggaagaaaatgccccctttccaagccctgttgcctgttttatcttataaaattatgtttacagtctaaaatgtgaatcaagaattttgttaatcagaaaacattctaaaatcactaaagtattattttataagtagatgagtaattttttaaaaactgtgtgtttactaagttaaagttgtacattgttttttacaaataggaatatttttagatttttcagtatttagaattattctttttaatcatgtggttttatgatttttgtcttctcactgaaaggcagaaaagtagtagaattgttgattgaagaatttgcttcagcttcccaatcagccagccacgtttggcaaagatagaagattgtctgtgtgctggtttgttataattcctttgttgcttagaagattgttcctgtgctgatttgttatagtccctttgttgcttagaatttggagatttttacccacttctttgcctgtgagagtcatgatcatgcagatatttctggtatgactgcttgtgcattttgggcacaaggcttgatgatgttgagatgcagaaaggattgccagtaagaagaaaatgcttcctggttcacccaggagctgtcctgtggagagtgtcacagggtcctcaggggactttgtctcccttgtgctacaaaatctggttacctttccagcatagataagaagcctgttaaggcatcccccattttctcatccatctccagcagcgccttcagaagcctggatagagctctaggggagaagcgttcctcaaagcatttctctaaaagcctcttattcttgggaggccatagctttcctgtacctactacctcactgtcagttcactcaaattttcttagttgaaaacaaaaactggacgttgtcccagttttctcattccccatcagaacaacagactttatttcccaatgattaactgagtctccagttttgcactttaaagaatgttgtaaggaggaaaattcaaaccttttcaaaagtctcccaaccacaacccctatgtaatttaattataaatttcccaactttggctttggttggagcacggtactgcttggggaaaggcttttgctcttgctgacacacttggctcgtcagagaatttcagtgacttcactcagaggactgagtgcagtgagggcagtgtgctgggccctgccctccctgctgaggccaaaatggcaataggtgtgggagcctggctctgcatggatgactgtgggtgtcctgcaaccaatcctcctggacctgggaaatttaaagacttccagccaggcaaagccagggctattttatttcccaactctttaatgttgtttgtggtgctgtgtttgaagggtctctgatgagactcatgatgcatatggatccatgtagggtaatgaatcagtttataatagtatacgcaggaaaaaaaaaatctgtgctagaggaatttgtgaaatttaccttgcccttatttttacctaatactttgtaatattattcattataaaagcttttgtttataatttttttgttacctttttggacaaagaaaatgagatagcctacagtcacagaatatctcaatgattttcctaatgactagctaattttcctctttatttctctaaattacaaatcacgtattttgtgagggtatggatacattaaccaattatttaaaccatgtttcctaataaatcatactctttgtgttcgtgtaagcagtagaatttggatacatgacatctgttagaaaggcacaggcaagtttaagacaaagaaagtgaagagaggaagtatactcctggcacactcatgacaaaatgtgtacctaatgtaagttgggacagttaatgggcctattaaattacaaacactgttttctttgccttatagaaataggatatgtgaattaaaatattattagaatacattcaacagcaacacgttttgataagtaataaatgtagcttactatatgtccatggaggctgtggtttgggccaggtgctgtatgaagcaaagtaaattacagtctttaaattatctgaagaaattatattctaaaattgatgtctttcaaaggtctaagttttctgtaaaatcatactcaaaaaacatttgatatgggaccttaggcaaatcacttaacttcttgggattcagttcttcaagtgcaaaatgataggcttttattacattattactaagtttcagctgcctctaaaatctccatcctcctaacaaatcactgtattggaacttcagttaaatgtctggtcagagttatcttttaaatggtgctttatagcagtatcccataggggatacatgttgaaagtattcatacttacatcttaagtcatgtgtaagtgtttttttctaagtccattttgaggtggtttcagactttgagcattttctaagaaatattcagctgtcttttgtccataaaatactgaacacatttgacttagcagagattttaccttccctagtttatgaagatacagtagtctcctcttatctgtagttttgccttttatagcttcagttactcatggttgactgtagtccagaaatattaaatggaaaattccagaaatacacaatacttaacgtcttaaattgcatgccattctgagtagtatgatgaaatatgctctgtctcccctcaggacgtgaatcatgctatgtctagcttacccatgctgcatatgatacgtgcccattcatcacttagtatagcaatcttggttatcagactgatgaatcacaagacgaagaaggatgagtgcattgtagtaagatattttagagagagagacagagaggccacaatcacataatttttattatactattctgttattattattgttagtctcctacctgcctaatttataattaaactttattgtagttacatatttataggaataaaacttagaatatatggagttgggtactattcatggttttaggtatccactgggggtgttggaatggatccctcaaggataaaggggcctactgtgctcaatatgttttatttgcaaatacatatagataacaagatcaataaaaatctctctatatgtagtagattttgtctataattgatatattaatcagttgagataatgaattaattttgctccttatatttgatctgatatctaaaagtagtaatgcaaatgaggaactcttgtgccttattttagatgtattttgtgctcacatttagtgaatggtaaaattcaagggtaaatctgttgaaaggaaggcttatatatttaagatcccattgtgttgatgaatgttcactgtaattaaaaagcctattttttacattaagtaccttttggaaagaaagcaagaaagtcttgacctagaataccctacatcacttaaatgtacagaagggattaatctagaaagagcatgacatttaaatgaattttggttgatgaaaagacattatgtcttgctctgtatatcgtcttgatttctttttctctttttgtgtatttgctagttatctgttgcttgagtttattctcagccttgctgcctccaggctcctcacacttccagtcgtgtccacttgctctttgcagtgatgctcagactgcttttcagtctgcagtaagtactgtatggaaactgatagaaagtcagttcttcactccagcctttccttcagtatatgttggaaagtatatgaatttaccatagattaattctgtttgtttcctttttgtctgtttggttttggtttggggctttgatttcagttttaccatgtacacattttagagaaccaaacagttgtatctgtaagtttttactaaaagtaggagatttctgccttcattcctcatattctcagaggtgaccacttatacctcatttagctactttttatagcttctctttcatgtctctaaataacatgcttatatttttttgtcttgattattcagttttaaatattatctgttgaattcctactatggaaaatgagactttagcttttttttcatgcctcacccacctaccctgccaaaatgggttcccttctcattctcctaatattgatataccataatgccaattagagaataggcagcgtgaatggtattaaatttatgacagtgttatacacagttgaaccgtgttgcagagtgtttaactttcttttcttgcacagcttttgtttgccttagaggtaattattgtattattttaaaacgtgctgactttcctgttatcacttacaagctccatgctctttgccagaattaaacatcctctcagtgtgttcagaattgtcagaacttcatcgcttcatcttttggaagaaatctcttcccaattccttctaacctacttggtgcctgttttcatcctgggatatccattcaccagtttctgggaattcctttacctctgtgctaggtgcagtttcctgtcatcctgggatatccattcacctggttccaggaattcctttacctctgtgctatgtgcagtctcctgcatcctgcatgctgtctcccatctcctgtggccttctctcctggttaatgctcttcatttttgcgtagcgtctcttctcccttagctttcagagaaaaggtactgaggaggtcttttgagatctaaatgactgaaagtcttttatcgcccttacatataatttatagttaggctagtgagaattctggattggaaatcatttacttcagaatttagaagccatagtctgttctttttaattccaaatgttactatagagaattctgaagccttggctgggcgcggtgctcatgcctgtaatcccagcacgttgggaggctgaggcgggcggatcacgaggtcaggagatcgacaccatcctggctaacacagtgaaaccccatctctactaaaaacacaaaaaaattagccagacatggcggcgggcacctgtagtcccagctactcgggaggctgaggcaggagaatggtgtgaacccgggacggggagcttgcagtgagcagagatcacgccactgcactctatcctgggcgacagagcgagactccgtctcaaaaaaaaaaaaaaaaaaaaaaaaaaagaaaattccaaagcccttagaattcctggtttttctcttcctggaagtttttagaatctttattttttctcgtattctaaaatgtttagatgaagcatccaggtgtggatctgttttagccattgtactgggctctcttggggattctttccatctataaactcatgctttctaaattacttcagagacattccctgtactttgtatgctctgtacatttggaactcctgtgaagtttttttttttcgctatgtaatctctctttgctgtcttttcctctatttattttagtctctcttttctatttggcagcttttcttggtgtctggtaatcttgattatgtgctgtatttaagactgggaaactcaaagcagattgacatccctgagcatatgagtgcaacttgtcaattgctgtccaaggggaccaatgggggttattttgtaggcttgtcttctggggcttatcagattccctggagaatggtcttctgatctctttcctggaggtgaaaacccaactgccaaatgttatgtagccaagtaggagacgacagctgaggtctcagaatttagtttgcacaatttcacttaatccttcaaaggttttagtagaatacccttgcccacaaattttcctgtctctgccagttcagaatcctaatttatcctctccagagactaagcatccgggattttgcaagggctgggaggaagagtggcttagttacatagaaactggtggctggcgggcaggatctgggcatgtaactgcattttagagacttgaagcaatccttcatcctcacgtccagggatgcctggtgctaaatttcttcagccttgggcacttcagtggatagattggggtagttttcagctttccccactcaccacttagaattcaagtttcccaagcctaatacacttgcctctcatccatctgctttctcgttttcaggcttgtgtgtgtgtgtgtgtgtgtgcaatcccatttttgtcattttaatgggatttcaggagggaataaaagacatatctgtgcacacaactatttccttaggagtcttaactccgacccaaccctgctcccaattgctagtgagcaattttttatttttattttattttttatttttatttatttatttatttttgagacagagtctcactctgtcacccaggctggagtgcagcgtggcccgatctcagctcactgcaacctctgcctcccaagttcaagtgattctcctgcctcaagcctcccaagaagctgggattacaggcgcttgccaccgtgcccagctaatttttatatttttcgcatgtttgttggccaaactggtctcgaactcctgacctcaggtgttccgtccaccttggcctcccgaagggctgggattacaaggcgtgagccaccacacctggccccattatcatttgtttcaagaaatttttcaattttcttcttaattttttcattaacccactggacattcaggagcatattgtttaattttcatatgtttgtatagtttccaaaattcctcttgttattgatttccagttttattctactctggtcatagaagatgcttgatattatttcaatttcttgaatgttttaagacttgttttgtgaacctaacatatggaatatcctacagaatgatccatatgctgaggagaagaatgtgtattctgcagccattagatgaaatgttcggtaaatatctattaggtccgtttggtctttagtgcagattaaatccagtgtttctttggtgattttctttctggaagatctgtctgttcaatgctgaaagtagggtgttgaagtctccagccattatcgtcttgagatctcgctctctctttagttctaatatttgctttatgtatctcagtgctccagtgatgggtacatatatactcacaatcattgtatcctcttgctgcattgactgcattatcattatataatgatcttctttgtctgtccttacagtttttgttttgacatctattttgtctaagtatagctactcccaattttttttttgttttcattggcatggaatgtctttttccatccctttattttcagtctgtatatatttttattggtgaaatatgtttcttgtaggcaacagataagtgggcattgttttttcatcccttcagccactgtgtgtgtttttattgtagagtttagtccatagtccatttacattgaatgttgttattgacaagtagggactgccttctgccgttttgttatttgttttctaattgttttgtgatctcattctttaattccttctgtctttcttttagtgaagatgattttctttggtggtatgttaatttcttcttagtttttgtgtctccatttgtatcctttttggtaaaaggttaccatgatgaggcttgcaaataccttcttatagcccattattttaaactaatgacagcttagtactgatggcatgaacaagcacacatgcaaaagaaaactaataaaaactctacactttaactttatctcccctgctttttaacttttagttgtttctctttatgtcttattgtactgtctttgtcttaaaaagttgctgtagttattattttcgattggttcataatttagactctctacttaagataagagtagtttacacaacaccattacagtgttacaatagtctctgtttttctgcgtgcttactattaccagtgagttttgtaacatcagatgatttcttcttgctcacgaacatccttttatttcagattgaagaactcactttactatttcttgtaggacaggtctagtgttgttgaaatccttcagcttttgtttgtctaaggtttttatttctcttcatacttgaaggatagtttcatcgtatgtactattctagggtaaagtttttttgttgtttttctttttttttttccctgcagcacttgaaatatgtcatgccactctctcgtgacctgtaacatttccagatatattggaggtccattgtatgttgtttcttttctcttgctgcttttaggatcttttctttatccttgacctttaggagtttgattatgaaatatcttaaatgtcttctttgggttaaatctgcttggtggtctctaaccttcttgtacttgaatattgatctttctctaagttttgtaagttctctgatattatccctttgaataaactttctaccactatctctttgtcttaaatttgccctttcgaggctattttttaggttttataggcatgcttcattcttctttattctcatttttcttttatctccttcccctgactctgtgttttcaaatagcttgccttcaagtttactaattctttcttttacttggtcagctctactaatatgagactgatgtatttgtcagtatgccaattgaatttttaaactccagaatttctgtttcattcttcttaattatttaaatctctctgttaaatttatctgataaaattctgaattccttctcttattttgaatttcttttgagctcccctaccacagcaattttgaattctctgtttgaaagttcacatatctcttgtttctccacgcttggtctctgatgccttattttagttcatttggtggggtcattttttcctggatgatcttgatgcttttagatgttcgtcaatatctggacattgaagagttaggtatttgttttagtctttgcagtctgggcttgtttgtgtgtgtcctccttgaggaggcttcccaggcattccaagggaattggaccttaagcccaataacacttcgtttcttgcagacttgtagaggtactgccttggtggtcttggataagatctggaagaattctccagattaccaggcaaagactcttgttcttttaccttactttctcccaaacaaacagagtctctctctatatactgagcagcctggaactggggatgtggtgatattagcatccctgtggctaccaccactggaactgcactggattagtcctgatgtcaacacaacactgggtttctctcaagcccactgcagtcgctacctgcttacctgtgttcactcaaggccctaggacttcataatcagtaggtgacaaagccagccaggtttctgtccttcccttcagagcagtaagttcccccagaccctgagcaggtccagagatgctatctgtgagccagggattagagtcaaaaaccttagaattttacctgatgttctattctaatgtgactaacctggcactcaaaccacaatactgggtcctttctgctcttctctcccctttccacaggaaaaggagactctccttttggccaccaataccacggtcccatgggagttctaccacgctgctgccaatgttcacttagagcccaagggcacttctgtcattctgtgacgaatgttgccagacctggggctcacccttcaggacaatcagttcccctctggcccagagatggtccagaaatactgtccaagaggctcggcctggattcagggagcccaagagcctacttgttgctctacccactgtggctgagctgatacctaagatgcaagacaaagtcccctttactttcccctctgcttttctcaaacaaaaggagtcttttgttgtagccaccacagctgcgaatgtgctgggtcatacctaaagtcagcacgtcccagagcccaaggcctgtggtgtactatctggatattgctgctggttattcagggcctgagggctctttagtcagcaagtaatgaatcctgccaggactggtttcttcccttcaaggcagtgggttcccttggcccacattttgtctattttgtcatccaggaatgggcctggaatggaggtctcacaactctgcccagtgccctgttctattgtgactgagctggtatctaagatgcaagacaaagtcttgtttactctcttcctcaagtagaaggaaggagtcacttttgttgctgcgagccgcactgcctgggattgagggagaaatggtgtaaggcctcccttagctgccctggctgttgtctccctgtgtcacatgccaccatagtccagtggctctaagcccagcctaatactaggagttgcctaggaattgcaggccttgtgtccaagactgcctttcaagtttacctaggaccccagagcactggctttacggtggcaaggcttgccaagaaactccacttctgactgctggtttgggcagttgatctaaatgatctctccatgcatgggtgttggctgagcccagcacagctttgctctccactgtgacagagcagcactgaattcagtgtgaagtcccccagtcgctgctctctccctcctccaagtgtgcaagttagctcgccataccaggcagctgctgctgatagataggggaggggtggtgattcaagactatatctccgacacttttcagttcctcttttagccgtacacattaaaaccaggtactgtgattgctcacctgatttttggttctcgtgacggtgcttttctgtgtgcatatagttgttaaaatttggtgttcctgttgggggaggacagacagtataggcttctattctgccaccttgctgcactcacccagccgattcttttttaactgttaggttcggggtacatgtgtaggtttgttatataggtaaacttgtatcatgggggtttggtgtatagattatttcatcacccaggtactaagcctggtacccaatagttattttttctgatcctctccctcctgctacccttcacccactggtaggccccattgtctattgttcccctctttgtgtcccggtgctctcatcatttagctcctacttataagtgagaacaagcagtatttggttttctgttcctgcattgtttcctaaggatcatggcctcgagctccaaccatgttcatgcagaggacatgatctcactcttttttatggctgcatagtattccatggtgtatatgtgccacattttctttatccagttttccattgatgggcatttaagttgattccatgtctttaccattgcagatagtgctgcagtgaacatttgtattcatgtgtctttatgatagaatgatttatattcctttgggtgtataccctgtaatgagattatagggttgaattgcagtcctttttttagcttgttgaggaatcaccacactgccttcccaatggttgaactaatttgcactcccactgtgtataagcattcccttttctccacaacctcatcagcgtgtgttattttttgacttcttagtagccattctgactggtgtgagatggtatcttactgtggctttgatttgcatttctctaatgatcagtgatgttgagctttttttcatgtgcttgttggcaatgtgtatgtcttcttttgagaagtgtctgtttgtgtcctttgcccacttcttaatggggttgtttttttcttgtaaatttaagttccttgtagttgctggatattagacctttgtctgatgcatagtttgcagatattttctcccattctgtaggttgtctgtttactctgttgatagtttcttttgctgtgcagacacgctttagtttaattagatttcatttgtcaatttttgcttttgttgcagttgcttttcacattttcatcatgaaatctctgccactttctgtgtccagaatggtattgcctaggttgtcttccagcgttttaatagttttggggtttatatttaagtctttaatccatcttcagtttatttctgtatatatgtaaggaaggggtccagtttcaatgtatgtatataattagtcagttatcccagcaccatttatcgaacagggagttctttccccattgtttgtttttgtcaggtttgtctaaggtcagatggttctaggtgtacacccttatttctaggctctgtattctgttccatcggtctatgtgtttattttttataccattaccatgctttggttactgtagccctgtagtatagtttgaagtcaagtagcttgatgcctccagcttttttctttttgcttagaattgccttggcgatttgggctcttttttggttccatatgaattttaaaagttttttctagttctatgaagaatgtgattggtggttcgatagggatagtattgaatctacaaattgctttgggcagtatggccattttagcaatgttgattcttcctagccatgttcatggaatgtttttccattcattcgtgtcaccactgatttctttcagcagtgttttgtatttctccttgtagagatctttcacctccctggttagctgtattcctaggtattgcattttgttttattttattttgttttgttttggtggcagttgtgaatgggattgcattcctgatttgcctctcggcttgattgttggtatataggaatgttagtgacttttgcacattgattttgtatcctgagactttgctaaaattgtttatcagcttaaggagcttttgggctgagacgatggggttttctagatataggatcatgtcatctgcaaacagggataatttgacttcctctcttcctatttggatgccctttatttccttctcttgcctgattgccctggccagaacttccagtaccgtgttgaataggaatggtgaaagagggcatccttgtcttgtgccagttttcaaggggattgcttctagcttttgcccattcagtatgatgtagacagcaggtttgtcatagatggctctcgttattttaatatatgttacttcaatacctaatttgttaggagtttttaatatgaaaagatgttgaattttactgaaagcctctgttgagataatcgtgttatttttgtttctagttctgtttatgtgatgaatcatgtttatttgtttgcacgtatgttgaaccaaccttgcatcctagggataaagccttcttgttcgtagtggattagctttttgatgtgctgctggattcagtttgctagtatgttgttgagggtttttgcattgctgttcatcaaggatattgacccttttttttgttgttgtgtctctgccagttttgggtcaggatgatgctagcctcatagaatgaattgaggaggagttcctacttctcatttttttggggaacagtgtctgtaagaatggtatcagctcttctttatagatctggtagaatttggctgtcaatccatctgatccatggcttttatggtgtgcaggctatttatttctgattccattttagagctcattgttggtctgttcagggattcagtttcttcctggttcagtcttgggaggatatatgtggccaggaattcatccacttctagatttttagtttgtgtgcatagaagtgtttataatcgtctctgatgtttatttctctggggtcagtggtaatatcccctttgtcatttctcattatgtttatttggatcttttctcgtttcttcattaatctagcctagtggtccatatattttattatttttttcaaaaaactggctcctcacttcattggtcttttgaatggtttttcatgtctcagtctcctttagctctgattctgattatttcttgtgttctactagctttggggttggtttgctctttcttctctagttcttttagttgtgatgttaggtgcaaacttgagatcttcctaacttttcaatatgggcatttagcgctcaaaattttcctgttaacactgccttagctgtgtcccagagattctggtatgttatcattgttctcattagtttcaaagaacttactgatttctgccttaatttcattatttgcccaaaagttattcaggagcaggatgcttaatttcaatgtaaatgaatggttttgtgcaattttctttgtattgaattctgtttttattgtgctgtggtctgagagtgtggatggtatatgtattagaccattcttacattgctgtaaagaaatacctgacacggagtaatttataaagaaaagaggtttaattggctcatggttccacaggctgtaaggaagcatagtgctggcatctactcagcttctgggaaggcctcaggaaactttcaattatggcagaagggggagcgaggcatctcacatggtgggagcaggaggaagagagaggggcaagatgccacacacttttaaacaaccagatctcacgagaactctgttacaggaacagaaccaaagggacggtgctaaaccattcatgaaggatctaccccaatgatccagttcccaacattggggactacagttgaacatgagatttgggtggggacacagatccaaaccatatcagtacaattttgatttttttgaatttgcggaaatttgttttgtgtctgattgtgtggttgattttagagtatgtgccatgtggcaatgagaagaatgtatactctgttgtattctggtggggagttctgtagatgtctatcagatccatttggtccagtgttgagttcaggtcttgaatatctttgttaattttttgcctggattatctgtctaatactgtcaatggggtgttgaagtctcccacgttaccctatgggagtctaaatctctttgaagatctcttaagaacttgctttatgaatctggatgtttctgtgtttagtgcatatatatttaggatagctaggttgccttgttgaattgagtcctttactatttgtaatgcccttctttgtcttttttatctttgttggtttaaagtctattttgtctgaaattagaattgcaatccctgcttttttctgtttttcattgcttggtagcctttttccatccctttattttgagcctatgtgtgtcattgcatgagatgggtgagtgcctgcaggcaaggcggcatgaaggaggctgcagtgggggaagaatgctggtgcgtgtccactggggtcactctgctagagcactctgctagtcaggcagtctgccagtgcaggagctaccgtatgggcccgtacctgggagcttcactccaagcaggtgtggctaggctcgggctctgggagaagccagcagaccaaagggtggaccagattggccccatctcatgggcaagaccaccctgcagagttgaggtcccacagttcccctagggataaagtctcctatgggagcaagtctagcctaaggggatgggcatccttggccatgctccgctatagacactcccataccaaactctctgggctctgccccagctggagttctgcttccactgcttccctaagcagctttccctgacaactcaaatgtccatggtggtccaggggttccttcctaccaggattccagcggcctgtggggagagcgaattttgttccttgccttttcaacttccccctctgcaggagttgttgggggccaggaacaagttgtggtgcttggtagccccgagcagggtccccagcttcctcccccttcagccccagctctgtgttttccctccatctgctctcgatgccctccctctgaagatctgctaggagtgtgccagtcttcctggtgtcccagtccctcagtgggagatgttcctcctggctgtatctagttggccatcttggagcagaaatttctagttttgatttttaataaaaatgtatggaatctgttattgtgtctgcttttgtacatattagaaatttttaagtgaaaatttttctagctcataaatttaaatgtataaaggaaatatacagaaatagtagtttcggaattacaaatgattttccatttctctgaaagtcaaaaaagttacacactattttttgagaaaatgttatatgacaggtgcatgttaccatagaaacgaaagatggaaagaaccaaatcacctgagatataggggtagtttagatagaaatggagagaggggaatgtgtccccagaaggagaaaggaggaaattgatgacagttctcctgttcagcagttttacaaggacccattttaataaggtacacacatatatatacaatatgcgctggtgaatttgagtaagtatatgagcttgctacgtgaaagctaaataaagcttttttctgtagatgatgagtctttaagaatgattgttgttcttttccatattataagcaacttatacagtcttatccacgcagaacattctcaaatattaatgatttatcaaaatccagtgaatttcacatgatagttgaaacctagcaatatcttttaagtagaaaatgttctttattcacaacagttttgctccagattaaatatttcttcaaggcagtttgatttatattctctgcagtgctatgaagggaaatcctccaaagatatcctgaaaagagtagctgcaaatgcattgatgtcactgctggctgtcagtagaagagcacagaaacatgctttgaaaggtgagccacatgacacatcagctgttttgatggcattatcaattcatatgttttgttgcttgttcaagttaattttctttggactcaaaatgtaaaaaacgtatagtataatctcagtgtcactaaaaataattttttttcccatacagaagcagtaaatatgcattacttttcaaataaaaagattagacatagtttgtttttgtttgtttaatatgtgatggttcttgctctaaagaacctatatgtaaatattagggaagctaaaaggtaacacattgagtttcattataattaaatattactatccagaagcactcactgcatacctgaacaaaacccacatagttttgatggtaaaaacagcaacagatgattccatattttcgtataaatttccctcttgagtgttgtaatttctcatttgggaatcggagaatgtagatctgagaattaaaagagaataatggcaacatcaagtccattaatatcaattgtgatttgcgactacaacaaatgatgtattcctcaagttgtaaattggatttgggtagtatcttactaaaaactgaaaacaagtggacttcagcattttagttctcttacttatcccccctctgattcattaatctctgactgaaaattctaaaatgaagtgggtcagaaatagaaaatgttacctttttgagaatctgattggtatatgtggttataacttacttggaaatagaatatccttttgactactgcagattttgtctttcagccaatcttatagacaattgcatggagcagatgaaacacataaatgcacaactgaacctagattctctgaggcctgggaaagcagcattgaaaaaaaaggtaacattctgggataaatgaatggctatatatagagaccattctccagtcctcttgtgcctagaaatgagcacgagcttgaaatgagtgtctcatttagaagaaaggtacagatggataaattaatgagacttctacattagcagattgttggctttttttggtcttaattcttacttgaagatctttagacaacatctgtctattatgtactgttgttattataaacattggaaatatccacatatacatgatactatgccagataaattttttatactacaaaaagaaaatctttatctcaaaacaagcataggttaactaggaatgagatctgtaacaactataatttattaagagttttctatatgtcagccactattgaaacatttcatatttattatctcatgaacaaacactcattacagcatagtcacacaactggtaattgatggagctaatatttgccccaaatctgggtggttgcagagctggtattcctcatctctgtttatctcctcctgtgccttctgaatatctcctctagcattgaatctgctggactcatgtttaaactgcatgctcaggtaaactgaaaataacatagttatataataactactgtggttaacaagatctgccacccacttattcaacaaatgaaagtgtgtgaatagtataaatatataaatatacatatatgtgtgtaggtaaggccgttatagcagcactctatgtaataactagtttctactgcatttaagaaaccaagacaaagtcttatttaataatgtaattgatgcaggagattgattgtatgtttatcagttctttttttttttttttttgcctcttttcctccctagccaaaggcccttcatcattgagaaagtcagccaacacctgatattattgaaaatctctcagtatctgcctcactttattgagatgaaacatggaggctatcatatatccgagttcctccatgcttgatagaacagaaatagctttttcatggtgaatgtgcttcttgagatatggtcatctttcagagatcgttagcctgtcagttccctcaaagttacagtggttgggcatgattagagcacacctgcattgtcccgtgacccaaaggggagggaattactatacacaaaaagtgaagtatgctgttgcattcacagttttcaactgctttttgtttaaataggaggatggtgttattaaagagttaagcattgccatgcagctcctaagaaactgtctttatcaaaatgaggaatgtaaagtaagtagaactacttttcaaaattttaataggagtactggtattaagcagtttaatttttatgtgagataatgtagtaggaaaaatggaaagctctgacttttaaatttttagacacacagttgattggtccttaaactcagtgttaattgtcagaaatgtgtgtatctaatcattattcatcgacactgattacatttcttcgcaaacttcagcctcattctgtactcttaggtattttaaatgttttacatatggaatgaatggctggatgtgttttataaggtagattctttcaaaacgggttgtcaaaacaactcttcaaggaaataagtgaagctatctgtatctataaggaaagaaaatgaagagtttcctgcttcaaaggagaagatagttagagctgctacctagtgtggccacatccaccgagaggaagtttcttctagctctgctgactccctgtgaccatttacatggcccttctgtctaaaaatcactgagatgttttgcttcgtctgtaagcactgatgatgttttaaaccattgtatcagtactactatagaggatataatcttgtgaacactctgatttgctttgtctatagttttacaacacttttgaaatactagattgatgctttaatgcagaaatactagattattctttataaaagctggccacgaaaataaaaattttaaaaaatactaaattaaagctttaatatagaaagcaaagataaattatggaagcttttattgccttataaatttttacctgttttgctcttacttgtggtaagagcacaactggaaaaaccataccacatctggaaaatggacatgttgaacacacttactccttaagcgatgttaaaaagccagatacatgactcacaatttatatttcaaagtagtttgatggaaattaagtatttatttatacaatttattaaaattccctatatatgaatttatatgaactttttctcaagacaaaagtgccattaataaacttaatgattccttcatgcttatgatattatgcttgtgactggatgtacagtcagtatttgtgtgtaaatttaaatatataaatttcatgtgtatgtgcagttaatattcattcatgacaccttattcagggaaatactctggaatactttacatgtgggatctacctataaagatttatgaagtgctaacctggctactagttataaatattgtgctcaatttgtatcacattagccatttacaaaagtgtgatatctcaataagtcaaagcatttctgtatttctaagttgtttaataagaagtaaatccaaagaatattaagattatccttgagtataaatataatattatggaggtagggattgttaatttcaatttcagcttttatcaggtgtatggcatgttctcattattaatagttggccactattgggtaattcaccaggtcacccactgccaccccaccctgctgtttgcatatgcataacattaggggttttcatactggaaggagcatggtggctgtgaggtaaatgaattaaacagtggacaaggttagacggaggggactgtcatagtccagacaagagatgatgacaccttaacttgagcaggtagaaaggagaaggagggtagggagtaaatttgaggcattgagaagaggaggaatgtagaatgacttccaaactccagtttaagccactgcattatcatgcattaagagtgcatgatagagcagagcacaggtgtgagagacccgatattcatgcttgcacgtgctagcctcaagagtctttggggcatccaggtgaaaaatggcttgtggcctgtagattttatgggtctgggactctaaggagtgatacaagctggggatattaggagttatcaatgtgtagatggtgtttgtggtcctcactattgttgaaatttcccaagaaagtatgtaatgaaaaccaaggtcatatctttggaaaacaggaacatttaagagggggcagaaaacaactgagaagggaatactggagaaggaatttggagattgcattaggccgttcttgccttgctatgaagaaatatctgagactaggtaatttattaaagaaaagaggtttaattggctcacagttctgcagggtatagaggaagcacagtggcgtctgcttctggggaggcctcaggaaacttccaatcatgacaagaaggcaaaaggggaacaggcacatcacattactagaactggagcaagagtgagagagctggcgaggaggtaccacacacttttaaatgaccagatctcatgagatcactcactgtcttgaggaaagcaccaagccatgaggaatccgcccccaagatataaacacctcccaccaggcctcacctctagcactggggattacaattcaacatgagatttgggcagggacaaatatccagactcttatcagaaatgatccaggatagagcagcagcggggaaattaagagacatatagcaaatgccaccgtgcttaagcgttgttggcaaccacaaaagtagaagcggcctcaatagaatcatcagggcagaaaataaacggtaatgagctaaagattaaatgtgaggcagggaaattacagcaataataatgtagaagtttggtcatgaatagtggcattaataatttaggacatataagatgaaaggaaatgagtatgtttgtttctcttaacacgtaaactacttgaatacaggcacagaaatgagcaaattggggacgagttgtttaagagatagcaagaggagaactaactggtggattaagatccctgaggaggcaggaagagctgtgtttcagaacacagatggatgtatcaatctctggcaggcaagaagtggaacacctctttgtcactaccgggcagacaggaaggatgaatggatgaaaatacagataaactatgtggacagaatggcagagtagataaaggagtttgtacttaatcgtttctgtcttctctgtgaaatagtaaacaaggtcatctgctgcagatggagggccgtgtgccacagagagtggtgaacaagggaagaactttagggagagcactgggaatgacttcagtgcttacggagagtgttgaacattgggaatcacttctcttctgccacttgatgctatgtgaaatcgtatagggtgtgtgtatttatgtgcatgctcacgtgcataatcatgggtctacaaattacctcggaattcttgttcatttaaaatagatattgctgcacttaaacagctatattttatctgcaatattgtcccagggtaactgatctttgtaataaagactctgagttacttcagaatttttcaatttatcataatatttagactgaattttatatattcaaattactcaaaaactgtaatttactttgagtatatacacacatacacagagagagagaaggagagggagagagggtgggcaaagaggactcagagttgatcagaatgtttacttaaccagaaattctcacttcttggccagttcatagcatttacaggaatttattcagtgttgtgagatatcactttgctgtttaatttacatgttacacaggctattttctatgcttcctaacttagtggtacatcttaaccaccctggtgttgaagcgacgtcctgagattggtcaggctcgtggtcagggcagccatgtgtggagcccaatggggctggggcaggatgctgaagccatccacagggttctccttgggtcttatgttgatggctttctgttgttgttttgattttaatgttatattttcatatattcagactaatgctgtctttttcccttccttcaacaggaagcagctcttgaagctcaccttgtccctgtcttgcactctctctggccttggattttgatggatgattcattgatgcaaatttctctgcagctcctttgtgtctatactgcaaattttccaaatggtaataggatccaatactgcctttcaataatataccaaaatactagttttataaatgttgttaaggtggactggaaaaactaatacatattttgaagtatttctctgatttattgaggatatgatgggcaaaggcaagctttctcgtaggtattatgagagcagacagatattttagtgtgtttgttgacatgagagagtcattggcagcgcagggaatagagagggaggactggtctgattatctggcaatgggaaattgagtttagtaggaaaattgagaggataaaaattatgatgtaagacctcaaaagccacgtgaaggttagaacttctcatagattctagagcaggagactggcatgttgaaagttctcataacagttggtctggtgatacttgatatcactagggctcctctttcgctcatgcacttgatagacactttatcaagagcctgtggtgggccatgcattgtgagttctggtgagagtgatctgaaatgagataggaggacaggtcatgtagggcctcagaggccagagtagggagtttggatttttatgtgagtgtaacaggatgacattggcagttgtaagctggtgagtggcatgatttaatttgtgtttaagaaggattaggctgggtgcagtggctcatgcctgtaatgccagcactttgggagacccaggcaggcggatcacttgaagtctggagtttgagactagcctggcaaacatgaggaaaccctgtctctactaaaaacacaaaaattagccaggcatgatggtgcatgcctgtagttccagctactcaggaggctgaagcaggagaatcacttgaacccaggaagcggaggttacagtgagccgagatcacgccactatactccagcctgggcaacagagtgagactctgtctcacaaagaaaagaaaagaaaaattgccctgggtggtatgtggagaatgaatgattgggagcaagtctagaagcagggagacttgtcatggagatataatggtggcttgggcttgagtggtagctggagagattgagagaagtagacagattcagtatatagctcaaaggtagagtcaaggatacctgttgtgggaggtaggaaggaaaaaaaggtgtccggggtgaacttcatttggagaaatgagcctgagtgcacagtagtgccatttactaaaatggggaagatttaaaagaagcagacttgaagtgagaaagtagtaggaatcaagagttctgtttggtcttgttaagtctaaggtgttgatgttcactcaagtgaaaatagtaagctggagttgaattcaatggagtgtagagataagtttgaagatttcaaatgttgggaatattattagttatttattgctacaaaagaaattactctaaaatttagcatctgcaaacattaatcatttcattatgccacggcttctgtggctcaggaatctgggcgtggctaatctgggtggtcctcgctcagagtctctgcaatcatctgaagtcttgactgggatagaggatccagtgtgactatgggagcctcaattccttgctacttagggctgtctcaaacgacccagaatgagtgggctgagggcagaagttatagtctcttataatccagtctcagaagtaactgaacagcactcctagctcttgtgggtcacacataccaaccctggtacagaggcaggcgccactgggaccatcttggaggctggctaccacaggagtcattgtcatgtagattgtacttaaagccacgtggctgtttgcgattacccagggagaatgtgtagatggagaagcagaaacccatgaccaagttctgaggcacatcaacatttggagttaatcaaaagatgagaaaccagcagaaaaaaaagagaaggagcagccaatgagataacagtgcacagtcacagaaagtcagagaagggcatgctcagttgtgtggaatgctattgaaaattctgctaaagtgaggatagaaaaaatggctgttggacttagcagtattgatgttcttttggaccttgagggtaattttagtgcagtgccagaacagaaacctacttagtgtgagctgaggagagaagatgaagaagtagaggagacagcttttccaaaatgtactactcttaagaggacaaagaaatggagcaacagcaagagacagatgtggagtcaaaggaggagtttttgctcgtttttaaagatgtatgtttttaaggcatgtttattaacttaagggattgggagaatgaggtgcaggaaagagtgcaggtaagagcccagcctgagagggtaagagaggtgagagctagagcacagctgacaacagaagcggagggaaggctgagaggaaggatgtggatttaggagggctggtagacttgatgggaatgatgagaaaattcccattttgaatacttctgctttcttcatttaggagagaacactgaccactaagaatgagcaaagacaaggagtagaggtgatgtgagaagaggagaaagtgtgaagtagctgtttttagaggaaggaaagtaaacacaccagagaagcaaagtaggattgctggcagtgttaagtaccacttatggtcataaatttaagaaaataaattagaatttatggtcataatttatggtcataaatttaagatttaaattttattaaatttatggtcataaatttaagatttgactagcaagtttttgtactttcttctaacaacactcagtagcccagcaactggggtctctgaatatcaaaggttatacagagaagggactggaactcacaacagttaaggagcccatctagttactgccagatgctgttgatggcttattcctttgaataatctgccagatgctgatgatggcttattcctttgaataatctgacacctctggagctgtccatttcgatacccaactcaggttgtctccagtcagcacaaagagatataaacagaccttcaagctcttgaacttgaactgtcattgaagcatatgtgtacaggattgtccttgccttcattctgtgctgttaactttctccattccttaggtctggtgggaatgtctcctttcagtgcattttccagctccactagtatatcttttgtttgtttactcatcttttatgagtttcttttacagaatgtatttgattctgatcagtttatacttaagttggcctcctcgtatgaactttcacaagtcaattataccttaggtttatgtataatacagtcttattgatttaacattaaaatatatttctaatttttttttctccctcaataagtctcattcagttacttaatttcctgagaaacactgaaccctggaaagcctgtagatgccacttttggctcctgctatgctaagctgtatgaccttgaacaacaaactggcttttctgagctccatatctttgttgaccaaatatagaaaatagtatttgttttgtccgctttcccagggatattatgttccttatttgtatgttatgtaaaatgaaggcattagacaagttatctcccatttctaaaattctgttcctttacacaggcctttatttagatgttttctttagcaactattaaaaaccctagtatgtttattttattctttttttaaaaataaacctggtgtcttaaagtgctttagtgagataattaggccctcagtgaggacagtatatctattaggttgactgtagacaccaacattagcctccattgctaatttgcagttcacaggttaatggcctagtcattttgttagacagatatgctttgccacttagtgtcttcaaaaactaaacagggaaactgagaagacattgtgataggctgttatttttgaaggttgcagttctctttgttggtcaagttgtggacaacaccctgttcaagctacacatagaggagccgtgagcaactctctgatgctgtgtatcctaaagttggcttcccagatgccactggagaacaccacggttcagcagatggtttttatgcttctttcaaacctggccttgtcgcatgactgtaaaggagtaattcagaaggtacgcacttaaactccccacatatcttaaaagggtactcagtgaaataatctttccaatcaaaagtttacaactcaatttctaagattattatgattttgaggcattttattttaaaggattataaaagggttaagaggttcactttgtttaaagccagttgatagatgacacgtgcagaaggacaggagctagagtagagtcataccatttccttctcatttatcttcttagctttcggattgtattttatcattctcaaagatgagggttttagaaagatagccgtcttacatttattggaaataataaaagtaatatattggtctttaaacagaccaaattgggcagtaacaatttcagtttaatttcattgacaaaatggtttatgaaatcacagcccacttcccccagttagacttaacttccttatggcatgttaagcaattttatgagttctctaggattccagttcccaatctagacttctcatcactgattttaacttaaggtaatttaaaagggatgtaatgagttaaataaattctagtacacatgtgcacttatattctgtatttagatgtgtataaacagaatccctaattgggaaaatcccttcaaatttgaatgtaatcagattatatactacttactagtattgtaatttgagtgtttccatttcttttacttgaaggccaagataaattgcagaagttgagagcatttataagaattgagtctccttttcctctactgtttcttctccctgaactcctcagaagatactttgttatcaccacataaatagaaagttcggtctttctaaggaaatggaaagatcaatcttaccaaggaaagatgttttcagtggcacgttggagccagcctcctactgactcatgagtgtcatcttaaatttgcaggaattttataaaaattccagttgatgttacattgttattttgaaatcagccacagtgggcatatcacaccacgtaattcagcgaactgtacaaatcttggatcttttctaccctcaccacaatcagttgtttatttaccagcacatggctggatattttcttcatgtatatgttcatgtatgtcatatatgtatatatatttgaatatattttcttcatatatgtattcatatacatgcatcacttccaaaatgagacattctcttgaactggatatatgtgattagcatccataagaatgagagattctgcatatgtgagagcagagcgggggcagtgctttccaccacttccttatagagcatgttggtgggaagctaagtgggagcacccagaaggaatgtaagtgccaatctcgagtctggtctgtgactttgagctggagacctattctctttcagcttcatttgggtttaacaaaataatctctaagatatgttcaactcttaatctgttattctggtgctatacttaagaatattttgatgaagtgtgatcagactctctttccagggacggattaatcaagtctttttcctctgctctaattaggaaatgcctgagacttcctctgctgcattaagtaataatgagcccagacacttaacacttctacttcttcattactcatctgtaggacatagaaaatgcagcaggtggtattgtacaactcaggctccgaaatatcctgcttgtttgtttttttttctaccatggtatacatctctacatattctacctggtgtaggaaattgtctgaaaacatctttagaagcagcaaaaaaaaaaaaaaaaaaaaaaaaaaggagtgcccacagcacatttatatttgagagcactgacatctgctttatcacccttgtcagtcccaaatccagcaagggttgaatctaaaaactgtcagtttggctgacagtaggtgtgagtgacagcacatgcagctgaaagtgggcatgtaattttacagtttacttattgtgtgggtaatgttgataatatttctgtagctcatttcattcttaacactcagagtccttttgtataaaaacgttaagtttattttatagattaaagccaacatcttgattttggtctaggaaaacctaagagataaactggagtagatttaaacagagagagagaagagttattctgtgcaatcataaaagttaagtgattgcatttcatttctaaaatgtccacctaactgtggtttccatgctgccatgggctgcagcttgatgcagcacttttatactttgcatatagattagtctaagcaataatttattatctttcttatagtgaagggtttggtggggttttttggaaggggctttatttggaggttgaaaagactcttacagttcaaataatagagctttctcatctgtaagcataatagaatgacgtgtagccatcagaaattcttacttgtaatgataagtacctgggataaagtgaatgtaagatgtatctatagatttgataaaaacaacaacaacacctgtagctataatgattcaaaataccctcactacttccagagttgttaactagtattcaagactgatttggatttttgccttttttccttccatagggtagcttttaatagcaaaatcaccagaaggcagagagaagagaaaactcaagagccctgaaataatctccaaacttaattaccaattctaaataattaagagttaactatagtatacttcatccatcatgaggaaataattagcaggaattaaaacttgagcactattttgttcttcttacctttttcacttatgcttggaaataatatagatggaatattcagaagctattagaaaggagaaattaatgtagagggagagtatatcagaatgttagttaattggtcaccaagggactaggaaaataatgaaaaagatgagaagaaaataatattctctctatttatccacagagtaacttcttacagaacttcctctctctagcattgccaaaaggaggaaataaacatctaagtaatctgactattctttggttgaagttactcctgaatatatcatctggagaagatgggcaacaaatgattctgaggcttgatggctgtctagacttactaacagagatgagcaaatacaagcacaagagcagccctttattgcctcttcttatctttcataatgtttgcttcagtcctgcaaataaacccaagatcctggctaatggtaagttttcacacacacatacatttatatatgtagttattcatagactgttcaggtcaacaccaaataattttataaataattttctaggcatttattaagcacccactgtgttcaaagcactgtggaaggcatgggaatgaatcaggcatggcttcagccttccgtgggcttccaggagtctcctgaggttagcaaatcatgtcattccagtgcacatactggacacctggaggaaggggagccgtggacgagggctccctggccttaccttctgctccctctcctctctccttgctcttcctctaactccagctcccctcttctgcatcttcaagcaaatgctactatgtcaatgaagcctctcgggaaccatgtgttaatataatagccccgcacccagggggccttctctttcctcctcctcactatttcctttcctggttttgtttccctccgtagtattatcgccatctgatagattatgtgtttcatgtatctgtctattcctagtcttcccacactagaaggtaagctcttatggggtcaggaggcttttgtctgctttgtttatgtgtagcacctagaattgtgcctgcaactagcgagcactcaataaatatttgatgattgagagagatcccaagcagaccggagagagttcagggcttgagatcagatggtgcagtgagcctcgcagagacttcattctctgagatgtaggacagatggaggcgaggattggtaaggattcagaaaaaaattgaagcaaaaagaatcggaaagatctttttctgcaaccatgtgttatctctgtgaggagtatgtgaatttcgtggggagtgagttttataaaagacatgtgttctagtgaaaaacagaaggtgggctccagacccctacacacctggtcttgaatgccagcactagggcatcactccagcgtcgcctggtgcagcctcgctgggcccagcttcttcatctataaaagaagcccactcttcttggtttggtaagaatcagtttataaacacacataaagtgcctagcgctatttctggtacatgataaatgtttaagatagattcattctcttgtttttttcatgtttttcacttaaacttttctcagaagcatttttctgtgaaatcaagggttttctaagtgtacgaaaatgattcttcttatattttgtggtgtatatagttgtgattctatttttctgataagcattctgataatcaactgctagatatgatatagaaggatgtttaaagttcagttagcttgtagcagacctaaccttactgtggattttgcactctgccttccggtggctgctgtgctgatgctgcgttctctgttgctgcgtgatgtacatcactggttttatttccatcctctcccactgtagctgcttcagccctcacatttgtaaaatgagggtgatgataatccctcctcagggcaatgagagagcctgtgaagtgtttgtgaccattcttggtatatagcagctactcagtaacatctgttattgtttattcacctttcttagaatgattttttttttctttgagggctacttactccagtttattattgagagttggaaaaaggtcaagctttttgagaagtgaaggagagaagtctgcattttccacttctagacccctctagaattatttttagcatttctttgtagtcagcaatgctttttctccttcattagcttaaagcagatggataaactttggtgagaagcttcccctagcccacagactagagatcagtgggcttttcaggcaggggtaagataagagacatcagctgtgcagtttctgtgtggaactataaagggatgtcacagcctatgcctcgctttccacttggggatttatggaggaggccttagcagagtcagccagcttaaaagtctcccaggaaaggctgcctctgatcggtagcacccacacatctggtttaaatggtcaggagtggagtgtgcagtggagcttgaccttgctggtaaaaatagatctggggcttggcatggtggctcacaactgtaatcccagtactttgggagaccgtggtgggtggatcatttgaggtcaagagtttgagatcagtctggccaacatggtgaaaccccgcctctactaaaaatacaaaaattagccaggcatggtggcgggcaccttgtagtccccagtagtagaattgcttgaactggggagacggaggttgcagtgagccaagatcgcgccactgcactccagcctgggcaacagagtgagacttcatctccaaaaaaaaaaaaagatctggaacattccttgtttctggcaatgccagactaagtctcttctgaaaacgacaataacatgctagacaggctgtattaaaatgcacctcaaaataatcacaaaaactgaaaagatagaaactcccagtccagttttgattgaaagtcttgcccagacaagtaagaagtatatagaaaattattttgccccaagtgcatttgccaaggttgtatgcttggcttttgttgaggagtatcgaggggtgagaggacagaagccgcgattccccaaagtggggattcttactggctatcctgcttgtattaagctggacctccaaagaaccattctcttaatagatggatgggtcaaaaataagttggtttcccaaacttcatgaaggagactgtaaagaaaaggaaaaaaaaaatgtgagaatgggtactacagactgcttctgatagggctctgcacccaaagttggccgtgaacttggcttgaggtgtcttcgattgatggtgcctgtgggtacttagcagaaagcaaactgccttggtgatggatgaaagacaagttcatactgggcctcagggaacctctacaaataatttttcaaaagcattaaccagtacaaagttagagataatcaagcacattaggagacatggcaacatgtagtaagaaacagcagaagaataaaaataccagcttatctgcccagactttgaatatgggaattacaaagcatgggtttaaaaataactttaattataccatatttagataaataaatgacaagcttgaaaattttaggaaatgggaaactgacaagttgaaatatttgaaaagaaccaaacagaacttcaagaactttactgtgcagtatgataatcagccacatgtagctatttaaatttaaactaattaaaattattcagttgtactcactacatgtggctagtggctatcttattaaatagcaagatataaatatttccattattgtaggaagttctgttttacaacagtaatctagaacttcagtggccaaaattgaaaacttaatatacatgtctgacagcaagttaggtatagcagagaacttaggaattagaagatagattagaaaaatattatccagaatgcagcagagaaagctaaaaagatgagaaaggatcaaaagaatcaaaggtaagtgacacagcagatatatcaagacagtctttgtgtttaatgaagtgtcctaggagaatgggagaggaaatatttgaagaaatgatgggtaaaaactttaagaacttttctaagacattaatgtcaccataactgacaactcactgtaattaccaaactgacatccctaaacttatacttaaaccaattgtattaagaaggtaatattcaattattatattaaggtaacattcaattattatattaaggtaatattcagttcaaatattcaaaaatactgtctcattatttacattttactactgtatattcactttaggttatttaaatgtttatatgagagttcagacctacttgttgaactcaaaattgttttattgctttgttatatgcatgtttcacaataacatttgttttgttaaaaaagtcgatccacttgcattatcagaggggcccaccacattaattcacacacacacacacacacacagacacacacacacacacacatatgtatatatacatacacacacagtactttattaaaaatgctttaagggatagctggttgaaggagttataaacttacttagatcagaggagttatatattctgagtgtttgagacaacatttaaaaacatcacttgatgctactcagatggaacataaggaagtcaccctcccatttaataaggggacatttgatgtgccctaatgagtagcacttgcagccataacctcacgtgataaattgcatctgcaagctatgtacatggcttggttctgggtaggttatgatacacgacaaccaaagggcatcagatagtgcagatgaggtgttcagggagtcggctgcagcgtgcccgaaacatcactgcacctgcctttcacattgtcctgatgcacatttccagttcactttagggagcagctttttttgttttgtttttgttaaatatttaaaatcccttaaaataaaaaaattgaattatgtagacaaaatttttgtttattctattctggaatctttcacacaacgaatatttattgagctcctaaaatacactagcattgtggttggtctaataccagtgagtagacactgccatctaactaataccagtgagcagacgttgccctgtaactaataccagtgagcagacactgccttctaaccagtaccagtgagcagacgctgccctgtaactaataccagtgagcagacgctgccctctaaccagtaccagtgagcagacactgtgctgtaactaataccagtgagcagatgctgccctctaaccaataccagtgagcagacgctgccctctaaccaataccagtgagcagacgctgccctctatctaacaccagtgagcagacgctgccctgtaaccaataccagtgagcagacactgccctgtaaccaataccagtgagcagatgctgccctgtaaccaataccagtgagcagacgctgccctctaaccaataccaggagcagacgctgccctctatctaacaccagtgagcagacgctgccctctaaccaataccagtgagcagacactgccttctaaccagtaccagtgagcagacgctgccctgtaactaataccagtgagcagatgctgccctctaaccagtaccagtgaacagacactgtgctgtaactaataccagtgagcagatgctgccctctaaccaataccagtgagcagaccctgccctctaaccaataccagtgagcagacgctgccctctgtctaacaccagtgagcagacgctgccctgtaaccaataccagtgagcagatgctgccctgtaaccaataccagtgagcagacgctgccctgtaaccaataccagtgagcagacgctgccctgtaaccaataccagtgagcagacgctgccctctaaccaataccagtgagcagacgctgccctgtaaccaataccagtgagcagacgctgccttctaaccaataccaggagcagacgctaccctctatctaacaccagtgagcagacgctgccctctaaccaataccagtgagcagacactgccctctaaccagtaccagtgagcagatgctacactcacagaccctgccttgaaccttttcctattttagtacccttatttatttatcttgcctgattgccctggccagaagttccaatactgtgttgaacaggagtggtaagaaatggcatccttgtcttgtgccagttttcaaagggaatgtttccagcttttgcccattcagtgtgatattggctgtgggtttgtcataaatagctcttattattttgagatatgttgcatcaatacctagtttattgagagtttttagcatgaaagggtgttgaatttttttgaaggcctttctgcatctgttgagataatcatgtggtttttgtcgttggctctgtttatgtgatagattacttttattgatttgtgtatgttgaaccagccttgcatcccagggatgaaacggacttgatcttggtgaataagctttttgacgtgctgctggattcagtttgccagtattttattgaggatttttgcatcgatgttcatcggggatattggcctgaaatttcctttttttgtgtgtgtctctgccaggtttttgtatcaggatgatgctggcctcataaaatgagttagagaggattccctctttttctattgattggaatagtttcagaaggaatggtaccagctccactttgtatgcctggtagaattcggctgtgaattcatctggtcccgggctttttttggttggtaggctattaattactgcctcaatttcagaacttgttattgatctattcagggattcgacttcttcctagtttagtcttgggagggtgtatgtgtccaggaattcatccatttcttctagattttctagtttatttgcatagaggtgtttataatattctctgatggtagtttggatttctgtgggatcagtgctgatctcccctttatcattttttattgtgtctatttgattcttctctcttttcttctttattagtcaggctagtggtctatctattttgttaatcttttccaaaaaccagctccgggattcattgattttttgaagggtttttcgtgtctctctctccttcagttctgctctgatcttagttatttcttgtcttctgtaagcttttgaatttgtttgctgttgcttctctagttcttttaattgtgatgttagggtgttgattttagatctttccccctttcacctgtgagcattttgtgctataaatttccctctaaacactgctttagctgtgtcccagagattctggtatattgtgtctttgctctctttggtttcaaagaactaatttatttctgccttaattgtgttatttactcagtagtcattcaggagcaagttgttcagtttccatgtagttgtgtggttttgagtgagtttcttaatcctgagttctaatttgattgcattgtgctgtgagagactgtttgttatgatttcaggtctttggcatttgctgaggagtgttttacttccaagtatgtggtcagttttagaataagtgcgatgtggtgctgagaagaatgtatactctgttgatttggggtggagtgttctgtagatgtctgttaggtccacttggctcagagttgagttcaagtcctgaatatccttgttaattttctgtcttgttgatgtgtctaatattgacagtggggtgttgaagtctcccatgattattgtgtgcgagtctaagtctctttgtaggtctctaagaacttgctttatgaatctgggtgctcctgtattgggtgcatatatatttaggatagttagttctatttgttgcattgatccctttatcattatgtaatgcccttctttttcttttttgatctttgttggtttaaagtcttttttatcagaggctaagattgccacctctgctttttttttctcccctgcttgccatttgcttagtaaatcttcctccatccctttattttgagcctatgtgtgtctttgcacgagatgggtctcctgaatacagcacaccgatgggtcttgacgcttcatccaatttgccagtctgtgtcttttaattgtggcatttagcccgtttacatttaaggttaatattgttacatgtgaatttgatcctgtcattatgatgctagctggttgttttgcccattagttgatgcagtttcttcatagtgtcaatgttctttacaatttgatatgtttttgcagtggctggtacaggtttttcctttccatatttagtgcttccttcaggagctcttgtaaggtagggctgctggtgacaaaatctctcagcatttgcttttctgtaaaggattttatttatttttcacttatgaagcttagtatggctggatatgaatttctgggttgaaaattattttcttgggccatacgcagtggctctcacctgtaatcccagccttttgggaggccaaggtgggcggaccatgagatccagagtctgagaccagcctggcccatatggtaaaaccccgtctctaataaaaatacaaaaaaattagccaggtgtggtggtgcccacctgtcgtcccagctactcaggaggccgagacagaagaattgcttaaacctggtaggcggaggttgcagtgagccgagatctcaccactgcactccaaacctgggagacagagcaagactgcatccccctccccaacaaaaaaagaaaagataaattctttaagaatgttgaatattggcccccagtctcttttggcttataggatttctgcagagagatctgctgttagcctgatgggcttcccttggtgggtaacccgacctttctctctggctgcccttaacattttttccttcatttcaaccttggtgaatctgatgattatgtgtcttggggttgctcttctcgaggagtatctttgtggtgttctctgtatttcctgaatttgaatgttggcctgtcttgctaggttggggaagttctcttgcatttaatatcctgaagagtattttccaacttggttccatttttccccatcactctcaggtacaccagtcaaacataggttgcttcttttcacacagtcccatatttcttggatgctttgttcattccttttcttttttttttttctctaatcttgtcttcacgctttatttcgttaagttgatcttcaatctctgacatcctttcttctgcttgatcgatttcgctattgatacttgtgtatgcttcacgaagttctcatgctatgtttttcagctcccatcaggtcatttatgttcttctttaaactggttattctagttagcatttcctgtaaccttttatcaaggttcttagcttccttgcattgggttagaacatgcttctttagcttggaggagtttgttattacccaccttctgaagcctgcttctgtcacttcgtcaaactcattctccatccaattttgttcccttgctggtgaggagttgtgatcctttggaagagaagagttattctggttttgggaattttcatcctttttgcactgggttttcctcattttcgtggatttatctacctttggtttttgatgttggtgaccattggatggggtttttgtgtggatgtccttttggttgatgttgatgctattcctttctgtttgttagttttcttcctaacgggcctctctgctgcaggtctttgggagttggctggaggtccactcctgcccctgtttgcctgggtatcaccagcagaggctacagaagagcaaagattgctgcctgctccttcctctggaagcttcatcccagagggcaccccccagatgccagctagagctctcctgtatgatgtgtctgtcaacacctgttgggaggtgtctcccagtcaggaggcacgagcgtcagggacccacttgaggaggcagtctgtccgttagcagagctcgagcactgtgctgggaggtccactgctctcttcagagacagcaggcaggaacatttaagtctgctgaagctgcacccacagccgccctttcccccaggtgctctgtcccagggagatgggagttttatctataagcccctgactgggcctgctgcctttctttcagagatggcctgcccagagaggaggaatctagagaggcagtttgggtacaacgtctttgctgagctgtggtgggctctgcccagtttgaacttcccagtgccttcgtttgcactgtgaagggaaacaggctacttaagcctcattaatggtggacacccctctccccaccaagctcgagcatcccaggtcgacttcagactgctgtgcaggcagtgagaattttaagccagtggatcttagtttgctgggctccatgggtatgggatctgttgagctaggccacttggcaccctggcttcagccccctttccaggggactgaacaactctgtctcactggcattccaggcactactgaggtatgaaaaatctcctgcagctggctcggtgactgcccaaatggctgcccagctttgtgcttgaaaccctgggccctggtggtgtaggcacccaagggaatctcctggtctgtgggttgcaaagaccatgggaaaagcgtagtatctgggccggaatgcaccgttcctcagggcacagtttctcagagcttcccttggctaagggagggagctcccccaccccttgtgattcctgggtgaggcgacaccccaccctgctttggctcgccctccatgggctgcacccgttgtctaaccagctccagtgagatgagctgggtacctcagttggaaatgcagaaatcacccgccttctgcattgatctcactggaagctgcagaccggagcttcctattgagccatcttgccagccaccctagtcatttttaaaaaacatcaagcagtgtgatatttgatgatcgtttttgtatagtagctcatgctactgatgtgtttgtatgatagtctttataatttatcatgaaagcagatctgtttttctgcctgccagaatgttagctgtaattgagtaactcattaatgtacctaattgtatacttatttttacacacttgtggtctttaaatgaatgtgccttttcttgaattctggccaaaaaatgaagcagcttcagtgtctttgacccttctatgcctgacatgaaaacaatgttttgaggttgtcctcccatataccacatggcataaaagattggttttgccatagtctagtgataccaactttatgtatgcattctaatgggaaaagaggggggtgtctgactagtccaagataagaatacaatgcagtgtctgggactgaacttttaaaaaatatatgttcatttttagaaaaagtcattactgtgcttgctgcctgtctggaaagtgagaatcaaaatgctcagaggattggagcagctgccctttgggctctgatttacaattatcagaaggtcagttttaaaaatcattgttacacctggggagcaaacaacaaggtataacccaggtataaactcttaggatacatccaaaggtgtcaagagttacagcaaaagaaaaaagacaaaatcaaagatccatgttccctttgctgattcatacaattagtaaaccatcagttgaaatctttttatttaatcatttcaacagaatgtctcagtttagaagagaatctctgaactgactttttcctcttaatttaaattgatttactttattattgcaattttagtatagattgtttcttctaaaagacgtatcaagggaaaacacatcttaaagtaaaactgagtaacaaaagttttatccaattgtacaattcccctttatctagctcagttcttgtacgactgcagcccaaagcctgctctgagaaaagggcaggcaacgtggagatttgtgttctactctttctctggcctttggacttccactttattgcagacatgttgttcccaagagaaatacccataagtatctagtgattaagtagtagccaagtgacagtgttaggatagacagccatcctagaatggtgttctctcagctgactgtctctgccggggctagttttctccctgctggccagagtcacgtacacaaggacaagagggtgttgttttctttctcacctgggtatccccagagcttagcacaggatttggcactttgtagtcactctgtaaatatttgttgaccaactgctaatatttggtatatgtgatcagaaatctgaggtttgagggagtatgaaaaactgaaaccaaggatgactagtttaaaatagcaaattgagattaggggagaaggagtaaaagagaagggaagaaagaaaatgggaatagagaaagaatcaagttagataagaggatatgggcaagacttcagaatgtgcaaggggattggctcaataggatgtattatgctaagatggaactctctagttatattattatatttcataatattctgtttaatactgtagttagcaatgggcagaattagtgttttgctatcatgatccataacacatggcaagaaacctaattaatggattgttctaggcaaaaacagctttgaaaagcccatcagtaaaaagaagagtggatgaagcatactccttagcaaagaaaagtaagttgcaataagaaagagattatagttaaactcagaagctattaagtggattttctgattaatgagatatttggacaggccacagcaaaatggcattgtaaaatgtgccaatattcagtatgtgctttaattatatcattttttaaaataataaaatagatagatgaaggtttaagatgtgattgcttctaaaaatgcatctgtgatcttcgtcttatttttgtactaaattttctttgccaacagtgaccactgtgctgaagtatgttcttagtgataagaactggcccaattagaattaactgtgagcagaaaacctggatctaacatcagggagctggaggacagtcttccaagaattgatcctgttacccttatatccacgtttccctgtgatgtggtcacaatactagagacggttttcttttcaaagcacattattcatttttagtgacaccaaatttcagtgagcgttattctctgaacattttttatgctaaaacactgaattgtgtctttcctgtactgtaatatatctgttggttatttgtgtttttatagtctgatttttttttttaagcaggggaggttttagtttgttttagctgcgaccatgaatttctggagctagtgaagttaaagattatgctttaggaaggatggtacataaaaaaagattaatggcattcatttggaattatagttaatggtatccattatggggggtactttttaaaaaatactctgggtaagctgttaatttaaaaaaatattgattttgtaacttgtttattttttaaaaaatgcaaaatattctggaatgctattacatcaagaacttagagctttaaattatatataaatcctgttcatatgtatttgtttatgtgtgtgcctcctaagtatagtaccaagtttcataaactagtatttctgtactcttatttttctatctcagctttcccaaactcagaagcaaaccctctaaatgcctattatttgaaatgtcttgaaaacctcgtgcagctccttaattcttcctgagtgccatgggatgctacaccttgaagctgacagtcatcaacaggggagctaaagttgaagccagctgtgtgtagcagctgttacctgaagacgtgctacctctctacaaagtgttgatccccttctttcccatgagagagagaactggtgatactccaacaccgtccagttgtggcagctctccagaagtaatagcagctgacaactttctgtgccttttcctttctgttgaaaaggcatagaaagttctgggaacataaacatttttacccttttctatgccatttattttgtaaaaatcctatttaacagttatttaataaaacaatatttttagaaactaaaaa

SEQ ID NO: 15782 - DNA, 105742 bp, Homo sapiens
actgcgtttccgggatggagctcacactctcctctcacaaagcctctagatatctgtgtgaagtacttgtcaggtctccttgaggtaagtaaaaatagcatatggtagttatttactattagttgcttttactttatgccaggccacaagtgcattatacgttactctattcaatgtagaatattatacattatttatataagtcataatagtgaaatgttttagtgatttttattaatagttaagtaaggaaggtcacttttataaataccctcattttcaaaagaaataaatggaaacttttgatgctcaaaggaagtgttcgctagagcatttcagattttggatttttggattaggaatgctcaaccagtaagtatatgatacaggtatttcaaaatccaaacaactccaaaattcaaacacttctggtcccaagcattttgtatacggcatactcaggctgtacaatgttaaaggatatttgttttttctttttcttccagtttgtgcagttctagatgctactgctatgaacattcttatcttttggtgaaaatgagcatcttttttgaaattttatcttctgttattgaaatatgtaaatatagccaatttttatatgttgaccatgtatcaggcaattcttatttccaatatcaaaacaaaagcctttaatttttcacccttcagtatgctgtttatagtttttttttgtcaattaagaaagatcaagttaaggaagttttcttttgtcctgttttgctaggagctttgttttttaattcataattgtatattgcttttttctgtatcttttaagataatcacatgatttttcccttatattccattactgattgattttaaaatgttaaacaaccttgcatttctcgaaacatttcagttaggttgtgatgtattactctttttatatgttagtggatttcgtttctcaattttttagaattctgaagtttttagaattattctatttcctcatgtaaaaaagtttttcgaattttgcatcttttttctcttaaagaatttgtcaggtttttaataatcaaaatcattccgttcttatgactaaaatgggagaatgtgagattgtaagaacgtgactttttcaaccattttaaatcttttcctttatataactttcttttttggaatagctgatttgcattggtgtgattttgttctctaatgttaggtagaatttgatcgtgaaacaatcttggtttgcagttttctttttgggaagattgtaaattgtgaaatgaaatgactttttttttttttgagacagagtcttgctctgttgcccaggctggagtgcaatggcatgatctcagctcactgcaacctctgcctcccgggttcaagtgattctcctgcctcagcctcccaagtagctgggattacaggcgcctgccaccacgcacagctaatttttgtctttttagtagagacagggtttcaccaggttggccaggctggtgtcgaactcctgatctcaggtgatccacacccgtcttggcctcccaaagtgctgggattacgggtgtgagccactgcgcctggcctgaaatgactttttaaatagatctaaaatcgttcagagtttctttttatgtgtgtcagccttagtaagttatgtttttgtagaacttaaaaactttttatctaatttttaaaatttgttactgtgaaggtattcatcaaatcatcttacacttttaatgtctgctgaatctgtagtgaggtcccctttcattgcagacattaattattcctttctcaatttttcttggtttatctttctaatagaatgaacctttggctttgttgagcctctctttaacttttttctcctgttttatttctgccaatatttattatctccttctacttttagtttagtttacagctcttttttctaacattttaaggtagaggcttacgtcattgatttttttaaaagtctttctcaaatgtgtgtttttagctctaatcctctaagcatggccttatgccatgtttttatcatcaatttaggtcaaaatatttctactgtgatataataaatacgacaatgatatggttgtacatagttctatgagaacagcctcatcacagtggcctgacaattttgcatatctgcccttgggcttcatagacaaggcttaactacagccaatctaaatcttggcagaatttcctgtgatccttctggaacatgagaatatgaaaggcttatgagcagctgactatgcaagattgattctcacttacttcacagtctattaggaagtcagttaggagcccgtttcttattggttcctaggttccgacgagcactgggctttctgccttgctctccttggggcatagctacagcttataaaactgctttactgcagcacggcatgggcttctccgcaacagagtgtcctacatctttgttatagtcatctggcccctttgtttcaatgtcatcctgtgcaagggatactagtagctggcacctttgtctattcttgcttttgctgtttatgtaggtaataaactgtctgaatccaaaaattactcattgttttcttactggacaaatctgtcagccttgttttgattgctaactgtgttcggacctcaagaatgattcttgtaggaagcactgtagagttagattttgaaagataagtaaattgatagtgatagcaatagacattctagacatggaattttctgataaaattgtatctataacctcctgtttttttttcatgctgtgggtgacttcttgacatcatataatctctacctattgccagattatttttcagaaacataaatttttcaatccaaacctctttttttttcaagagcataagactcaatattttgcatttagagatttgcctccattgtagttttttcccacatctctgaattttcagttatatctggctgtttttccaaaataaaaatgcactttaaaaagactgcttctttcacatagtttcctctcttttagggatggcaatatctacaaaaaatttaagatctaacttatttatttaccttcatttagtaaaccttttcttattcttccaaggttggatacttacctaatactgtttggcctttcctgtaggttatatacctgtaacaatttatatatgtggctattacttaatacattatatttttatttattttactttatttctttgagacagggtttaccgtgttgctcaggctggaatgcagtggtgcaatcacagctcactacagcctcaacctcctgagcccaagtgatcttcccacctcagcctcccaagtagctggggccacaggtgtgcaccactacacctggctggtttaatttttttgtagagatgggtctcactatgttgcccaggtttgtcttgaattctttggcgcaaatgatcttcccactttggcctaccaaagtgctgctattacaggcatgagccactgtaactggacctttattttgttttctgcattgctctagtagactatgagcttataagtatcatctttgggctatttctactatcccatggctactgcattgacctagcaccatggtttttacatagtggttagtgaatcagttaattaatatatgtgctacataatacatatatattgtgtatagtttttaaattaagatacagtttgaaaaacattttggaaatgtagcataaatgattataaaaatatgttttattgttgtatttttattactaaataatgatttaaataatgtatatatatattttatctggtcttatctagaacttttttccaaaagcacatattgtttttaaaacaagtttaaagatcataaatactctttgctgtactgtaaaatttaatatgaatttcactggagtccctttaataaaataaatttcggagaggttccaagatggccaaataggaacagctctagtctacagctcccagcatgagcgacgcagaagacgggtgatttttgcatttccagctgaggtaccgggttcatctcactggggcttgtcggacagtgggtgcagcccacggactgtgagcagaagcagggcggggcatcgcctcacccaggaagcgtaagaggtcagggaattccttttccaagccaagggaagccgtgacacatggtacctggaaaattgggacacttccaccctaatactgtgcttttccaatggtcttagcaaacaatacactaggagattatatcccacgcctggcttggagggtcccacgcctatagagcctcgctcactgctagcacagcagtctgagatcgaactgcaaggtggcagcgaggctgggggaggggtgtccgccattgctgaggcttgagtaggtaatcaaagcggccgggaagctcgaactgggtggaacccaccacagctgaaggaggcctgcctgcctctgtagactccacttctgggggcagggcatagctgaacaaaaggcagcagaaacctctgtagacttaaacgtccctgtctgacagctttgaagagagtactggttctcccgttacagagtttgagatctgagaacagacagacagcctcctcaagtgggtccccaacccccgagtagcctaactgggagacacttcccagtaggggccaactgacacctcatacagccgggtgcccctcttgagacgaagcttccagaggaaggatcaggcagcaacatttgctgttctgtaacatttgctcttctgcagcctccgctggtgatacccaggcaaacagggtctggagtggacctccagcaaactccagcagacctgcagctgagggtcctgactgttagaaggaaaactaacaaacagaaaggacatccacaccaaaaccccatctgtacgtcaccatcatcaaagaccaaagatagataaaaccacaaagatggggaaaaaacagagcagaaaagctgaaaattctaaaaatcagagcacctcttctcctgcagaggaacacagctccttgtcagcaacggaacaaagctggacggagaatgactttgacgagttgagagaagaaggcttcagaagattggtaataacaaacttctccaagctaaaggaggatgttcgaacccatcacaaagaagctaaaaaccttgaagaaagattagacgaatggctaactagaataaacagtatagagaagaccttaaatgacctgatggagctgaaaatcatggcacaagaactacatgacatatgcacaagcttcagtagctgatttgatcaagtggaagaaagggtatcagtgattgaagatcaaatgaatgaaatgaagcgagaagagaagtttagagaaaaaagaataaaaagaaacaaacaaagcctccaagaaatacgggactatgtgaaaagaccaaatctacatttgattgttgtacctgaaagtgacggggagaatggaaccaagttggaaaacgctcttcaggatattatccaggagaacttccccaacctagcaaggcaggccaacattcaaattcaggaaatacagagaacgccacaaagatactccttgagaagagcaactccaaggcacataattgtcggattcaccaaagttgaaatgacagaaaaaatattaagggcagccagagagaaaggtcccgttacacgcaaagggaagcccgtcagactaacagcggatctctcggcagaaactctataagccagaagagagtgggggccaatattcaacattcttttttttttatgatttgcttttttttttttttttgaagtatttattgatcattcttgggtgtttctcggagagggggatgtggcagggtcataggataatagtggagagaaggtcagcagataaacacttgaacaaaggtctctggttttcctaggcagaggtccctgtggccttccgcagtgtctgtgtccctgggtacttgagattagggagtggtggtgactcttgaccagcatgctgccttcaagcatctgtttaacaaagcacatcttgcaccgcccttaatccatttaaccctgagttgacacagcacatgtttcagagagcacgtggttgggggtaaggttatagattaacagcatcccaaggcagaaaaatttttcttagtacagaacaaaatggagtctgctatgtctacttctttctacacagacacagtaacaatctgatctctctttcttttccccacatttcccccttttctttttgacaaaactgccatagtcatcatggcccgttctcgatggtcgctgtctcttcagagctgttgggtacccctgcagacaggctgtcacttcatgcttggaagattgcacagcggccaggcagaggcgctcctcacttcccagacgaggcggccaggcagaggcgatcctcacttcccagacggggtggcggctgggcagaggcgctcctcacatcccagacggggcagccgggcagaggcgctcctcacttcccagacgggacagctgggcagaggcgctcctcacttcccagacggggcgcctgggcagaggcgctccccacttcccagactggacagctgggcagaggcgctcctcacttcccagacggggcgcccgggcagaggcgctcctcacttcccagacggggcagccaggctcaacattcttaaagaaaagaattttcaacccagaatttcatatcctgccaaactaagtttcataagtgaaggagaaataaaatcttttacagacaagcaaatgctgagagatttgtcaccatcaggcctgccttacaagagctcctgaaggaatcactaaacatggaaaggaacaagcggtaccagccactgcaaaaacatgccaacttgtaaagaccattgatgctaggaagaaactgtatcaactaacgagcaaaataaccagctaacatcatgatgacaggattgaattcacacataacaatattaaccttaaatgtaaatggtctaaatgctccaattaaaagatacagactgggaagttggataaagagtcaagacccatcagtgtgctatattcaggagactcatctcacgtgcagagacatacataggctcaaaataaagggatggaggaagatcaaccaagcaaatggaaaacaaaaaaaggcaggggttgcaatcctctctccgataaaacagactttaaaccaacaaagatctaaagagacaaggccattacataatggtaaagggatcagttcaagaagaagagctaactatcctaaatatatatgcacccagtacaggagcacccagattcataaagcaagtccttagagacctacaaagagacttggactccacacaataataatgggagactttaacaccccactgtcaacattagacagatcagtgagacagaaagttaacaaggatatccaggacttgaactcagctctgcaccaagtggacctaataggcatctacagaactctccaccccaaatcaacagaatgtacattcttctcagcaccacatcacacttattccaaaattgaccacatagttggaattaaagcactcctcagcaaatgaaaaagaacagaagttatgataaactgtgtctcaaaccacagtgcaatcaaactggaactcaggattaagaaactcactcagaacagctcaactacatggaaactgaacaacctgctcctgaatgactactgggtacgtaacgaaatgaaggcagaaataaagatgctctttgaaaccagtgagaacaaagacacaatataccagaatttctgggacacatttaaagcagtgtgtaaagggaaatttatagcactaaatgcccacaggagaaagcaggaaagatctaaaattgacaccctaacatcacagttaaaagaagtagaaaagcaagagtaaacacattcaaaagctagcagaaggcaagaaataactaagaacagagcagaaatgaaggaggtacagacacaaaaacccttaaaaaaaattggtgaatccaggagctggttttttgaaaagatcaacaaaatagatacaccactagcaagactaataaagaagaaaagagagaagaatcaaatagatgcaataaaaaatgataaaggggatatcaacaccgatcccacagaaatacaaactactatcagacaatactataaactcctctatgcaaataaactagaaaatctagaagaaatggataaatttctggacacatacaccctccgaagactaaaccaggaagaagttcaatttctgaatagatcaataacaggctctgaaattgaggcaataattattagcctaccaaccaaaaaaagtccaggaccagatggattcacagctgaattctaccagaggtacgaagaggagctagtaccattccttctgaaactattccagtcaatagaaaaagagggaatcctccctaactcattttatgaggccagcatcatcctgataccaaagcctggcagagagacaacaaaaaaagagaattttagaccatatccctgatgaacatcagtgcaaaaatcctcaataaaatactggcaaactgaatccagcagcacatgaaaaagcttatccaccatgatcaagtgggcttcatccctgggatgcaaggctggttcaacatgcacagatcaataaacgtaacccatcatataaacagaaccaaagacaaaaaccacatgattatctcaatagatgcagaaaaggccattgacaaaattcaacagcccttcatgctaaaaactctcagtaaattaggtattgatgggacgtatctcgcaataataagagctatttatgacagacccacagccaatatcatactgaatgggcaaaaactggaagcattccctttgaaaactggcacaagacagggatgccctctctcaccactcctattcaacagtgttggaagttctggccagggtaatcaggcaggagaaagaaagaaagggtattcagttaggaaaagaggaagtcaaattgtccctgtttgcagatgacatgattgtatatttagaaaaccccatcgtctcagcccaaaatctccttaagctgataagcaacttcagcaaagtcgcaggatacaaaaaatcaatgtgcagaagtcacaagcattcctatacaccaataacagacaaacagctaaatcatgagtgaactcccattcacaattgcttcaaagagaataaaatacctaggaatccaacttacaagggatgtgaaggacgtcttcaaggagaactgcaaaccactgctcaaggaaataaaagaggacacaaacaaatggaagaacattccatgcttgtggataggaagaatcaatatcatgaaaatggccatactggccaaggtaatttatagattcaatgccaccttcatcaagctaccaatgactttcttcacagaattggaaaaaactactttaaagttcaaatggaaataaaaaagagcctgcattgccaagacaatcctaagccaaagaacaaagctggaggcatcacgctacctgacttcaaactgtactacaaggctacagtaaccaaaacagcatggtactggtaccaaaacagagatatagaccaatggaacagaacagagccctcagaaataataccacacatctacaaccatctgatctttgacaaacctgacaaaaagaagaaatggggaaagcattccgtatttagtaaatggtactgggaaaactggctagccatatgtagaaagctgaaactggatcccttccttacaccttacacaaaaattaattcaagatggattaaagacttaaatgttagacctaaaaccataaaaacccaagaagaaaacctaggcaataccattcaggacataggcatgggcaaggacttcatgactaaaataccaaaagcaatggcaacaaaagccaaaatagacaaatgggatctaattaaactaaagagcttctgcatagcaaaagaaactaccatcagagtgaacaggcaacctacagaatgggagaaaatttttgcaatctacgcatctgacaaagggctaatatccagaatctataaagaacttaaagaaattttgcaagaaaaaaacaactccatcaaaaagtgggcgaaggatatgagcagacacttctcaaaagaagacatttatgcagccaacagacacatgaaagaatgctcatcatcggagaaatgcaaatcaaaacgacaatgagaaaccatctcacaccagtcagaatggcaacattaaaatgtcaggaaacaacaggtgctggagaggatgtggagaaataggaacatttttacactgttggtggaactgtaaactagttcaaccattgtggcagacagtgtggtgattccttaaggatctagaactagaaataccattttacccagccattccattactgggtatatacccaaaggattataaatcatgctgctatattcatggaactagcccaaatgtccatcagcaatagactgggtgaagaaaatttggcacatatacaccatgtaatactatgcagccataaaataggatgagttcatgtcctttgtagggacatggatgaagctggaaaccatcgttctcagcaaactatcgcaaggacagataaccgaacactgcatgttcgtgctcataagtgggaattgaacaatgaaaaacttggaaacagggtagggaacatcacacaccagggcctgtcatggggtaggaggagggtggagggatagcatcaggagatatacctaatataaatgacaagttaacaggtgcagcacaccaacatggcacatgtatacatatgtaacaaacctgtacgttgtgcacatgtactctagaactttaagtatattaaaaaaataaaataaacttcattttttaattataaatattaaaaaaggttcaactgtcagtatactaattagttattttctgctgtctattagaaatgtatgaattttaaaaaacaggtatattaaagagttaatgataatatttcttagaaagtcagctcctctagtgcatttaaaatataattcagttagtctagctagtggcctatctatctcattaagtttttcaaaaaaacaactcctggatctagtgacctttcgaatggtttttcatatcttgatttccttcagttcagctctgattttggttatttcttgtcttctgctagtttggggttgatttgttattgctgctctaattctttcagttgtgatgttaagttgttaatttgagatctttctaactttttgatggaggcatttagtgctacgaatttccctcttaacactgccttagctgtgtcccagagattctgatgtgttgtaactttgttctcatgagtttacttgtgtaacaaacattcacgttacccgtgaacctaaaagtttaaaaattaaaaaaaatatataattgaacctataagtacctagtttatagcattttttgtcatgtgatttataaatactctatttatcaaccttttacagagtcagtctcctctagaaaatgagttttactctttgaaatcaggaataggtgaggacctgccacagcggtaactaaagaagaagtgaagtgttgcctcatttatgtttagaaactatcagaagtgcttttgttttaaaattacgtgcaaagactttagatcacacctacgtttcaaataccagaaattgaaatgaactgttaatgtattggagaacaaaagggcttagttttaggtaagaagtgtaggcaaaaaggcagtagtccattctgtgttcagttgtctttgaggtaataaaatttagtaacagtttgttagctaaaggatacataaaaagcacagtccctgttatgtaatgtttcgcagttataaaaaatttgattagccaatcttgctttggtttaaaaaggaggtcgttttgtgcttcataaaacatctcgagcagaaaatctttatgactttatgttaaatggcaggcaaatattaggaaagaatccgtcacttttgttaaaaattgtagcagggtaacatttaatcttgggactatctgcttagtttattaattacataaacaggtatccctgttgtactactaatgactaaattcatcttttaaagaataaagtaaggcttatgtgagagaacattgaaacaaagtcattgttggtccaaatgatttgcttcatagtttcttagtaattaaagctgtttcctttttggaagggagccatatttctaataaaagattagcttgtttctgcacagtgaaatttgaatatgagtatttgctttttgtagctgtgaaatgagactttttaactaagcatgattaattatgataggtgaataaactatgataattaaatctttaaatcagatacatgatgtataattccagaggtctgacaaaaatatcaagttgaaagaaaatactggcaaaggtcttggcttgtcatttataagctagaattaaaaatcattacacagatcacagatgttagatatctccaaagatgacttagaggaagataataaggatctgatcatttagatattttatttttcaagtagtcacttaaaattttaaatttttgaccttggggaaggggcagctgtgggcacagcttcagcaaacttaaatattcttgcctgccggctctgaagagagcagtggatctcccagcacagcactcaagctctgctaagggacagactacctccttaagttggtccctgaaccccgtgcctcctgactgggagacacctcccagcaggggttgacagacacctcatataggagagctctgctggcatctggcaatgcccctctgggacgaagcttccagagtaaggaacaggcagcaatctttgctgttctgcagcctccgctggtgatacccaggcaaacagggtctggagtggacctccagccaactccagcagaccagcagcagaggggcctgactgttagaaggaaaactaacaaacaggaatagcatcaacaccaacaaaaaggacttccactcagagaccccatccaaaggtcaccaacatcaaagaccaaaggtagataaatccatgaagatgaggaaaacccagtgcaaaaatgcggaaagttccaaaaaccagaatgcctcttttcctccaaaggatcacaactccttgacagcaagggaacaaaactggatagagaatgagtttggtgaattgacagaagtaggcttcagaaggtaggtaataacaaactcctccaagctaaaggagcatgttctaactcaatgcaaggaagctaataaccttggataaagggtagaggaattgctaactacaataaccagtttagagaagaacataaatgacctgatggagctgaaaaaaacagcaccagaacttcgtgacacatacatgagtatcaatagccgaatcgatgaatcagaagaaaggatatcagagattgaagatcaacttaatgaaataaagcaagaagacaagattagagaaaaaaaaaaaacaaaagggaatgagcaaagcctccaagaaatatgggactatgtgaaaagagtgaacctacgtttgattgatgtacctgaaagtgacagggagaatggaccaaattggaaaaaactcttcaggatattacctaggagaacttccccaacctatcaagacaggccagcattccaattcaggaaatacagagatcaccacaaacatgctccccgagaagagcaaccccaagacatgtaatcgtcagatttaccaaggctgaaatgaaggaaaatatattaagggcagccagagaggtcgggttacccacaaagggaagcccatccctgttagtcttaccagcggatctctctcagacaccctgcaagccagaagagagtgggggcctatattcattaataaagaaaataattttcaacccagaatttcatatctagccaaactaagcttcaaaagcgaaggagaaaatcctttacagacaagcaaatgctgagagattttgtcaccaccaggcctgccttacaagagctcctgaagaaagcactaaatatggaaaggaacaaccagtaccaaccactacaaaagcataccaaattataaagaccattgatgctatgaagaaactgcgtcaactaatgggcaaaataaccagctaacatcgtaatgacaggatcaattcacacataacaatattaatcttaaatgtaaacaggctaaatgccccaattaaaagacacagactggcaaattggataaagaggcaagacctatcagtgtgctgtattcaggagacccatctcacatgcaagacacacataagtttgaaataaagggatggaggatgatttaccaagcaaatggaaagaaaaaaaaaagcaggagttgcaattttcatcactgataaaacagattttaaaccaacaaagataaaaaaaaaaacaaggcattacataatgataaagggatcaatgcagcaagaagagctaactgtcctaaatatatatgcacccaatacaggagcacccagattcgtaaagcaagttcttagagacctacaaagagacttagatttccacacaataacagtgggagactttaacacctcactgtcaatattagatcaacgagactgaaaattaaaaaggatattcagaaaaaaaaaaagggatattcaagagttgaactcagctctggaccaagcggacctaatagacatctacagaactctccaccccaaatcaacagaatatacattcttctcagcaccacatcgcacttattctaaaattgaccacataattggaagtaaaacactcctcagcaaactcaaaagaatggaaatcataacaaacagcccctcagaccacagtggaatcaaattagaagtcagcattgagaaactaactacaaaccgcacaactacatggaaactgaacaacctgctcctgaatgactactgggtaaataacacaattaaggcagaaataaattagttctttgaaaccaaagagaacaaagacacaatataccagaatctctgggacacagctaaagcagtgtttcaccaaatgcccacaggaggaagggggaaagatctaaaatcgacaccctaacatcacaattagaagaactagagaagcaatggcaaacaaattcaaaagctagcagaagacaagaaataactaagatcagagcagaactgaaggcgacaagagacacaaaaaacccttcaaaaaaaatcaatgaatccaggagctggtgttttggaaaagatcaacaaaatagatagaccactagcctgactaataaagaagaaaagagagaagaatcaaatagacacaataaaaaatgataaaagggagatcagcactgatcccacagaaatccaaactaccgtcagagagtgttataaacacctctacgcaaataaactagaaaatctagaagaaatggataaattcctggacacatacaccctcccaagactaaaccaggaagaagttgaattcctgaatagaccaataacaggctctgaaattgaggcaataattaatagcctagcaaccaagaaaaggaccagagggattcatagccgaattctactagaggtacaaagaggatctggtaccattccttctgaaactattccaaatgatagaaaagagggaatcctccgtaactcattttatgaggccagcatcatcctgataccaaaatctggcagagacacaacaaaaaaagaaaatttcaggtcattatcactgaggaacatcaatgcaaaatcctcaataaaagactggcaaaccgaatccagcagcacatcaaaaagcttatccaccatgatcaagttggcttcatccctgggatgcaaggcccgttcaacatatgcaaatcaataaatgtaatccatcacataaacagaaccagtgagaaaaaccacatgattatctcaatagatgcagaaaagtctttcgataaaattcaacatctcttcatgctaaaaattctcaataaactaggtattgatgagacatatctcaaaataataagacctatttgtgacaaacccacagccaatatcatactgaatgagcaaaagctggaagcattccccttgaaaaccagcacaaattattcataaactctttaaaaggatgctataacatttttaaaaatattataagcatattctaagttacaactgtgtactaggagggcaccacacatctttttttttttttttacagactttaaaaggaaaaatattgaaactaagaatttttgtttttgttttgaaaaattacaggatctcactctgtaacttaggccaagtgcagtggtgcaatcatagctcaccgcaagctccagctcccaggctcaagggatcctccctcctcagcttccccggtagctgggactacaggtgtccactgccatgcctggctaatttttttcttttttaaagtagactgggtcttgctatgttatgtaggctgaagaatattttcttttaacaatggtaaaatacccataacataaaatttaccatcttattcatttttaagtatataaactaaaaatattacaactttataaggtaaggattcaattcatacaagtcagtagacagttatatatttatctttatataccattgagaataaagccaccatgaaattgtttacatttgtttttcaggtcattacttctttttatgtggagcgtggaggaaatgctatgtccttcatgggaaaaggtgttacaaagagcacaattctttgcttgcttcacttatcccatgagatgatggcccaggctgggagcttggtgagcgcgttaaagctgtctatcttctgaacatttgcttgaaagggaatgtgctgtgtccaacacatttcaagcatataaacttgccacatgaaaatgtctcttttgacttttctttttaggtaacgtgaatgatttttgactagaatatttcttagaagttgtatattaacaaatctgaatcttatttgaaattgattcaaatgtgcatacactggaaaactacattttgtctacattatgggaaaaatagcttctgtcaaaaaattgttatgtttaactttttaaagagaaacaaatttttttgtttgccttttttggctgaataatggattaaaaccaagtctaaaatacattttcacgttgttttcattaaaaattcttgttttaaccttcctgcattttatttttagaaacttacctcaaatatttctgtttcccttttttccctctaggagtggatgtcactttggttcttgcctttgggtagtcatagtgaagaacatattcctactcaacaaggattggcttggttgattccattatgggttgatcgggacccagaggtgagtgtgaaggagaatcaagtgtattgtgtttagattaaaaaacaaatgacacggggccaggtgcggtggctcatgcctgtaatcccagcttgttgggaggctgaggtgggcagatcacgaggtcaggagattgagaccatcctggctaacacagtgaaaccccatctctactaaaaatataaaaaaattagctgggtgtggtggcaggcacctgtagtcccagctacttgggaggctgcagcaggagaatgctgtgaacttgggaggtgaagcttgcagtgagctgagattgtgccactgcactccagcctgggcaacagagcaagactccatctcaaaaaaaaaaaaaagacacaaaacatatatacatatacatagttatattatgggattattgtagtgactctaccttatgttttatttaagccctgttttagcttaggctgccataacaaaataccacagactgggtggcttagacaacagacacttcttttctcatagaagttttggaagctgaaagtccaagatcagagtgccggcatagtcaagttctggtgagggctcttcttctggcttgtagacggctgccttcttgctgtgtattcacgtggcctttccttggtccatgcatgtggggcaggggagggaggggtggtatagagacagatttgtctttttttttttattataatgttaccagtcttattgagataggaccactcccttatgatctctttaaaccttaattatctcctagaaaccctgtcttcaaatgtagtcacttgagcataaagacttcaacatatgagttttggagggacgcaattcagttcatagttttccatccctgagcccctgaacttcatgttcttcttccatgcaaaatgcttttattctccctcaacaacctcaaaagtcttaacttattcccaaatcaactgtaaagtctaaagtccaaaatctcatctaaatgtcatttaaaccacatctgggtaagtctccagatataaaccctcctgaaacagaattcttctgcaggtgtgaacctgtgaacccatacaagttatatgcttccaaaagatgatggtagaatagacattcccattccaaaagagagaaataggaaaaaaaggaagaagtgatgggtcccaagcaagtccaaagcctagcaaagcaaatttcattagatgttaatgctcaaggataatgttctttggcttgatggtgtgccttacaggcccaccagagtgacagcatctgtctagatggctctgtgggatgaccccacccctttggctgtcttcaagagccccgcccataaagctgtcttcaagggcagccatgttcctgaagcactgggcagggtcatcattctggcccacagaaatcagaggtctttgaaaccaaggaggaaaagccacccttgagtcctgtggtgggattagcagcctggggatctctgaatcattttttgggtcattcttttcattgaagaatacagtagtcctcccttatcagaggtttcattttccaaaagcaccctgaagatcagtagtagccaaaccctccctcacaatgcctacatcattcacctcacctcatctctttatgtaatcattgtatcatctcacatcaatacaagaaggctgagtgcaatacaataagatattttgagagagagaccacatttatgtattttgtattataacatattgttgtaattgttctagtttatttttagttattgttaatctcttactgtgcctaatttgtaaactttaccatagatatgtatgtgtaggagaaaacatagtagttatagggctcagcactatctgtggtttcaggcatctactgggggtcttggaatgtattccccatggataagggagggaccactgtagcacatatttgcttacagaatccaggaagtccaacagctttccttcattctctgcatctttctctgtcctctttagttcaaactggcaatgtctttgctgatataatcccatctctattcctggcttctgctgagatgtctgattaagtccatgaattgcacccgtgatctttttcttaaatgggtattcagccacaccctccatgttctctttagaacaagctttctcattttttttgcacagataggctgagaatttttcaaatcttgttcttgtttctttttgcttacccattcttaattccttctttaattcatctctctccctttgcattttgctataagcaatcaggaggaaccaagccaatttttcaacactttgcttagaaatcttctcagctaaatatccaatttcattgctcacaagttctgcctttcacaaaacactagaacatgaccacagcttaaccagttttcttgctactttataacaaggattgcctttcctcaaataaccttttttaaataacactttcctcatttttgtctgagatctcatgagaattacccatgtctacgtttctggcatccacctcaaaactcttctagcctgtaacccattacccagtgccaaagtcactttcatgtgtttaggcatttgtttcagcagcatccccactccttggtacaaaaatctgtattagtgtgctcaggcttccataacaaaataccattgtctgggtggcttaaaaacagaaatttatttcttacagttatagaggctgcaagtccaagatcagagtgtcaacatggttggtttctggtagggcactcttcctgatttacagagggccaccttctcactgtgtgctcatatgacctctccttggagcacgcacatggagaaagatttctctccttcctgaggccaccattcctagtgcagtagggtcccacccttataacctcatttaactgtaatcacctaatagctctgtctccaaatacaggttggggattagggcttcaacatacgagtcttgaggagacacagttcagtacacagcaccctcattttcaatcaaatttgttcgagtatagattgaaaatataaaagagaaaaggttatagtatctattaccttcagaagagtggaaaattattggagaagcttagcaattttgaaaaaaataaaaaggatctggaaattatagacatgcaacacttaagtgtcatataatgaaattaaattaaatgcaaaaaattgcatttgcattacaatacaaaattttgtattatttctttccagttttagccagtttacttttttcaagtaaaatatgctattacaataaaatcttatttatagaaatatttgaaatacattttttagtcacattgaacttggacttactacttgacaattttatgactgcatttttaaaaaattctatagctgtcattgaaactatatttttggattcgaattcagaaatttaccaaaacgtgtggcttgaacagcagtggttctacagcaagcatattataccacatcaatcttatttgggaacgtttttctcttgaataacttttgaggaaaatacgaaatgccttgtaaaatgataattgcctctttgtttagaagttttaagaaagttaaaatcatttatttggaagaaacaataaaaaattaagaaaggtagaacaaagaatagctaccttttttaagaatgaagaattgaaattgtgttcataaaatgtaagtgccctatgctttccttagaaaaaggcttgcaaactataatttttatgcatctttttatacccagttttactttgctttgaaatttgcttatatttaatttttcctatattactgctttcttgaatcatggaatggaggacactgtcttctataggtgtctcttataatttaggatcataaaaccaatggatttttttaaagtgtgatatttatgtaccagaaaaactaagaattcatgttaggaaaaaggcttatttgattcaacaactttctctttaatttgaacaggtgagattcacttcactgggattaggatcagcactgaccacccttgaaacgggctgtgtggccttagcaaacagttgtcagaacatttccggtgggctctggggaactgtggtgaacattcttctggaccagtcagaatgtagtatggtgcgccgggaggtatgtctgtcttttctcctttttttccttagaaattctttgtgatggtatccgtaagcgatacttgactgccgctcaacatggtggactgaccactgaccatgatctcttctgtctgtgaacacccaaacaaaatgacagtagaggatttaaaaggtattcatgcacaggaaaaactggagtccttccttccgataagataaaatcggaatatactatattttaatgtgaactttttttattatgcattgaaaggtagttcacaggaaaaattacttttatattatctcagcatttatgggtctctgatatttatgaagctttagtatagataagaggctgtcaaaataactctttgtagtatttatcatataacatgagagggaaaaataaaccctattttaattctttctgaatagcttgtggtttttttttattgctgcttttgttaaagtaatgattcatgtaaatggttttaaaacaataatcaaattgtacttagaggcttatgaaaaaaaacagcagctcctgggtccaccattagcagtcgccagttccaagctcaaaaggctagttttgttgctgtttgccttcatgtttttaagtagtgatgtttatatttatggctgcttcttgatttatcaactttaaagcttttccatcacttctagttatcatggttggaaatgtcagtttcttagaatcctcttgttaatcctgtcattctcccattatggttatttcatctttcattaagcagacaatcaatgctcctatttgtatgattatttaatttgatcatcttcaggatctagtcaagttggacatttgtggtttgtatttctagttagcaagtttttattgaaaggagtctgtataagagaagggagaaagcggggcagaggggtgcgtgtgtttgtgtgtgtgtgtgtgtgtaatctgaaaggggatagtagaaacctaaaattatatttcttaaatgctaccagaagaatttatgttatacaaatcattttttaataaagctgaattctgaaataggaaaagatatatttcctgatgaaataatttcatatgctgttaggtcattacctaacaaggtcattacctaagaaggtcatcacctaacaagaaatacagtttgacaattctcataatgacctctcagcatgtgcagttgaccagagatgtcttttgctattaattacaatatattggttatttcagagatgaccacaagatggcagtattgacctttttttttttttttttttttttttttttttttttttttacattttcaggcggcatttattcttcagaatctccttgtaattccaatgcctacagaaattataaaggattatacttggcaggtgggtgattttaaacaattatcaacctagtagatgtttcaaattaattggtgataaattttcagtataagtagtatatttcattattgatgaaactatatacaagacagcaagggcctcttaaaatagaacgtagaatttgttcttatgccgaccagacttaaaaattcttctctatagtgttcacaataatttaaagcaaataataatagttaacatatgtttactatgttttaggcacccttctagaaatgtaagacatagtaacttgtataattgtttgagttgtgaactgttactatccttattttctaagcttaggaacttttgcatagagagtttaaatagtttgtcctaaatcacacagctagtcagtggtacgcctttgctttgagtctaggcagtctcttacccactttgctgtattacttctctaatttagtaataataaacaaatttgtagatagttaaatatgtgttgatgttaacatctttttttccttttctaggttagtgcacagtgcgggttatagtgtatcttgctttgttttctgttgggttaactttctttttcatgttctgaatatcacatcagtaaatggttacctaacatttttatagcttacattaaaaaaattctagcttcatgggatatatgtacatgtttgttacataagtatattgcgtaatggtggtggggattggggttctcgtgtactcattacccaaatattgaacattgtacccagttaggtaatttataacctcagccgcctcccccactccctccttgggagtctcagtgtctgttatgtctgtctttatgtccatgtgtattcattggttagctcccacttatacgtgagaacacgcaatatttgattttctatttttgagttagttcacttagataatggcctccacctccatccatgttgctgcagttttaggtaatttggaagatacaaaagtacacttattggggatataagatgtgctgtttctgtccttttacctatccatatattttcaccttatagggatatatttatcatattgctacacctcactcctcaaaatcctgtataaatctaaggtttatttttaagttttaattagactatactcttagaggagttagtgaaacaagctgaaccgtagcaagggcaagtttccgcacatgacccgaagcatgaatccaggtggttgtcaaggcccaggtagcatttaactcttggaaggcttacctctccaaactttacaaacccagggtaaccctaccagtcattgtaaatcccaggcttgtaatttgctcgtaatttctttaacattgccttctgataatggctgcttatctactttccatgttgtaataaaaccaggagacaaaactggagggaatatgcaggattaatagttatattaatagtgtagtagttttggtacctgttatccggagactacattttaaaacatgttgtttttggctcaaatacaaataatctctactcccattgttaaactagtgacccatgtacatggatatacttggtgatgtactaccaatgaatttttaattattgaaataagtataaaggcagagtatattaaagttcctgggacattatgttgtaatacagaaccgtatgtagctgttcatatttttctcttagaaattaaatagtaaagttcctgtttgttgctggtggcatgcttactgcagtttattggttttgttattctccagtcttcatcatggaaatccttttctactaaaaagtggaaaatagtgatttaagttagcttttggagttttggccttgctaagttggccaaaataaaaaaagttggagagccactgctgtcccaaacaatagttgattacaacttttgctagtcttaggaaaaattagataaataaggacaatcttgtatgctttttaataaactcagattttcttcctctcttttcagtctttttttttttttggttatttttgtttgtgtaagtgtccttccttggcagtgaaaatagttaactcagtatatctgtcatccaattttaagaaagtttagtggggtctgaaattccaaagtagaaacagcttctgcaagaaggaaacaagatggttgtctctgggtgcagctagtggggcacatggtcctttgcaaccatgaaaaaggggccacatagccagtattttaaaattcaaacagtctttggtagaattatgaataataatcttattcaacaaaatgtttcatttacttattttagtgtccctttcatagtgttgtggaggatatagcatgaaacagcatgtttaggagctttgttaaaattttattttggttgaggtaaatatttgattttttttttttaacaaagagaattgcttctattgctttgcactttgttttcctgcctgcagtctaaattaatgcccgctagtgctcttgtttcataggctttctgaagcattctctttataattactactccttttcctctccttcctctgcacagtagcataaattcctacttcatgtcatgacatagaattgttgtacttgtgaatagtaataatatgcatatatgaattatgaataatattatagctgagtttcccttttattgttagatgccagaaagtagagcccttttatcaattgtgactttttctgtatgtacttaaaaaaaaaaaaagatggggtctcactgtgttgtccaggctggccttgagttcctgggctcaagtgatacgcttgcctcagcctcctgagtagctgggaccccaggcacatgctgccacacccagcttaccttctaagctttattcatggttgcactttttccatatctctggcttttttctttcttttattcctgatatgcatttactatcatgttacaatttacctttccttgtaatgggccttaaatcttttctcggacaagataggaagtaaataatttaaaacaatttatttttttaaagtattaaataattttaccaaccactgcaattcccattttaatcttccttttaaagacactaacatttaatgtcttaccactaaattaggttattttccatatttgcattatttcttaccatttaacttaatcttcctgtgtagaatgtttgtttctgacaggactacattttttatattttaaaaaatgtttctcccaacccctaccacagagaaagtaagtgctccatctgtcttgactgattcattaaaatgtgcaaaacatttgagttatccttttggtcttaatatcataagtaaatacagttagaaataaagccttaattttcatagcataagtccccttttatttttctgtggatgcagaagcatactggaagtggggtggtcaccaagaggaggagcagatgaagtatctcggcctgtcttcccttgacatctagcactcctaccaggggccttgataccaggcccctgctggatatgagaacccagttcctgctgtgtcagtctttggtgtgtcacagctcttttatattcaggacactaacttttcagagggatatttacaaacattggtcttgttcttgagtcaaactcagcctcattcaaagctacatcccagctgggtgtggtggctcatgcctgtaatcccaacacttggggaggctgaggtgagaggatcacttgagcccaggagtttgagactagcctgggcaacatagtgagaccccatctctaaaaaaaattttaaaaattggcctggaatggtggcatgcacctgtagtccctagctactcaggagactgaggcaggaggattgcttgagcccaggagtttgaggccacagtaagctatgattgtgtcactgtgctgcagcctgggtgacagaacaaaaccctgtctctaaaaacaaaaaccctgcatactacattctctgccaagaagagaaaacagagccaatattcagttgacacgaaactgtattgtggctcccaactgtccagtgtttttcagaccagtttcccacagtctgactaggagttaagactcctgaatgtggatggtttcataactgggtttagtttgaagactagtgtcagaaatccgtatccctgaaactttaacaaccaattttagagttgattataacaagaaatctattgattagagatggattattgatgtaattttctcagttcatttctgtaaacatttgttgagtgtctaaatattggagattcacagataatccaatttagtattcttgggcttatggcctacaggggatgacatgtacccaggaaacattgttataatcatgttatgtatgatgatggtagcttatgcataattttaataatatttcagttctttccacttgaaaatgatctcacatttaaatgtaaagggtaatttcatgcacttaaataacataatgggttgtcagtttgtgatttaaataaacttgttcatgctctagttgctttccatgtttgtgacaggactttgaattggtacacagactttttaaactttattttgaaaaaacttagatttataggaaatttgtagaaacaatacaatttttatgtactcttcacccagattccccaaatgttattttacacatttacttcagctctgtctagtgtcttctttctaaactattggagagttgtagacataatgcttcttttcctctgaacacttaagtgtggatttcctaaaaataaggatatcctcttacataatcacaataataattatcataattaggagattactcaaggattttcagttgtcccactgctgtttttaatagaaaaaaaagaaaaaaaaatccaatcctggatccaagatccagctcaggaatacacattgcatatacttgtcttacatatttgctttcgttcatctgaaatagtttcaaaattttaaatatttatgatcttaacatttttgaagaatgcaggctacttatttgttgtaatatacttcaattagatttgtccttttccccaggtttagatttgagttacgcatttttggcagaaaaaccatagaagtgatgggttctcagtgcaacatgtcaagagatattatatctctctttcccattgttggtgatactaactttgattacttagtaaagatagaatctgcctgttttgtcctttgtaaagttacagttttttcttttggaaggaggtgctctgagactgtaaatatctgtttctcatcaaactttctttcactagttttttgttttgttttgttttacttttttttcccccataggttattggggaacaggtggtgtttgattacatgagtaagttctttagtggtgatttgtgagattttggtgtacccatcacctcagcagtatacactgcacacagtttgtatcttttatccctcaccccttcccacccttttccctcaagtccccaaagtccgttgtgtcattcttaagcccttgcatcctcatagcatagctcccgcttatgagtgagaacatttgatgtttggttttccattcctgacttacttcacttagaataatagtctccaatctcatccagatcactgcgaataccattaattcattcctttttatggctgagtagtattccatagtgtgtgtgtgtgtgtgtgtgtgtgtgtgtgtgtgtgtgtgtgtgataccacacacaccagtttatccactcattggtggatgggcatttgaattggttctacatttttgcaattgcaaattgtgctgctataaacatgtgtgtgcaagtatcttttttgtataatgacttcttttcctctgggtagatacccagtagtgggattgctgaatcccactggtagttctacttttagttctttaagaaatctccacactgttttcctagttttaaattccattcatgattcttacctgaaacagttattacagaattgttgccaaatgatttcctaactccatcatttctttctatgtttattacatgctactgtaaggaagaacttttcattcttccttgcttatttagtgattcacttatttacaccagcatggattgaagattcttaagtttgtttaatgggctataatctgtttctatcattatttgtttcaatgttcaaatcattcttgctttggccaggggaaatttcttcataatggttcttgtgtctttatcaatatttgagccatttccttacttctggtacagcaaagtgttctagactgtccagctccatcctggaatcagatatttgctccaagggctctgatttcttttcatggagaatggtatttagaaaccaagatctgcgttctagatgtattcattgttcctggggtgtcattgcttctatgtcctgtgagtgaacaaagctagtaattgtctgtgtatatgttttaaatagtcagctcatttatagttatatattattttgatatttgatatgattaatatgtattatttttatcttttgtttgttatgaagcatcatgagtatttccagaagacaatgagtacttggtaaactgatatcattgtaatgatattcatattttacatgtagttttggatttctaatgtatttagggtcatttttacagtctttggattatagcatttttgttatatatgacaataattcatttttctccttgaaaatattatatcttcttaaatgttattcttactttgcttctagtaccttttcaattatagctaatgggtatattagcactgacactaggagtataatatgcattttaaaattagtattctgatttattgcattcttgataaagatgttttcaaattaattggagcttgatatgacataattaatttgcagttttctttgtaaatgtatttgtaatggcattctggtgatttgaagagctttcttactttccttctcagctctctctggcaattcagcagacgatctggcagccccagaactcacctgagggcaaggctagtcatgatacagaagtcttgagacagagcaattagacctgattgctctaatttccccactatgctagaagataaccccatcaattactgatggatgtatggagcagagcctagtgtgtgcatgaaagacttcattgttctggcccttgaaccattagttatctgtgaaagcctgagcctggccatcctttgtgcatatcctgggcttggctccattataaagctctcttaataagtgtagagaatggggattcaggcttaatgcttagttaaataaaaaataaaataatttttatgtaatatgtgcctatttcagattactcggttttcttttgagcagttcaagaatattttgaatgcactaattgaactttttagaagaaatttttttttcaagtaataaatacatatggttaaaaaaaagctaatagagcttatagtgaaattcactgtccctctccattcactgagacagttttacctctgattttaattcttcagggagttaccactgtatatctaaatagcatgtttgcaataatatatttattcatacactactttagtacctaaggatttagctcatgtacacaatttcctgcagataccacagtatctcatagtaccatagtggtattactgctcttatttctccactggtcacacttgctcttcctggttttgtcacccatgcatcatatcttttgaccccaacccattttgagatgagtaagacatggctgagattgtacctgtcctttcttcagtctttcctctgccgtttctaatacccatctttaatagttttatttttactttttgctttgtgagcgttgattatgtttacattctcatctgcagtctcaattttatctgtaggttgcttctaaaagttgaaaaccgtaactcactacagagacacttagtgggctgtgattacactttcttatctcggcttccaggaccaactcatctaatactcagaggaaaagttttctggtatttgtatgtatgtatacatgtatatgtgtgtgtgtatatatgtatatataaaaatataatttaaaaattgatttgggtgatttattttcccttgaggttcctgtttgttttttcttacattgtgggtccatatcatgtctcatgtctaaagtttttctaagctcttaatcatcctttctcttctgttagaatttcttttcctagtcataattctcaaaatgattgtagtggtaactagtgacaagtgcatgagagataaatatcacaagttcttgcatatttgaaaatgtctttaaattgcactggattgatagtgtggttagttaccatatgtttggtgaagattgttcctcccaagaattttgcttcactgtattctagcatccagtgctactgatgagaagttgaattttcatctgactctttttacttctttatggctgatgttttctttcattatcatctctttgtcctcaatgtttagaatttttttattatgtaccttttttccatttttcttgcttgacatttattaagctccttaatttgaagatttggatcttctatatatttttttggctctgacaaatcttttcatatttatttcttttaagatgaatttcctttttttgtgtgttatattttatctttccagaaattgtaagtcccttattaggcctcttgaatttattttctctgatttccttttgtatttctatatcttaaacctttttgcactattttctatgatattaaattttttgttcataagctaaattagcttcttcaatcttggtaggctaaataatttttaccatgatttataaacagaggaaaaatagaacagattctaaactttatttgatagatttagttataaatttgtgtctcttattatgactttcttacctatattttctaagtctgtgtttatattaataggaactagaaaagaatttttaatttattgaagggaaaatgtgattaaactaggttctttatcactgtgacaattttacatatttagagaataattgcaagagttctaataccatatttacatgtgtaacttctcacttctaaaatacttaaaaactaaagaaatgttagattttagaagacagtgggtttgtaactcttgtcttcctaacagttggtatggccatcagcctcagtaggccttgaacagaataaagaatcagcagatttaagatctctcaaagagctgtagatgtcatttttttctgtttttaagatttatacagtttacattctcttctctattttcattaaaggtttgtgaattttgggttgtggtaactgatagaggaagcattcatgtagacataattttgcaaaaatatgaaaaattgcataattttatataatctgtatggcaaaatatttttaagtggttctttgtatcattataaaatatattttgaaaactagtttttgtacaactttgattaatcacttttgatttattgaattttttagatggagtgaagctagtaaaccctctacaattcttgtcttatttgttaattccttccctatattattataatgaggactctaatttgtgatgttaagcagtttattgcaaatctcttgggtgtttggcgtgttttgtacgtttaagtatgttataacttgcttaaaagatagaatttcttgaagctgtgaatgttaagattgactgtgattttgggtgaatacttcattctatataataaaataaggtaatgtattaaagggcgccagtacctgtaacatataccttggttaataaacaggagccacataaccccattcactttgtattactctctattttacctgattcttctagacctctgcatttaaaataacgacagtgaccaccatgtgctggctgttcattacagtagtcttatttcttatataaattgctctgtttaggacgagtaagctcacagtgttggtagatttattacaacacagcagtaacaacttcatagtcataaaagacattgaatattgaagaggtttaattataatgatgtatataaatgtccttaaaaagaagtgttaatagaaataaccttgttagtgtaatcgtgcctttaacttgtgaattcctttgtcttcctgaagagtaagttaaaatatccatcttcttttggtgatggggagggtgagagaacagacacacatacaaatcttatggttaaaggtcaacttgcaatatgttttgaacgtatctttcctgttggctcttagatttctgtttgctatcttttatttttctctctcttatggcctgttttgaaatcttaactttattatcatttcccagaaaatagaaatatttataaactaatggtaggattatttgcaaacttcaaaccaatcctcattgcttgctttttgctattagatactccaggaaaagtagtaagtcacaatgcaaaaaattgtttgggaaaaatgcaaagagaaaaattgtgtaatagcagattcttttcagcctcctggtggcagttcatgtgtgtgtatgtatacatgtgtgtgttttttttccttgtcaggattaattcagtgggaagtaatgtgacagattttgccatatggatattgatggaccttttcattttacctggcttagtgataggtataaaaaataattctgaacataatatatggaccaccttatttcatatattttaacacctattattttactattatatgtaggttgaaaaatactgcttttattgtgtttttggtgcaagtatatgatttcttggttaaagctgatcattccatagaaacattttaaatgaaatggcccctcaagagaaagatcagctttgtcccttcacgggggtgtttaggcagcaaagacctagagtattatggaataatttgtcctaggtcaggctgctataactgtgtaaggacaaaagcagagtggaaggagatgggagcatctgggacccatttgtttcctcgagaggagacaatggatctttttaaggaaattgttggataaatcagtgtctcctccttctttccctctcttcctacagggtccctgtgttcatgatgaggactctggcctatcgctcattggaaaacctgcccttcaggctcttttatatcactgccatttttatgaacatttgaatcagatggtaaagcattgttacctaggacggtgtatgtttgatttgaatttttctgcttttgatagaaattcagaaagcaatgatttaaatggtaagtacgatatctttgtatttttatttttgtaatatgtaacttgtaaaaactgttaaaaatacatatatttgttttaaaaatttgaaaaatgaaagtatacagggaaaacattcatttccagttctaccacccagagagatgtattttcttcccgtcttctttctctgtatagcctttgtttgttttatgtaattatgttcatatcttgtgtacatttttgtatttccttctttcactaaatattctgcaagcatttttctatgttataaattcttcatggaaattatttttgacatcttattaatactttataagttatgcccatcagtacagttttatagtttctttctctgttaacgtctcaaacttttttggaactttcacttctaggcaatgtacagtttttttatccttcttgtgaatgagactttttcccactatattttctaattcattttgctcatgtatcaaaaagttatttattttagtatgttacttatttgtcacaatattttcctgaaacctttttattccttttgtttgtaggttcttgtagatttgctaagtataagatctgagcacataaaaataattatatcttgtaataaatagtaatttaataatataaatagcttttatttttaaattcatttttataataattttttagaatcttgccatagtttcaaacttacagaaaagcttcaggaatagtacaaaagaattctcaaatgttaacattttacagtatttacatcttgccacatgtgtgtgtatgtgtgtataaataaacggatatgtatgatctatatatactctttttgagccatttaagagtaagttgaagacatgaagttcctttatccccgaattattaagtgtgaatgtgtgattcacttttctgtttacttcttggaagaatcaagaaaatgagatttgatgaagttttgaacattttaaatatccctcttagaaaagtgactcacttaattgtttagatttctctggatcagttacttagagcatggcccttaaactaacagcattggcatcttctgtgaacttgttagaagtgaacactcagggcttccactctgacctggggtattggagcctctggggctggggctgaagcagctgctttagcaagctctcagtgattcttatgcacattaaaaaaaaactctccttagatttttttttttttaaatagtggtctatctcagaagccagatccatataagttttttcctttctttagttttgaattggtttcctgtaatgcgtacccttttaattaattgttacagttcctaggagggtgtccatgttaacaattttctcgttgttgcaggtttagatgactcattcaagttttggagggctccatctaggacaagtcaggatcgagatccaagttctctctccacctcagaaacaacggtacttgcaaagaatgcataagtcctttattttgaatctctgaaaaaatttgagtttgcctagtgggagagttaagaatacaaagtgtaaggttataacagctatgatttattcgaagtgctttctgcagaattttgctaaattattgtattcaagctgcacatcagtcatacattatagatacttatcttgcttttctgtgtgcgcaagccactctgaagtaaagtaactttgtgatcattagtgctataggtagcagaactggagtttgaaccagggtgtgtcttgctacggtatagctacactgaatatccctttagttgagaattttcaacctctctttcctaccttttttgatagtacgaaagtgtgaaaatatgtttttcgttagtattagaagagaacaaatcctacatgttaaaaatggttgattaccctgaaattgtgcttaagggcagggcaatatgaagaacattcaaatgattctagtgtggtgctgacagctttaaacacacttctaaatacttgcatcacatagaagtttatctggaatacctgaaatttatatatgcctgtttgcatgccttctttccttcccctttcattcatgcattagttgctttttttgcagaaaagtttgaaacactgagtatttataaggaatgattgatactaggtttcagttatttacaaacatacagaatcatttattctcaactgggaaatgttacttttaattttaaagtgtttttgaaataattagtgtattatacaacatatcaggaagggaaagatttgatacacctgtttccaggaacaaaaataatatgagaataataattatacagacattataatgtaaagattatgtttaatctatctcctagtttctcaaaagactgatactttttgctacagttttaagtctttttttccctagattcaagagaagtatttgtgtttagtgctacattggacctttgtatggaaaagtaagataattacccgagttccactagatgtcatgctttcctttccaaggtggagatagtgtgtacctttgtctcaacaagagcagtaatatgataaatgccaaactgaattgtcttaattggttatttagttcacagaaggacagcatgaaagtgtgcttaaaagtaaattttgtttgttagcctatttgtcaaaagggctatagactagccttgaaatctttgtacatatttcagtttttttgcttttagtaggtactcagtaaataataattgctctaattaactttgagttatcttagctattttgtggtgagcactgaagtcatatttatcctatacaagaaaacctaaatacaaaaagcaaaagcatatcaaccttttgaatttctctattttgtaataacatttaatcttacaggttagaatactagattttctgagaaaatttggaaatatgttattaattgtagtcattattaaagaaagaagcaccccaattaaagtgaaggtctttaacttgtttgtgtttgaatgtaacacagacttttagaaatatataccaatggaatcttttcagtttttttaaaagaattttgtaatatgtgtaaaatttatttcttattattttctctaaaggctagtgtattctgttagaatttttacagaatttactttttactttctttttcgggaggtttccaaacaacttttagaatgggtgacttttagttacaaaaatagtcttcgtaccctaattctactagttatattttctttaccatacccaagatgatgtgtatctttgtcccaacaggagaaaaatctggagagtgttttcattctgccagtgttactttaaaccaaagctgtcagtacttcgaccaaggcatactttcttatgtataaaaaaatgttgaagttacaaattgaggtataagttgagtggatgtaaatcttattaatcagcttatctgcttatttatatctttgttttgtttatctcagaattgagaaaaaatgcaatcctttattggttagttggctggtttttccattttatctttccaaggaaagcatcatcttttgatttgggtcatgtcatccagcatgctctcctgggttactatccattttgtgctgttaatgccaagttagggactttcatgctgttacctaatgtgtattagttccgttgtttggcaagcttcgtaaggattgttgggtcctgtatgtttgataaactgcagatagagtaagcagagtgtcattgttagctttggggcatcgcccttgtaaatgcttcctcaggagtggcctctatcgaactcaatattctcctcctctggggtaggaggatgcagccattaggtggtgtttttcttctcgaaatcacgtttatatccaagatggatagctgtttgtgcctcttacacacctgtgtgcagcaacagctttatgaccaaaatttggtctcttctgttgttcctgagcagaactatgtctgtatttttttaaatttatcaattgtcaaaataaaatatgtgggaaatataattcctttctttttgagcctttctttgtgaaatatgtgatctttcaaacttttttctggaacacagatttaaagaaaactgattttagtttttctaaacatttaaagagaatttttacacttcatagtcttaaaacaactgaaaagcattgttactattttgcaaaagaggaaattagggcatggagtgaggtcccactccatggagtgcatgcttgttcaagttcctagcatggtaactggtagaccattcttttgagtccagaagtatgtttgcttcctccttcactctaaggccagatgtgattgatcccataaaagatggtgtagtcaagggacagtgaggtttctttagagggaaagatgaaatgaaaagtggttttgtgtaggaagtggccactgaaatgggctttacaatattatccccttctcttttatatgcatacaaacatttgcaagggactgaaaagattcaaatattccttaggattcagtgaccacttaacaaatgacaaaagtctacttgagaacataaagcatacttagactttctaactaaatatgaagttgtgttgtactgaaggcattaacattcagaaaatgcaagaggttgtttggagtagaatgtgggacggaaagctaaagtttgatgacctgactaatcagataggagttagttaagaaagctgaatcagcttttggatttgaagaggtaagatataagagctataaagataaagatgtaaggatatttcagcagcatggaatggcatgaaacattacaactgatatgagagaaataacgtattgacactcatttgatggtagttaaaattgttttatagaaggaagagtagacagaggatagtttaagcagggatggatccaagaggctttctaaaagaaaaatagttttgacataggcatcactgataggacatacaaatacctccagcatggtgaccccaggaaaacttgaggaggtggtagtttgtgtgatgatggagagagaaagaaaatgttatactctgtttaaataaatttcagctacctgtggattatccagagtctaacaacctcttatatttagttaggaggaaaatacaagtgagacaagctcttggaaatttgtgctcttagattacacacaggatggcacaggaactgtgactgtgttgtggtgatgatctgtctctttaagtggtcctttggttagacatgcaagaatcgtctatcatcttctgctcattccttcagaggacttttctgagctttcttttttttacatatattgtacataatccatttgaattatgaatctattagttgaaataatttaaacttcttgttataatttggttagaattaatgattacaaattgagaagcatgccaaagctttcctgctcctgggcatatagagaaaggtattatttattaaaatgaacacatgaagcttagaatctcttagaaacccttcatatcttatatttttccatgttttcaaaatgtggctagacttgtactttatttttttcacactacaatccttattttctccctttgtacctttttaaaaacaattaaataaacttttttggcaccagtactgcttttgagggaagttgatggaactattacaagatcattttggcaaatacaatattcaagttctgaattaactttcaaaaaaagttaaagtgtctagtgaaatcacttgcttctgtaaggcagatacaaagaaaatcatttttgtacattgatgcatttttgcttatatgacagaaattgttttttacattccagttctacttggatatggcaaatgactctgctattttcagtgatttcaaagggactttcttaattttagctgcttattttacactgaagcataatttagaaaccttctttagttaccaaatctgcttacaaacacactgaagaacaatttttttcagtttttataagcaagatttgagtccattttatttttttattttcccctagttttgagctaaaatgacaaataaaattgtatatatttgagatatacagtgagattacttgacatatgtatatgtgatgaaatgattaccacagtcaaattagttaacacatctgtcacctaagagtcaaccttttttttttgtggtgagaacacttaagaactactctctttcaagtagactgtgcagtgttattaaccatattaaccatattcaccatgctacacattagaccatattaaccatattcaccatgctacacattagatccccagaacatactcatcttatctgaaagtttgcactctttgaccaaacatctccccttttccccagctcctatcccctagcaacatccattacactaatctgagtctgttttaggacagtacctttaagtagcatcagcctgctctaaaaagcttgtattgtcttttgtaatatctgtaaagtaataaggctagaaatatattcaaattcagatttttttgtcttaccgagggattataaattgaagatctcaggatatgtcatgtggcagatgtgaaagcgagggaaaagtctagattgtgattttgcacttagaccattctaatgaattgagcaagtgatagatacaagaattagactctcgctgttgtaagaggacaaccctagttatcctacttactgtgaggtacagagcagagcagcgagaagcttgacaggaacggatgacttcagcagactaagtttgctcttaaactaagccaattcctcctccttcacctgggatggggcagctgaagttagtctagctgaagttccgcggggacacagggggatcagggagaaagaagcaagcctctcctcgcaaacaaggccagccagctttctcaagaggtacgtctgaggacttcctctgattctaacgaatttatgctgtcatgaatgcagttctggactgagaatcctagtctcaactcagacaaatcccttaacttgtggtccttttctctaaatgaggacgtggactaggtcaggctttttgtacctatagcttcgtaggctcatactgcaccttccagtagctaatacttaatgccaaaattgtctagttattacttggattttaaggtgaaaagtaacatgtttacatatcgatgtactttatcaaatgtaaccaaatactatcgattggagattatatctaaacaagcaaagatttgagcatagaactgggacaatttgctttaatacttttttgcttttagttattaaaatagcaatatattagtttagcacacttaaaaaatagaggctagtagaaatataaatcatccataatcaattttaaagcaccatataaagcaatcattgtgtttccccaaccacatggggtaagttataatacaataaggtactttctaaaagcatcttttctaaacttgtgtatcccttctgtggactatactaaggaaaatcacatctttattaatgcctgacctttgtcatgaatcacaactttgctttcttctaatgagccaggtatttagtgggcccttataagctttcttttcccacaccgatcgttgaaaccgcaaaccaggtacctattctatttatatcagtaataaggccttcttgagtctttatcagttgaaagaatgttcagtgaaatgataaaggatttcagcatcattatccccttaacttttcttatacaaccaaaagagttgtggcaggagccagatatattagcttgtgcatagtttgtgatatcagtcttggcataggattattttcttcacagaactataaatgttgtcttgatatctgttgacaggaacattttttcacatatctctcattgccaaattgtaggcaaatatatttttaaaaataaacaagcttgctgggcgcggtggctcacgcctgtaatcccagcactttgggaggcagaggcgggcggatcacgaggtcaggagatcgagaccatcctggctaacacagtgaaaccctgcctctactaaaaatacaaaaaattagccgggcgtggtggcgggcgcctgtagtcccagctactcgggaggctgaggcaggagaatggcgtgaacccgggaggcggagcttgcagtgagccgagatcgtgccactgcactccagcctgggcaacagagtgagactccgtctcaaaaaaaaaaaaaataaacaagctttaggttatttttacttagtatctggatctaatactatataaaataaggcatttgatgtttgtttatgattgacttatttagactgaacttttttccagatttactttttagattatgtgcttagcctacattttttagctgcagctttctcacttatttcttggcatcatgactgttatacttacttaatgtggtgaaagatggttaagggctcaagttaaaagggggatttaaaaaactgtatattccatttttagtaatttcttcaaatttatattctctttactattagaaactgcaaatgaaaataaccttagtttttgctttcatttcatcatggtaattctaaggtactctaagtgttaagatatatacacaatcaatgtacaaatactgtgagctatataggatctgagtctggaatgatggtttataacttctatggatagctaatgttgtgttgcatgtactgatatggaggctacccaggtatgggcacttcatgttacttcacagaagagaaattgatggtaaggaaaagagttatctgacctcaccacataagtgtttttcaactaagaggtgcttagttgaacacctcttagcgcaaacacatcactttgcgctttttcagtcttagaaggtcggtctgctcattataaacctgtaggtgaaattgtacttgctttccacggattttgttatatttaatgttgtattctgaagcaatctcagcaaactggcacaattttttagtgttcttccttgataggaggtgaggtagagaaaaatcttttaatacttctaattttttaggcactattaaaatttatatgtgccatttggaacattaaaaatatctttattgtcaatcaagaaatgcaaaatatcacaataaattatagttaaggtggtatattttagcctttctaacatttgggcaatgagggaattggccttatgggaaccttaaactcctaaatgggcctgaagtcaatactgctcctttgagttactgatttatgtaaatgataacaattcctttaagaagtggaaatgccatttaaaaaaactgctgtaactcccaagatatggaatcttttctagttatcctaactagtataattttgtcttaaacctccttgtttaaggatatcttgtgtgtatgttgcctgtgtttcattttccgtactgtaacattaataagtaaaataatttactgattcataggtggcaccttcattggggagtactgaatttcagccacttgtgcagtcaacaacacttctacctgaagcctcccatgaccagtttgtggctcaaggtatccttttagtgaagacattctaccttcaaaaagaaaaatgacaagttggtccagacagatattttgaaagtaaatgtctaaagaacaaaattttaatgaaataagttgtagaccattatgaaatacatttagaaccaatatatcagaaattaataaaataaatgctcttaactaataaatggaatttggctcttaaataaatagtccaattcctgtgtggctccttattaggcgctcgtaggtatttgacatttgaatttgggaactgatgggtataacttaactttattttttcccttcttttgagaaaacactttgctacaagtaatccacttgaaagtaaagcgattctggttttaagtattttctaaggctatgcttccatttaaaggcacataaaatgtattgagtctttattttattagaaatgcacaatatacaacttgggacttatttttattaatggcaatatataaattttgctccttgtgctgggaactgcttccaaccctgctgtgcttcaaatttgcaactttgctttttttttttttttttaaattctagagagtatataagccttattcagtagcattaaatttttgacttgaaaggactatactatctaaaaagaaagtaattttaaacactggcatacatataagtatatgcagaaaaaatactttctgaaacatttagaaaaacttgctgaattaaaactttgaactttcattacaatatttgttccaataatttcctaaacagtgttccatattggtttttagtaattcatgttcactatatataaaattatttaactgtagaaaatactcatttgatcttcttaagaacaaaaggagcaaactcagattatttaaatggctcaggacatagggcatgaaatgaaattcgatcatgaatttcatgaacatttatctctaaaagcatgttgccttactctgatttttaacatctttattgagatataattcacataccatataattcacttgtttaaagtgtatactttattggttttaagtatattcagagttgtgcaaccgtcaccacgatcaattttaggatatttccatcatcttgcaaaaaaaccctatacccattagcagtcactccctgtctcccccattcttggcactctacggaatcactaatctactttccttctttatagatttgcccgttttggacattttgtatgaatggaatcatataacatggtcttgtgtgactggcttctttcacttagtgtgctgttttcaaggttcatccatgttctagcatgtatcagaacttcatttatttattgacaaataatattccactgtatgaatatattacagttacccattcatcacgtgatataggcatttgtgtggatatacaggctttctgttttttgtttggattacctttgattttaaatttattttattttcaagtattaacgctttttttttttttttttttttttggaggcagtctcactctgttgcccaggctggagtgcagtggcgcaatcttggctcagtgcagcctctgcctcctgggttcaggagattcttctgcctcagcctcctgagtagctgggattacagaggtgtgccggtacacctgcctaatttttgtatttttagtagagcttgggtttcatcatgttgcccaggctggtctctaacccctgacctcagatgatccacctgccttggcctcccaaagtgctgggattacagacatgagccaccatgcccgtccacaaatagtatgctttcaatgtatatttatgcaattttactctttgccaatcatttcagcacatatatatgaccaaaaaaaaaaaaaaaagcatataaaagaaagaatacccacagaaaggggaggcatgaacagaggatgaatcctcacaattttttggtgatatatgacactatcaggtatattccttttttttcaaaacttggaaataagagatcagggtgtcaaatgtcctccttagttttacaaaataaattagcaagaaaattgaaaaaatatgtatcaatttatattctgaactagctctctttacagaaaaattcaaaaaaggtttctatatatgcttgctctagaagtgctgaagatatgtaatacatattttatgaatactgaaagatttcccttgaaattgtttggacaattttcattagaattatctcaatttaattttttccatttttatttccaaagatttatcattattttttaagagacagggtctagctctgtcacccaggctggagtgcagtggcatggtcatagctcattgtagtctcgaacacctggactcaagtaatcctcctgtctcagtttcccaagtggctgggattacaggcgtaatatttgaggggaaaagaacacaaactctcatgtaaaaatgagcagaaaacatgaaaagataattcacaaaggacctaaaagtagcctttatctttggaaaaatattatacaaattaatactacccgaagatacttttttatttattaaattgccaacaattaagtattggcagtacattcttttggcgaggctgtggaaaataagcactttcatacattgttagagaaaatgcaaattagtataattttggaagggaatttggcaatagataacaaaactatgtatttacctttgattaaacaattccacttctaggaattctcttttatttatctccagcaatataaaaatacatatgtacttgataatttagcaagcattgtttgtaattataaaacatggaaacaacacaaatgcctgtaagtagaaggatagtttttgatagatatataacaatatatagataatgataaacatataacaaaattacttataaataaaatttatttttaaaataacaatggagaactacagctattagaaagagggggctgggcacagcagctcacaccaataatcctagaacttttggaggctgaggtgggagatacttttcacgatagtgagactgtatctctacaaaatataaaataaattagccaggcatggtggcacacacctgtggtctcagctactcaggaggctgaggtgggaggagcacttgagcccaggctttgaggcttcagtgagccatgattgcaccagactccagcctgggcaacagtgagaccatttctccaaaaacgaaaaaaaaaaaaaaaaaaagaggggaggatatcttcaaacagatatggaccaaattttaggaaatattgtcaagtgaagaaagaagcacaatgataaagagtatttatagtttatgatatttacagttttctacttttgcatatgaaagaaggggaaatttaaaatacgtgtatctatttgtgtagaaagaaaacaggaaggaacagctggaaatgaatgagattaattatgagaatgggtgggagttagttaggaaataagagaggatgggaacagtgtagaagagattgaggggtgggatagtgacccttctctgcatgtatcttcttgtataggttgacttttataaccatgtatgttttacttgctgaaaaaaataaaatcaacaaaaatgggaaacaataacatggaatacaaaccaattaatccagctacatttcacatgaatagcattgaagtgagagaggaagtaaccccagtaactctcagacatatttttaggactttagtcctcagactattggcaaaatgaactgtaaccaagcattgaactctagttactagttttattttttgcagtattattagttagaaattctgaaactacttattgtgttcataaggcaaggcaaataagtaaatatattgtagacaatgaaagccagaatttttactttcacataacggaaattacaaatatggaagggaaggaagatgtttaatgttggattatatttggagtgttggattatatttggagctttcagtatgaatcaattattttgttttttaagagatgaggtctcattctgtcatccaggctggaggacagtgctgtgatcatagttcactgcagttgccacctcctgggctcaagcgatcctcccacctcatcccgagtagccaggattaaaggaatgtgccgccatgcctggttcatttttaaatctttttgtagagataggtttctgtatgttgctcaggctgatcttgaactccttgcctaaagtgatcctcctaccccagcctcacaaaattctggaattacaggcaaattaatgatttttaattcgtagataaaatatgtttatgtgcccaggggtatgtatgtgcatgcatacgtatatacacacacgttttctagcttagaaacaatgacactctaaatagcaatgtatacatttagtgcccaaatcttgctttccaaactccattctccactttagggaatcgacactttggaacaaatatccaattttagagcttggacgaggaaagaacaagatgaacctggaacatcttgctgtgccagaaagtaagggaatgctcaaaggttaatggaggtgttcactaatgtagggtgcaggtaccttattactgttctaaagtctaaaagtattttggagaaaagggagctctcatacagtgttgttgggaaccactgtggagaacagtatgcaggttcctcaaaaactaaaaatagaacctaccctctgatccagcaatccagctgctgagtatatatctaaaagaaaaaaaaagtatatcgacgagatagctgcactcccatgttgattgcaacgccattcgtgatagccaagatagggaatcagtctaagttccgtcagcaaatgaatggataaagaaaatgaaccatatatgtacacaatgaaatattactcagagaaaagaatgaagtcctgtcatttgcagcaacatggatggaactggaggccattgtgttaaatgaaataagccaggcacagaaagacaaatattgcaactcatatttgggaactaaaaaaaaaaaaagttgaactcatgaaaatagagagtagaatgagggttaccagaggctaaagagtggagagccagagataaagaagggatggttagtgggtacaaaatacagttaggaggaataagatctagtgttcagtagcacaacagggtaactatagttaacaataatttattgtatagttcaaaataactaaaagaatggagttggaatgttcccaacacaaagaaatggtaaatgtttgaggtgatggatgtcccagttaccttgatttgagcattgcacatagtatgcctgtatcaaaatatcatgtgtaccccataaatatgtacaatgattatatatccataattaaaaatttaaaaataataaaaatagtaagattttactctgaagaaaacctaaagattatttgaatttggacacacctttggcccctcgagtttcagaaaaaggattgtaaatcatctttttgttctcagtgtctgaatacgtggggcatgaagtcatgttctgccctttctgacctgtctcttctgcatacgacaatgtccgtgtgtacacatctacacatctacatccacacatggtggaaggtggaggtcaggagtagtaggggtagcctgacccctaacctcaaggttaagatgagccaagaagctaaggcaattccccaactatacattatcattttcaggaactttcctatgattataagaacttttgagtattgtacatagctgtaaggtaaataataattcttatgtttattttcaataataggtcaccaggaaagtacatcaccacggccacctcatgattcatctctttctgctcccctgcccaaactgtgtgtttttgttactccatctcttctttcagcaatgtgcagcctcttggacaacctcttgacgattgctcccagagacactgcaaaggcttttcgacaagctcatctcatagaacttctctgtaggtaagagataaatactcctagagaggcatgttagttgagataaatttacacaaactgtattcatgacttgatacaagatttcttgtgacctggaaatacagctttattcttttttaggctcattgaactctaggattttgcttttgccagaattgtcttggtggtttttattttacatctattaaagcacttgtattagtttgttatcttgactattaaggccaaagaaaaactcctgctttctaaaattcatggattctaaaccttatttatcctccagcacacttaaggaatatggtgctatcccctgttcttaatggatgtgagggactttgggaattcatctttttagtggtcatatcagaataatgtccctgggttgaaaaattattggttaaattcatttggagttattttgttaagggaaattaaacttttcatcaaaaagtattctgataaaatttagggaaattaaattcaaagaaaaattatttgaatttttattacttatttgatattaatcagtctgtaacataatttttctgaatttctaggaaggtatagtagaaaaggactagatattgaattcaggttgacctaaggtctaattatagttcattcactcagtagcttgcagccttgggaaattactccctactgtgtcattaacacctatttaatggggttagtgtgagaattaaaagtgatggtatctaggatacccccttaagtattacttctcttttcttctggtgttcagtttattctagccaaccatacccacctccttttgaccacatgtttatttgcatttctctgtctctctgtccctttacctttgaacatacaccatctgaaatgtcttgcatcttcttgccaaatcatagtgtcttctctttctttctgggatattaagaaaactctagaaaatataaactctaaaagaagtattccttgtttcacctcattcaattgtaattattcctttaacatgtatgatacgcaatggagtatgagtttgttctggctttaatatttattgatcatttttttactgtacctactcggattggaaaagtaactgctagtcagttggctttccttcctggatgctcctgcctgaagatgaccaaaatagagctctagggataggatcttctttgcttcttacgagtcagctaagagtctgatgtggcattgaggccacaggggcattaaaagaccttttatggcaaaggcttatcatatttccgtacctgtttttcatttttgactttaaaaaaatcctacttgttttactttatttttatttttttatttttatttattttgagacggagtttcactcttattgcccaggctggaatgcagtggcgcgatctcggctcactgcaacctccgcctcctgggttcaagcgattctcctgtctcaacctcctgagtagctgggattacaggcatctgccactacacccagctaatttttggtacctttagtagagacggggtttcaccatgttcaccaggctggtcttgaactcctgaccccaggtgatccacccaccttggcctcccaaagtgctgggattacaggcgtgagccaccgcacccggcctgttttactttattttgttttttactttctaaatatgaacagtgttcttgctattttagccagtatttttgctattttattaggaaaataaccaccaagtttcctgttactcatgggctgtattatattttattctgcttttaattaggtttccttagatattttcttcacagctctttgcttctcacttttctctgacaagatattttcctgtttgaaggtaacccaggatacaatttgaaattctttgagatatctttttataaacattttctttgcttataaagatcctttctcttgaattgtattcgagttacctttaaacttcaaattctgatttcttaatctttaataaaaagtatactaatcttctgaaggattttctttttctgatcgtcacagcattgcagatgctaccctcatacagacatgtgtccaggaactcagagccctgctgccttcatcacctccagctgaacacactcaggctcaggtaagcatctcaagtctgtttgtgggtttgtttacgttaggtgtcaaaaataaaaatcttgctgaggagatactagtcataggaaaaggatgaaaacctctcaaaatatacatggtatgatgagattattcgaaatacgttacttgaaattttaatatgggacatgtctggatgttagaaaagagaggtggggtttgaagacctagattctattcttgactccatcattaaccagctttaaatgtatgatcaagtgtctggatatcttggagcaccactttaataataaagagggacattggtatagttcacttcctgcttctgtgattttaggctatctctgttatttacaccaaagttaaagttgttaaaatatttggtggctaagttatgtgtattttcaaaacccaatttgataaaaatgatttattcttgttccttcacagatatttagttttaaattcttgcctatagctagaatctatttataaaacatgcttaacaattattcatgtagctgttgctaacagaaattttatttcaaaatcaaattttaagaagggctacaagatttatttaggaggtgatgaattaaaggtgaagtagaccaatatctcttgctttgagatgtgttctttgagctgaataagacagaccccattacaaagtttgggaatgctacacgcatggtctttgaagctgttgtcctggtgcagtgttttcacctgagcatgcctattgcataatgactgtctcctccatttttctgctctccatccagcaaatctttgttgagtacttgctgtgtgcctgaatcttctccaagtgaataaaacaaagacccttccctcaagttgggagaatagataattagaaaatccatatatgcctgaagatgatagacatctcagaagaaaaactaaagcaggggacaggaagtgatgtcagagttggaagggtagggctattccacttaggatgattaggcagtgtcgtgggacccaaagttagtgaagaagctagtcctatggtcattgcaagacccctgaggttggggtatgcttggcctatccaagaaacagcaaggagggtggagtcgctggagcagaatctatgagggcaagatgaggccagaggggcacagtcagctccatgaagtcaggaccttgctggctgttatgttccattgtgttctgagtgtctggcatagggcttgtctcatgacaggtgctcacttgatacttgtgggatgaatgaataatagcagtagcaaacatttatgggcatttgtttttgttaattcatgtaatcttcacaagaatcatgaagttatcattaatgtcattttataaaggaaatgcctgaggcccagagagatgagtgacttgtccaaggtctctgacatagattccaacctatgcaggtcagttccagggcccacattcttaaccactgcaccagctggccttatgtagattaaatgcttctgggctcttggtatttatataagatcattcactcatttcagaaaattcttgagcctctgctttaccagattctgttctaggtgctagtgatatatccttgaacaaagcagatgagcatctctcctcacgtagagtctgtgccataaatgcaggagacagacagtgaacaagtaaataaaatgcattgtatcagatagtcacaaatggtatggaaaaaagcaattgaggatgggtaaaagggtgtgtcagaaaggggaggggcctcctgaaggtgacacttaagcagaaagctggggaggtgagggagcaggctgcgagtgcctgcggcagatggggtggccagagccctgctggtggggtgatactctgctaaaggtatgatggattaaagtctgtggtcagttggttggtatttttttttaagagggccatacatagaaaaagagttactttatcaactactcttaagatatgaatattttatttaatcttgaatgtgatcatatacaaaagaatctttagcaattcagcgttttctctataacacttcttcttgcctcacctggcatggtttatctatttatggtaatatttcatacatccagaggtcagacttgctataatttcagtagtgtagagtatgaatgtaatatgaagtctcaagacttcacggcagtaaacaaattaaatttcacaaactgaagagtttgtgaagcctggagccacctacacttttatataaagtaagttggcagattagataaagggaggacgtattcatcaggagaagtagggcagaactatttgtaaatagtctgagaccattgacctcagagacacatactccacaaatttacaacaggctctcgactcttcattacactcttacaaccccagaataaggtgagaggaaaaaaagtgtgtgtgtgtgtgtgtatgtgtgtgtgtgtacagagagagagaatgactgatttcagaatatctttataaaattcacttatatgtaactggctcattgcttgagggtagtggacaaatgagacatcacagctcattctttaattgttacatattcagaggattatttttctgaaaagtacttttgccagttaatacttaacaatattagcatcaggcaaattccagagatggttttgttggtaatattgaagatgatttaattttttcttttataattaataatagtaattttatgctgagggcaaaaatagaacatatttgcattttatttgtagcaataactaggctagcttccccccacccctgcttatgcactttgaagggtgtttttgtaatctttctttctttacaaaattatagactttatggctttgttatacacttttccacttcttccataatattgatttcataatttgactacttgaaaaatatgggacttttttttttcttttgaaacagggttttactctgtcacccaggctggagttcagtggtgtgatcacagctcactatagcctctaccttctgggcttaagtggtcctcccatctcagcctcccaagtagctgggactgcaggcccggctaatttttatattttttgtggaaacaggatctcaccgtattgcccaggctggtctcaaactcctgggctcaagccatctgcccaccttggcctctcaaaggactggcattacaggtgtgttagctaccacacctggccaagactttacttctttaaatggaattcaaaacttgactttgaaaacattgctttgtttggtgtatagttgacagtattaatatggctgttaatgacatgcttatgagaaaaataatgctttgtctgctatgtgttaatttcagatcttgaaaaattatggttaatattttattttttattgtgttacaaaagtaaaatgctgtatcactgagatgggctttttatatggcatgtttgatttgaccctgtctccttttcaaacaggtttcctttctcctggaatacctatcctctttgtccaggcttctgcagtcatgtttattggtggagcctgaccttgtgattcaggatgagcttgtgaaacctcttatcaccaatatcattggaattctcaccatatgtaccaaagatgtattaggtaagcttaattgttttagtttagaatgtaagtgaataatactgaggaaaaaaaacttactctgtttcagatattcacttgaaggttactttttgagtttctttttgctagtattttggaaggctttgataatgtgttttatagtttggatgccttttaatggtaccaattaagacaagtgtgtagtataataaaggactacccttgagttttcagtttaaatgagggcaaagctctctgtgtgatgttagaaagtacagtgagttctgggtattaactattcttataaactatggctaaggccaaaagcttaataaaacattcccaataacaagtataagccaatctagaatatatcacaaatttcctaaggtcctaaattattgaaatgtatatatattttgtgatctaatgttatctccaggggaaaatattctatgatgaaaagttgaatgtaatgcttagtggagaaaattaaagcaaagtaggatctttgtcaaaatctaatataattgttttgaaaatgaaaacaatcatttataatgaagtaattgaccatttggtaattctctttgcctttcagttttatttgaactatggatttacttggttttaggtctggaaaatgaagtgtgttatgatacccagcaaagccagttctcagcatctcatcagtgttaaaatgatctcgatgttaaaggaatagtaattccttagaaattcaacaagtggcagtgataccctaactaagcttattaggttagactggacaagctcaacaaggtgatatcacccccagtctctaaggagtgaacattgattctggggagaagagggtgaggcaaaaacatcttagaaattaaaatagtttgtaggcttccaaagctcaactctacctgagacaatcttattactatttctcttcctggtttttcttgagaattccttgagaagcattgacgttgagttcatggaagatacacaagatgtatgcaagactagtgccacaaaactgtggtgaatagatgacagcagctggaggacctttggttgattgtttgatcccaaggtcatatagcaaaaggtggtctgtgtatcttggctgctattggctgccttgtgaatgctttttattgatcctcttgcttttctgtatgatttgagctttgaaaattaattgaaagtagtatatatttaattacataaaagttgtttaacccatcattaattatatcaagcgctgaaaggaaaaaatgtcaatatctgaatgtatatctattagctggttaaattaaaaattgttttctcatatctagcaaaaagttttaaaagttcactaagaatatttttaaagaagtttttaaaatttttttctgaaaaaaataagttttaaatgattttataagaatttattatattgctgttgtttttatatgaattgctaatttatgtatgtaaattgacacattgtgatgatatatatatataagtaaataaattacatgaaaagttattcagcaagtataggtgcaaagctaaatttggtattaataggtctttaatttttaatttaattttcagcttaaatgttttattcggctcttcttaagcctgtattgaataaaaacagtaagctctatacttagcctttttatgtacaaagtacagatatacatatagtacataaagagatatacagtatatgtgtggaattaaaatcttgtggggatggcaatgaggaaacattttctgaaataaactctttagagagccactaatgacaaaagggttgagaaacaccaaggattgccctggggaaggtgcagttttcaagtatctcataggtgctgaagtacacctagatggatctcctcggggttaacgtcctataaagtttacattatagtggaattagataaaagatgacagatccccctgaaggcatggtcagagagagtcctcagcgactgctctccagcttccatttacctgagtggagagaagggaaaatgggtcctcatcctagaattgctacatccttagccataggaaaagctgcagaatcttcttttgcgtcatacttttctttgtgggatgatacttttcttggttcttcaaagaaattctttcttttctaccttgaccttggcacactgtgctttcctttcacccctgcccaaagctgctggaggggataaaggaaataggggaaaacttactctgacaaaagtagcacaaacaatgacatatttttataatgtgccaatatgtagttctgcagtcatggcttaatatttagtttgtcacaccttctgattgttcttgagtatgctttaataagaggagagtttgtgagtgtggctttatatgcaggagggtggaggggagatatcttaagaagcaatggaaaagaagttaattgaaataaattttggataatgctgaattagatttgtcttcatttgataagtgcacacccctcattttaagtgtaatgaagcgtctgtggtaagttttatatcttgaaaggttcttttccttctttgtgttaataacttgaagtgttttgattaattttatagataaagagttaatatcagctttttatcacacatggacacatttatttaatcttctggccatgctcctgaggaaagctggtgccatcacactcccgtttgttaccgtggccctggccaagcactggacagcggcgattggtaagaagatacttgcataatcttgggggctttctgctaataaaacgagataatgattctgcctgtttaggtatgtaaattcactaaagttaagtaattatagcatggcatataaaagaggtatcagggtgcttgctttgaaaaatttgcagtgttcttgagccccccaaaaatgcatttttgaaaaattgaaacacattttgagataacataaaagcgagttaggaaagcctgtggttttattattttttaagctttttaaagatgtcatccctgaagctctgttttattgagaacattatattggccactgttggtttttttaaattttactttaagttctgggatacatgtgcagaacgtgcaggttttttacataggaatacatgtgccatggtggtttgctgcacctatcaaccgatcatctaggttttaagccccacatgcattaggtatttgtcctaatgctctccctccccttgcttctcatcccccgacacggtgtgtgatgttccctaccctgtgtccatgtgttctcattgttcatctctcacttgtgaatgagaacacacagtgtttggttttctgttcctgtgttagtttgctgagaatgatggcttccagcttcatccgtgtacctgaaaggacatgaactcattctttttttatggctgcataatgttccatggtgtatatgtgctgcattttctttatccactgtgtcattgatgggcattgggttggttccaagtctttgctattgtgaacagtgccacagtaaacatatgtgtgcatttgtctttacagtaggatgatttataaaactttaggtatatacccagtaatgggattgttgggtcaaatggtatttctggttctagatgcttgaggaattgccacactgtcttccacaatggttaaactaacttatactcccaccagcagtgtaaaagtgttcccattttctccacatcctcgccagcatctgttgtttcctgacttttgaataatcaccattctaactggcctgagatggtatctcattgtggttttgatttgcatttctctaatgaccagtgatgatgggttttttttcatgtttgtcggccgcataaatgtcatcttttgagaagtgtctgttcgtatccttcgcccactttttgatgcggttgtttgtttttttcttgtaaatttgtttaagttccttgtagattctggatgttagacctttgtcagatggatagattacaaaaattttctcccattgtgtaggttgcctgttcactctgatgatagtttgttttgctatgcagacgctctttagtttagatcccatttgtcagttgtaagcctgtggttttataaaggtacatatgatatgattataaaacaatgagataaattttactgtgttggtatagaaaccagtatcctttctgacatatgtacattgtatgtggatacatcttcatatataaaatctggtatacatgataacatggaaagttaggatacaaataactttctcatcacatcagaattttcttatagtacagaaatgccaagagtatagtataattatttttatgtttttcatgatagttgcccactaaaataaacatgattattttaaaataactaatctttaatttttcatgaagcctcctaaattttagcatagaaaaaagctgttttttaacataaatattcataactgacatttatgtaacctttttaaacaacctacttaaatgtactcaaaattgagttattttaagcttccaaagtacctgctaattcaactgaccgattttttttaacatttattttatcatttgatcattcagtaaacttaaatgcatgatacaatttttaaccaaagcgatagtaagaattatggcaaatgcatgtttaacaaggaacagaattgttaattttctggatgtaggagttctgagtctaccatggagtacagtgtccacgtaggatatcattattttgtttaaaatataataattgaaagagattgactgattaagacattgggattttcttcttgtatttattgggggaaaattagtttatcacctgaatcaccaataatatcaatagaaagcatgatgctacccacattagataaatctggcctgcagcttgttttggtaaataaagttttattggaacatagccacactcacttacatattgcatatggctgctttcatgctacaaaagttgaggtgaatagttgtgaaaaagccagttacctgcagagtataaaatacttactacttggacctttacagaaaaagtttgctgacctctgacttaaacttatttatctaacactatttctttagtgataaaataaatacatattaaattcaaaaccttccttcaaaatatgtgtacagttttatgtaataatagtactaatcaaaagtaacttactgcataaatggttttcataatagtaatgttaatgaaaacattaataacaattatcattttttttgccatggttttatttttgtttatttttatttttttaaatcaattgccatctcatatgcccatatacatttaaaacatgtcgtggtcactccgtaacttgtgttatctataagagtcttttctcgaacttgactaatatttggacatcatttaaatgaacataattctcatgaaaccctactgctgactactttatttttcttatgtaactttaatttgtacaagccaaaatctaagtaaaaatttttatggttataattatcacacaagcataaatctaaaatataaaatcaaacaaaattataaatccaatttttcaagtttataaaatgtaaaacaacacatgtaattttgattaaacaaaatcagttctcacaacaggaaattaataatgactgtttcagtgtaaattcctttcagtttggtctgttctttccactctgtattaagtttgtgaatcagttcatgaccactcatgtgctgtctgaactgctatgaaatatttgtttgtacattgtgccaacactgcatactaagtcttgcttttaagttctggttggcaccagctcctttaacagttgcaacacaatcacacaagttggtaatctagatgatccagagtatagttactttaaaatcaacttgatttcctttttgttgaattttgaagaaattttcaaacattcacatctgaaattattcctttagatatgttctgcacatgtgcaggcttgtctgccacgtgtcctgccctgtatactgccagcttgcaattcctttctgttctcttgaccgaagaagcaaaagggcatctccaggctaagagcaaaacacatttatgctgtagtccaacagtggcttcacttcttgatgactctcaggaaaatcagaaatctctagaacaacttagtgatgtaatccttcaggtacgtcatttcttggtttttcaaaaactttatttagcgtttaaataaattgactttcagtcatggtcttgttaaaaactgtctcagtcatttaaattaagaaatagtaatgcttattatgactgtttaaatgatacaaaagtttataaagttaaattaactatctcctccttagccccacccgcttatgttgaccagtttcttcagtgaatatgatgtaaagatttgaagtgaaatattactaatctaaatctaacagttgatcaaaacagtgtttcatatcatgaccaaaatggatatatttcagaaatgcagttatggttcaaaatttattgtaattttaaagatatatctacgtctctgaaaatatattctaagtgacatttgatttctagaaatggaccacagatttttggggttggttacatgtataggtaagtggacttgtctggcacatttggaagaaaatgccccctttccaagccctgttgcctgttttatcttataaaattatgtttacagtctaaaatgtgaatcaagaattttgttaatcagaaaacattctaaaatcactaaagtattattttataagtagatgagtaattttttaaaaactgtgtgtttactaagttaaagttgtacattgttttttacaaataggaatatttttagatttttcagtatttagaattattctttttaatcatgtggttttatgatttttgtcttctcactgaaaggcagaaaagtagtagaattgttgattgaagaatttgcttcagcttcccaatcagccagccacgtttggcaaagatagaagattgtctgtgtgctggtttgttataattcctttgttgcttagaagattgttcctgtgctgatttgttatagtccctttgttgcttagaatttggagatttttacccacttctttgcctgtgagagtcatgatcatgcagatatttctggtatgactgcttgtgcattttgggcacaaggcttgatgatgttgagatgcagaaaggattgccagtaagaagaaaatgcttcctggttcacccaggagctgtcctgtggagagtgtcacagggtcctcaggggactttgtctcccttgtgctacaaaatctggttacctttccagcatagataagaagcctgttaaggcatcccccattttctcatccatctccagcagcgccttcagaagcctggatagagctctaggggagaagcgttcctcaaagcatttctctaaaagcctcttattcttgggaggccatagctttcctgtacctactacctcactgtcagttcactcaaattttcttagttgaaaacaaaaactggacgttgtcccagttttctcattccccatcagaacaacagactttatttcccaatgattaactgagtctccagttttgcactttaaagaatgttgtaaggaggaaaattcaaaccttttcaaaagtctcccaaccacaacccctatgtaatttaattataaatttcccaactttggctttggttggagcacggtactgcttggggaaaggcttttgctcttgctgacacacttggctcgtcagagaatttcagtgacttcactcagaggactgagtgcagtgagggcagtgtgctgggccctgccctccctgctgaggccaaaatggcaataggtgtgggagcctggctctgcatggatgactgtgggtgtcctgcaaccaatcctcctggacctgggaaatttaaagacttccagccaggcaaagccagggctattttatttcccaactctttaatgttgtttgtggtgctgtgtttgaagggtctctgatgagactcatgatgcatatggatccatgtagggtaatgaatcagtttataatagtatacgcaggaaaaaaaaaatctgtgctagaggaatttgtgaaatttaccttgcccttatttttacctaatactttgtaatattattcattataaaagcttttgtttataatttttttgttacctttttggacaaagaaaatgagatagcctacagtcacagaatatctcaatgattttcctaatgactagctaattttcctctttatttctctaaattacaaatcacgtattttgtgagggtatggatacattaaccaattatttaaaccatgtttcctaataaatcatactctttgtgttcgtgtaagcagtagaatttggatacatgacatctgttagaaaggcacaggcaagtttaagacaaagaaagtgaagagaggaagtatactcctggcacactcatgacaaaatgtgtacctaatgtaagttgggacagttaatgggcctattaaattacaaacactgttttctttgccttatagaaataggatatgtgaattaaaatattattagaatacattcaacagcaacacgttttgataagtaataaatgtagcttactatatgtccatggaggctgtggtttgggccaggtgctgtatgaagcaaagtaaattacagtctttaaattatctgaagaaattatattctaaaattgatgtctttcaaaggtctaagttttctgtaaaatcatactcaaaaaacatttgatatgggaccttaggcaaatcacttaacttcttgggattcagttcttcaagtgcaaaatgataggcttttattacattattactaagtttcagctgcctctaaaatctccatcctcctaacaaatcactgtattggaacttcagttaaatgtctggtcagagttatcttttaaatggtgctttatagcagtatcccataggggatacatgttgaaagtattcatacttacatcttaagtcatgtgtaagtgtttttttctaagtccattttgaggtggtttcagactttgagcattttctaagaaatattcagctgtcttttgtccataaaatactgaacacatttgacttagcagagattttaccttccctagtttatgaagatacagtagtctcctcttatctgtagttttgccttttatagcttcagttactcatggttgactgtagtccagaaatattaaatggaaaattccagaaatacacaatacttaacgtcttaaattgcatgccattctgagtagtatgatgaaatatgctctgtctcccctcaggacgtgaatcatgctatgtctagcttacccatgctgcatatgatacgtgcccattcatcacttagtatagcaatcttggttatcagactgatgaatcacaagacgaagaaggatgagtgcattgtagtaagatattttagagagagagacagagaggccacaatcacataatttttattatactattctgttattattattgttagtctcctacctgcctaatttataattaaactttattgtagttacatatttataggaataaaacttagaatatatggagttgggtactattcatggttttaggtatccactgggggtgttggaatggatccctcaaggataaaggggcctactgtgctcaatatgttttatttgcaaatacatatagataacaagatcaataaaaatctctctatatgtagtagattttgtctataattgatatattaatcagttgagataatgaattaattttgctccttatatttgatctgatatctaaaagtagtaatgcaaatgaggaactcttgtgccttattttagatgtattttgtgctcacatttagtgaatggtaaaattcaagggtaaatctgttgaaaggaaggcttatatatttaagatcccattgtgttgatgaatgttcactgtaattaaaaagcctattttttacattaagtaccttttggaaagaaagcaagaaagtcttgacctagaataccctacatcacttaaatgtacagaagggattaatctagaaagagcatgacatttaaatgaattttggttgatgaaaagacattatgtcttgctctgtatatcgtcttgatttctttttctctttttgtgtatttgctagttatctgttgcttgagtttattctcagccttgctgcctccaggctcctcacacttccagtcgtgtccacttgctctttgcagtgatgctcagactgcttttcagtctgcagtaagtactgtatggaaactgatagaaagtcagttcttcactccagcctttccttcagtatatgttggaaagtatatgaatttaccatagattaattctgtttgtttcctttttgtctgtttggttttggtttggggctttgatttcagttttaccatgtacacattttagagaaccaaacagttgtatctgtaagtttttactaaaagtaggagatttctgccttcattcctcatattctcagaggtgaccacttatacctcatttagctactttttatagcttctctttcatgtctctaaataacatgcttatatttttttgtcttgattattcagttttaaatattatctgttgaattcctactatggaaaatgagactttagcttttttttcatgcctcacccacctaccctgccaaaatgggttcccttctcattctcctaatattgatataccataatgccaattagagaataggcagcgtgaatggtattaaatttatgacagtgttatacacagttgaaccgtgttgcagagtgtttaactttcttttcttgcacagcttttgtttgccttagaggtaattattgtattattttaaaacgtgctgactttcctgttatcacttacaagctccatgctctttgccagaattaaacatcctctcagtgtgttcagaattgtcagaacttcatcgcttcatcttttggaagaaatctcttcccaattccttctaacctacttggtgcctgttttcatcctgggatatccattcaccagtttctgggaattcctttacctctgtgctaggtgcagtttcctgtcatcctgggatatccattcacctggttccaggaattcctttacctctgtgctatgtgcagtctcctgcatcctgcatgctgtctcccatctcctgtggccttctctcctggttaatgctcttcatttttgcgtagcgtctcttctcccttagctttcagagaaaaggtactgaggaggtcttttgagatctaaatgactgaaagtcttttatcgcccttacatataatttatagttaggctagtgagaattctggattggaaatcatttacttcagaatttagaagccatagtctgttctttttaattccaaatgttactatagagaattctgaagccttggctgggcgcggtgctcatgcctgtaatcccagcacgttgggaggctgaggcgggcggatcacgaggtcaggagatcgacaccatcctggctaacacagtgaaaccccatctctactaaaaacacaaaaaaattagccagacatggcggcgggcacctgtagtcccagctactcgggaggctgaggcaggagaatggtgtgaacccgggacggggagcttgcagtgagcagagatcacgccactgcactctatcctgggcgacagagcgagactccgtctcaaaaaaaaaaaaaaaaaaaaaaaaaaagaaaattccaaagcccttagaattcctggtttttctcttcctggaagtttttagaatctttattttttctcgtattctaaaatgtttagatgaagcatccaggtgtggatctgttttagccattgtactgggctctcttggggattctttccatctataaactcatgctttctaaattacttcagagacattccctgtactttgtatgctctgtacatttggaactcctgtgaagtttttttttttcgctatgtaatctctctttgctgtcttttcctctatttattttagtctctcttttctatttggcagcttttcttggtgtctggtaatcttgattatgtgctgtatttaagactgggaaactcaaagcagattgacatccctgagcatatgagtgcaacttgtcaattgctgtccaaggggaccaatgggggttattttgtaggcttgtcttctggggcttatcagattccctggagaatggtcttctgatctctttcctggaggtgaaaacccaactgccaaatgttatgtagccaagtaggagacgacagctgaggtctcagaatttagtttgcacaatttcacttaatccttcaaaggttttagtagaatacccttgcccacaaattttcctgtctctgccagttcagaatcctaatttatcctctccagagactaagcatccgggattttgcaagggctgggaggaagagtggcttagttacatagaaactggtggctggcgggcaggatctgggcatgtaactgcattttagagacttgaagcaatccttcatcctcacgtccagggatgcctggtgctaaatttcttcagccttgggcacttcagtggatagattggggtagttttcagctttccccactcaccacttagaattcaagtttcccaagcctaatacacttgcctctcatccatctgctttctcgttttcaggcttgtgtgtgtgtgtgtgtgtgtgcaatcccatttttgtcattttaatgggatttcaggagggaataaaagacatatctgtgcacacaactatttccttaggagtcttaactccgacccaaccctgctcccaattgctagtgagcaattttttatttttattttattttttatttttatttatttatttatttttgagacagagtctcactctgtcacccaggctggagtgcagcgtggcccgatctcagctcactgcaacctctgcctcccaagttcaagtgattctcctgcctcaagcctcccaagaagctgggattacaggcgcttgccaccgtgcccagctaatttttatatttttcgcatgtttgttggccaaactggtctcgaactcctgacctcaggtgttccgtccaccttggcctcccgaagggctgggattacaaggcgtgagccaccacacctggccccattatcatttgtttcaagaaatttttcaattttcttcttaattttttcattaacccactggacattcaggagcatattgtttaattttcatatgtttgtatagtttccaaaattcctcttgttattgatttccagttttattctactctggtcatagaagatgcttgatattatttcaatttcttgaatgttttaagacttgttttgtgaacctaacatatggaatatcctacagaatgatccatatgctgaggagaagaatgtgtattctgcagccattagatgaaatgttcggtaaatatctattaggtccgtttggtctttagtgcagattaaatccagtgtttctttggtgattttctttctggaagatctgtctgttcaatgctgaaagtagggtgttgaagtctccagccattatcgtcttgagatctcgctctctctttagttctaatatttgctttatgtatctcagtgctccagtgatgggtacatatatactcacaatcattgtatcctcttgctgcattgactgcattatcattatataatgatcttctttgtctgtccttacagtttttgttttgacatctattttgtctaagtatagctactcccaattttttttttgttttcattggcatggaatgtctttttccatccctttattttcagtctgtatatatttttattggtgaaatatgtttcttgtaggcaacagataagtgggcattgttttttcatcccttcagccactgtgtgtgtttttattgtagagtttagtccatagtccatttacattgaatgttgttattgacaagtagggactgccttctgccgttttgttatttgttttctaattgttttgtgatctcattctttaattccttctgtctttcttttagtgaagatgattttctttggtggtatgttaatttcttcttagtttttgtgtctccatttgtatcctttttggtaaaaggttaccatgatgaggcttgcaaataccttcttatagcccattattttaaactaatgacagcttagtactgatggcatgaacaagcacacatgcaaaagaaaactaataaaaactctacactttaactttatctcccctgctttttaacttttagttgtttctctttatgtcttattgtactgtctttgtcttaaaaagttgctgtagttattattttcgattggttcataatttagactctctacttaagataagagtagtttacacaacaccattacagtgttacaatagtctctgtttttctgcgtgcttactattaccagtgagttttgtaacatcagatgatttcttcttgctcacgaacatccttttatttcagattgaagaactcactttactatttcttgtaggacaggtctagtgttgttgaaatccttcagcttttgtttgtctaaggtttttatttctcttcatacttgaaggatagtttcatcgtatgtactattctagggtaaagtttttttgttgtttttctttttttttttccctgcagcacttgaaatatgtcatgccactctctcgtgacctgtaacatttccagatatattggaggtccattgtatgttgtttcttttctcttgctgcttttaggatcttttctttatccttgacctttaggagtttgattatgaaatatcttaaatgtcttctttgggttaaatctgcttggtggtctctaaccttcttgtacttgaatattgatctttctctaagttttgtaagttctctgatattatccctttgaataaactttctaccactatctctttgtcttaaatttgccctttcgaggctattttttaggttttataggcatgcttcattcttctttattctcatttttcttttatctccttcccctgactctgtgttttcaaatagcttgccttcaagtttactaattctttcttttacttggtcagctctactaatatgagactgatgtatttgtcagtatgccaattgaatttttaaactccagaatttctgtttcattcttcttaattatttaaatctctctgttaaatttatctgataaaattctgaattccttctcttattttgaatttcttttgagctcccctaccacagcaattttgaattctctgtttgaaagttcacatatctcttgtttctccacgcttggtctctgatgccttattttagttcatttggtggggtcattttttcctggatgatcttgatgcttttagatgttcgtcaatatctggacattgaagagttaggtatttgttttagtctttgcagtctgggcttgtttgtgtgtgtcctccttgaggaggcttcccaggcattccaagggaattggaccttaagcccaataacacttcgtttcttgcagacttgtagaggtactgccttggtggtcttggataagatctggaagaattctccagattaccaggcaaagactcttgttcttttaccttactttctcccaaacaaacagagtctctctctatatactgagcagcctggaactggggatgtggtgatattagcatccctgtggctaccaccactggaactgcactggattagtcctgatgtcaacacaacactgggtttctctcaagcccactgcagtcgctacctgcttacctgtgttcactcaaggccctaggacttcataatcagtaggtgacaaagccagccaggtttctgtccttcccttcagagcagtaagttcccccagaccctgagcaggtccagagatgctatctgtgagccagggattagagtcaaaaaccttagaattttacctgatgttctattctaatgtgactaacctggcactcaaaccacaatactgggtcctttctgctcttctctcccctttccacaggaaaaggagactctccttttggccaccaataccacggtcccatgggagttctaccacgctgctgccaatgttcacttagagcccaagggcacttctgtcattctgtgacgaatgttgccagacctggggctcacccttcaggacaatcagttcccctctggcccagagatggtccagaaatactgtccaagaggctcggcctggattcagggagcccaagagcctacttgttgctctacccactgtggctgagctgatacctaagatgcaagacaaagtcccctttactttcccctctgcttttctcaaacaaaaggagtcttttgttgtagccaccacagctgcgaatgtgctgggtcatacctaaagtcagcacgtcccagagcccaaggcctgtggtgtactatctggatattgctgctggttattcagggcctgagggctctttagtcagcaagtaatgaatcctgccaggactggtttcttcccttcaaggcagtgggttcccttggcccacattttgtctattttgtcatccaggaatgggcctggaatggaggtctcacaactctgcccagtgccctgttctattgtgactgagctggtatctaagatgcaagacaaagtcttgtttactctcttcctcaagtagaaggaaggagtcacttttgttgctgcgagccgcactgcctgggattgagggagaaatggtgtaaggcctcccttagctgccctggctgttgtctccctgtgtcacatgccaccatagtccagtggctctaagcccagcctaatactaggagttgcctaggaattgcaggccttgtgtccaagactgcctttcaagtttacctaggaccccagagcactggctttacggtggcaaggcttgccaagaaactccacttctgactgctggtttgggcagttgatctaaatgatctctccatgcatgggtgttggctgagcccagcacagctttgctctccactgtgacagagcagcactgaattcagtgtgaagtcccccagtcgctgctctctccctcctccaagtgtgcaagttagctcgccataccaggcagctgctgctgatagataggggaggggtggtgattcaagactatatctccgacacttttcagttcctcttttagccgtacacattaaaaccaggtactgtgattgctcacctgatttttggttctcgtgacggtgcttttctgtgtgcatatagttgttaaaatttggtgttcctgttgggggaggacagacagtataggcttctattctgccaccttgctgcactcacccagccgattcttttttaactgttaggttcggggtacatgtgtaggtttgttatataggtaaacttgtatcatgggggtttggtgtatagattatttcatcacccaggtactaagcctggtacccaatagttattttttctgatcctctccctcctgctacccttcacccactggtaggccccattgtctattgttcccctctttgtgtcccggtgctctcatcatttagctcctacttataagtgagaacaagcagtatttggttttctgttcctgcattgtttcctaaggatcatggcctcgagctccaaccatgttcatgcagaggacatgatctcactcttttttatggctgcatagtattccatggtgtatatgtgccacattttctttatccagttttccattgatgggcatttaagttgattccatgtctttaccattgcagatagtgctgcagtgaacatttgtattcatgtgtctttatgatagaatgatttatattcctttgggtgtataccctgtaatgagattatagggttgaattgcagtcctttttttagcttgttgaggaatcaccacactgccttcccaatggttgaactaatttgcactcccactgtgtataagcattcccttttctccacaacctcatcagcgtgtgttattttttgacttcttagtagccattctgactggtgtgagatggtatcttactgtggctttgatttgcatttctctaatgatcagtgatgttgagctttttttcatgtgcttgttggcaatgtgtatgtcttcttttgagaagtgtctgtttgtgtcctttgcccacttcttaatggggttgtttttttcttgtaaatttaagttccttgtagttgctggatattagacctttgtctgatgcatagtttgcagatattttctcccattctgtaggttgtctgtttactctgttgatagtttcttttgctgtgcagacacgctttagtttaattagatttcatttgtcaatttttgcttttgttgcagttgcttttcacattttcatcatgaaatctctgccactttctgtgtccagaatggtattgcctaggttgtcttccagcgttttaatagttttggggtttatatttaagtctttaatccatcttcagtttatttctgtatatatgtaaggaaggggtccagtttcaatgtatgtatataattagtcagttatcccagcaccatttatcgaacagggagttctttccccattgtttgtttttgtcaggtttgtctaaggtcagatggttctaggtgtacacccttatttctaggctctgtattctgttccatcggtctatgtgtttattttttataccattaccatgctttggttactgtagccctgtagtatagtttgaagtcaagtagcttgatgcctccagcttttttctttttgcttagaattgccttggcgatttgggctcttttttggttccatatgaattttaaaagttttttctagttctatgaagaatgtgattggtggttcgatagggatagtattgaatctacaaattgctttgggcagtatggccattttagcaatgttgattcttcctagccatgttcatggaatgtttttccattcattcgtgtcaccactgatttctttcagcagtgttttgtatttctccttgtagagatctttcacctccctggttagctgtattcctaggtattgcattttgttttattttattttgttttgttttggtggcagttgtgaatgggattgcattcctgatttgcctctcggcttgattgttggtatataggaatgttagtgacttttgcacattgattttgtatcctgagactttgctaaaattgtttatcagcttaaggagcttttgggctgagacgatggggttttctagatataggatcatgtcatctgcaaacagggataatttgacttcctctcttcctatttggatgccctttatttccttctcttgcctgattgccctggccagaacttccagtaccgtgttgaataggaatggtgaaagagggcatccttgtcttgtgccagttttcaaggggattgcttctagcttttgcccattcagtatgatgtagacagcaggtttgtcatagatggctctcgttattttaatatatgttacttcaatacctaatttgttaggagtttttaatatgaaaagatgttgaattttactgaaagcctctgttgagataatcgtgttatttttgtttctagttctgtttatgtgatgaatcatgtttatttgtttgcacgtatgttgaaccaaccttgcatcctagggataaagccttcttgttcgtagtggattagctttttgatgtgctgctggattcagtttgctagtatgttgttgagggtttttgcattgctgttcatcaaggatattgacccttttttttgttgttgtgtctctgccagttttgggtcaggatgatgctagcctcatagaatgaattgaggaggagttcctacttctcatttttttggggaacagtgtctgtaagaatggtatcagctcttctttatagatctggtagaatttggctgtcaatccatctgatccatggcttttatggtgtgcaggctatttatttctgattccattttagagctcattgttggtctgttcagggattcagtttcttcctggttcagtcttgggaggatatatgtggccaggaattcatccacttctagatttttagtttgtgtgcatagaagtgtttataatcgtctctgatgtttatttctctggggtcagtggtaatatcccctttgtcatttctcattatgtttatttggatcttttctcgtttcttcattaatctagcctagtggtccatatattttattatttttttcaaaaaactggctcctcacttcattggtcttttgaatggtttttcatgtctcagtctcctttagctctgattctgattatttcttgtgttctactagctttggggttggtttgctctttcttctctagttcttttagttgtgatgttaggtgcaaacttgagatcttcctaacttttcaatatgggcatttagcgctcaaaattttcctgttaacactgccttagctgtgtcccagagattctggtatgttatcattgttctcattagtttcaaagaacttactgatttctgccttaatttcattatttgcccaaaagttattcaggagcaggatgcttaatttcaatgtaaatgaatggttttgtgcaattttctttgtattgaattctgtttttattgtgctgtggtctgagagtgtggatggtatatgtattagaccattcttacattgctgtaaagaaatacctgacacggagtaatttataaagaaaagaggtttaattggctcatggttccacaggctgtaaggaagcatagtgctggcatctactcagcttctgggaaggcctcaggaaactttcaattatggcagaagggggagcgaggcatctcacatggtgggagcaggaggaagagagaggggcaagatgccacacacttttaaacaaccagatctcacgagaactctgttacaggaacagaaccaaagggacggtgctaaaccattcatgaaggatctaccccaatgatccagttcccaacattggggactacagttgaacatgagatttgggtggggacacagatccaaaccatatcagtacaattttgatttttttgaatttgcggaaatttgttttgtgtctgattgtgtggttgattttagagtatgtgccatgtggcaatgagaagaatgtatactctgttgtattctggtggggagttctgtagatgtctatcagatccatttggtccagtgttgagttcaggtcttgaatatctttgttaattttttgcctggattatctgtctaatactgtcaatggggtgttgaagtctcccacgttaccctatgggagtctaaatctctttgaagatctcttaagaacttgctttatgaatctggatgtttctgtgtttagtgcatatatatttaggatagctaggttgccttgttgaattgagtcctttactatttgtaatgcccttctttgtcttttttatctttgttggtttaaagtctattttgtctgaaattagaattgcaatccctgcttttttctgtttttcattgcttggtagcctttttccatccctttattttgagcctatgtgtgtcattgcatgagatgggtgagtgcctgcaggcaaggcggcatgaaggaggctgcagtgggggaagaatgctggtgcgtgtccactggggtcactctgctagagcactctgctagtcaggcagtctgccagtgcaggagctaccgtatgggcccgtacctgggagcttcactccaagcaggtgtggctaggctcgggctctgggagaagccagcagaccaaagggtggaccagattggccccatctcatgggcaagaccaccctgcagagttgaggtcccacagttcccctagggataaagtctcctatgggagcaagtctagcctaaggggatgggcatccttggccatgctccgctatagacactcccataccaaactctctgggctctgccccagctggagttctgcttccactgcttccctaagcagctttccctgacaactcaaatgtccatggtggtccaggggttccttcctaccaggattccagcggcctgtggggagagcgaattttgttccttgccttttcaacttccccctctgcaggagttgttgggggccaggaacaagttgtggtgcttggtagccccgagcagggtccccagcttcctcccccttcagccccagctctgtgttttccctccatctgctctcgatgccctccctctgaagatctgctaggagtgtgccagtcttcctggtgtcccagtccctcagtgggagatgttcctcctggctgtatctagttggccatcttggagcagaaatttctagttttgatttttaataaaaatgtatggaatctgttattgtgtctgcttttgtacatattagaaatttttaagtgaaaatttttctagctcataaatttaaatgtataaaggaaatatacagaaatagtagtttcggaattacaaatgattttccatttctctgaaagtcaaaaaagttacacactattttttgagaaaatgttatatgacaggtgcatgttaccatagaaacgaaagatggaaagaaccaaatcacctgagatataggggtagtttagatagaaatggagagaggggaatgtgtccccagaaggagaaaggaggaaattgatgacagttctcctgttcagcagttttacaaggacccattttaataaggtacacacatatatatacaatatgcgctggtgaatttgagtaagtatatgagcttgctacgtgaaagctaaataaagcttttttctgtagatgatgagtctttaagaatgattgttgttcttttccatattataagcaacttatacagtcttatccacgcagaacattctcaaatattaatgatttatcaaaatccagtgaatttcacatgatagttgaaacctagcaatatcttttaagtagaaaatgttctttattcacaacagttttgctccagattaaatatttcttcaaggcagtttgatttatattctctgcagtgctatgaagggaaatcctccaaagatatcctgaaaagagtagctgcaaatgcattgatgtcactgctggctgtcagtagaagagcacagaaacatgctttgaaaggtgagccacatgacacatcagctgttttgatggcattatcaattcatatgttttgttgcttgttcaagttaattttctttggactcaaaatgtaaaaaacgtatagtataatctcagtgtcactaaaaataattttttttcccatacagaagcagtaaatatgcattacttttcaaataaaaagattagacatagtttgtttttgtttgtttaatatgtgatggttcttgctctaaagaacctatatgtaaatattagggaagctaaaaggtaacacattgagtttcattataattaaatattactatccagaagcactcactgcatacctgaacaaaacccacatagttttgatggtaaaaacagcaacagatgattccatattttcgtataaatttccctcttgagtgttgtaatttctcatttgggaatcggagaatgtagatctgagaattaaaagagaataatggcaacatcaagtccattaatatcaattgtgatttgcgactacaacaaatgatgtattcctcaagttgtaaattggatttgggtagtatcttactaaaaactgaaaacaagtggacttcagcattttagttctcttacttatcccccctctgattcattaatctctgactgaaaattctaaaatgaagtgggtcagaaatagaaaatgttacctttttgagaatctgattggtatatgtggttataacttacttggaaatagaatatccttttgactactgcagattttgtctttcagccaatcttatagacaattgcatggagcagatgaaacacataaatgcacaactgaacctagattctctgaggcctgggaaagcagcattgaaaaaaaaggtaacattctgggataaatgaatggctatatatagagaccattctccagtcctcttgtgcctagaaatgagcacgagcttgaaatgagtgtctcatttagaagaaaggtacagatggataaattaatgagacttctacattagcagattgttggctttttttggtcttaattcttacttgaagatctttagacaacatctgtctattatgtactgttgttattataaacattggaaatatccacatatacatgatactatgccagataaattttttatactacaaaaagaaaatctttatctcaaaacaagcataggttaactaggaatgagatctgtaacaactataatttattaagagttttctatatgtcagccactattgaaacatttcatatttattatctcatgaacaaacactcattacagcatagtcacacaactggtaattgatggagctaatatttgccccaaatctgggtggttgcagagctggtattcctcatctctgtttatctcctcctgtgccttctgaatatctcctctagcattgaatctgctggactcatgtttaaactgcatgctcaggtaaactgaaaataacatagttatataataactactgtggttaacaagatctgccacccacttattcaacaaatgaaagtgtgtgaatagtataaatatataaatatacatatatgtgtgtaggtaaggccgttatagcagcactctatgtaataactagtttctactgcatttaagaaaccaagacaaagtcttatttaataatgtaattgatgcaggagattgattgtatgtttatcagttctttttttttttttttttgcctcttttcctccctagccaaaggcccttcatcattgagaaagtcagccaacacctgatattattgaaaatctctcagtatctgcctcactttattgagatgaaacatggaggctatcatatatccgagttcctccatgcttgatagaacagaaatagctttttcatggtgaatgtgcttcttgagatatggtcatctttcagagatcgttagcctgtcagttccctcaaagttacagtggttgggcatgattagagcacacctgcattgtcccgtgacccaaaggggagggaattactatacacaaaaagtgaagtatgctgttgcattcacagttttcaactgctttttgtttaaataggaggatggtgttattaaagagttaagcattgccatgcagctcctaagaaactgtctttatcaaaatgaggaatgtaaagtaagtagaactacttttcaaaattttaataggagtactggtattaagcagtttaatttttatgtgagataatgtagtaggaaaaatggaaagctctgacttttaaatttttagacacacagttgattggtccttaaactcagtgttaattgtcagaaatgtgtgtatctaatcattattcatcgacactgattacatttcttcgcaaacttcagcctcattctgtactcttaggtattttaaatgttttacatatggaatgaatggctggatgtgttttataaggtagattctttcaaaacgggttgtcaaaacaactcttcaaggaaataagtgaagctatctgtatctataaggaaagaaaatgaagagtttcctgcttcaaaggagaagatagttagagctgctacctagtgtggccacatccaccgagaggaagtttcttctagctctgctgactccctgtgaccatttacatggcccttctgtctaaaaatcactgagatgttttgcttcgtctgtaagcactgatgatgttttaaaccattgtatcagtactactatagaggatataatcttgtgaacactctgatttgctttgtctatagttttacaacacttttgaaatactagattgatgctttaatgcagaaatactagattattctttataaaagctggccacgaaaataaaaattttaaaaaatactaaattaaagctttaatatagaaagcaaagataaattatggaagcttttattgccttataaatttttacctgttttgctcttacttgtggtaagagcacaactggaaaaaccataccacatctggaaaatggacatgttgaacacacttactccttaagcgatgttaaaaagccagatacatgactcacaatttatatttcaaagtagtttgatggaaattaagtatttatttatacaatttattaaaattccctatatatgaatttatatgaactttttctcaagacaaaagtgccattaataaacttaatgattccttcatgcttatgatattatgcttgtgactggatgtacagtcagtatttgtgtgtaaatttaaatatataaatttcatgtgtatgtgcagttaatattcattcatgacaccttattcagggaaatactctggaatactttacatgtgggatctacctataaagatttatgaagtgctaacctggctactagttataaatattgtgctcaatttgtatcacattagccatttacaaaagtgtgatatctcaataagtcaaagcatttctgtatttctaagttgtttaataagaagtaaatccaaagaatattaagattatccttgagtataaatataatattatggaggtagggattgttaatttcaatttcagcttttatcaggtgtatggcatgttctcattattaatagttggccactattgggtaattcaccaggtcacccactgccaccccaccctgctgtttgcatatgcataacattaggggttttcatactggaaggagcatggtggctgtgaggtaaatgaattaaacagtggacaaggttagacggaggggactgtcatagtccagacaagagatgatgacaccttaacttgagcaggtagaaaggagaaggagggtagggagtaaatttgaggcattgagaagaggaggaatgtagaatgacttccaaactccagtttaagccactgcattatcatgcattaagagtgcatgatagagcagagcacaggtgtgagagacccgatattcatgcttgcacgtgctagcctcaagagtctttggggcatccaggtgaaaaatggcttgtggcctgtagattttatgggtctgggactctaaggagtgatacaagctggggatattaggagttatcaatgtgtagatggtgtttgtggtcctcactattgttgaaatttcccaagaaagtatgtaatgaaaaccaaggtcatatctttggaaaacaggaacatttaagagggggcagaaaacaactgagaagggaatactggagaaggaatttggagattgcattaggccgttcttgccttgctatgaagaaatatctgagactaggtaatttattaaagaaaagaggtttaattggctcacagttctgcagggtatagaggaagcacagtggcgtctgcttctggggaggcctcaggaaacttccaatcatgacaagaaggcaaaaggggaacaggcacatcacattactagaactggagcaagagtgagagagctggcgaggaggtaccacacacttttaaatgaccagatctcatgagatcactcactgtcttgaggaaagcaccaagccatgaggaatccgcccccaagatataaacacctcccaccaggcctcacctctagcactggggattacaattcaacatgagatttgggcagggacaaatatccagactcttatcagaaatgatccaggatagagcagcagcggggaaattaagagacatatagcaaatgccaccgtgcttaagcgttgttggcaaccacaaaagtagaagcggcctcaatagaatcatcagggcagaaaataaacggtaatgagctaaagattaaatgtgaggcagggaaattacagcaataataatgtagaagtttggtcatgaatagtggcattaataatttaggacatataagatgaaaggaaatgagtatgtttgtttctcttaacacgtaaactacttgaatacaggcacagaaatgagcaaattggggacgagttgtttaagagatagcaagaggagaactaactggtggattaagatccctgaggaggcaggaagagctgtgtttcagaacacagatggatgtatcaatctctggcaggcaagaagtggaacacctctttgtcactaccgggcagacaggaaggatgaatggatgaaaatacagataaactatgtggacagaatggcagagtagataaaggagtttgtacttaatcgtttctgtcttctctgtgaaatagtaaacaaggtcatctgctgcagatggagggccgtgtgccacagagagtggtgaacaagggaagaactttagggagagcactgggaatgacttcagtgcttacggagagtgttgaacattgggaatcacttctcttctgccacttgatgctatgtgaaatcgtatagggtgtgtgtatttatgtgcatgctcacgtgcataatcatgggtctacaaattacctcggaattcttgttcatttaaaatagatattgctgcacttaaacagctatattttatctgcaatattgtcccagggtaactgatctttgtaataaagactctgagttacttcagaatttttcaatttatcataatatttagactgaattttatatattcaaattactcaaaaactgtaatttactttgagtatatacacacatacacagagagagagaaggagagggagagagggtgggcaaagaggactcagagttgatcagaatgtttacttaaccagaaattctcacttcttggccagttcatagcatttacaggaatttattcagtgttgtgagatatcactttgctgtttaatttacatgttacacaggctattttctatgcttcctaacttagtggtacatcttaaccaccctggtgttgaagcgacgtcctgagattggtcaggctcgtggtcagggcagccatgtgtggagcccaatggggctggggcaggatgctgaagccatccacagggttctccttgggtcttatgttgatggctttctgttgttgttttgattttaatgttatattttcatatattcagactaatgctgtctttttcccttccttcaacaggaagcagctcttgaagctcaccttgtccctgtcttgcactctctctggccttggattttgatggatgattcattgatgcaaatttctctgcagctcctttgtgtctatactgcaaattttccaaatggtaataggatccaatactgcctttcaataatataccaaaatactagttttataaatgttgttaaggtggactggaaaaactaatacatattttgaagtatttctctgatttattgaggatatgatgggcaaaggcaagctttctcgtaggtattatgagagcagacagatattttagtgtgtttgttgacatgagagagtcattggcagcgcagggaatagagagggaggactggtctgattatctggcaatgggaaattgagtttagtaggaaaattgagaggataaaaattatgatgtaagacctcaaaagccacgtgaaggttagaacttctcatagattctagagcaggagactggcatgttgaaagttctcataacagttggtctggtgatacttgatatcactagggctcctctttcgctcatgcacttgatagacactttatcaagagcctgtggtgggccatgcattgtgagttctggtgagagtgatctgaaatgagataggaggacaggtcatgtagggcctcagaggccagagtagggagtttggatttttatgtgagtgtaacaggatgacattggcagttgtaagctggtgagtggcatgatttaatttgtgtttaagaaggattaggctgggtgcagtggctcatgcctgtaatgccagcactttgggagacccaggcaggcggatcacttgaagtctggagtttgagactagcctggcaaacatgaggaaaccctgtctctactaaaaacacaaaaattagccaggcatgatggtgcatgcctgtagttccagctactcaggaggctgaagcaggagaatcacttgaacccaggaagcggaggttacagtgagccgagatcacgccactatactccagcctgggcaacagagtgagactctgtctcacaaagaaaagaaaagaaaaattgccctgggtggtatgtggagaatgaatgattgggagcaagtctagaagcagggagacttgtcatggagatataatggtggcttgggcttgagtggtagctggagagattgagagaagtagacagattcagtatatagctcaaaggtagagtcaaggatacctgttgtgggaggtaggaaggaaaaaaaggtgtccggggtgaacttcatttggagaaatgagcctgagtgcacagtagtgccatttactaaaatggggaagatttaaaagaagcagacttgaagtgagaaagtagtaggaatcaagagttctgtttggtcttgttaagtctaaggtgttgatgttcactcaagtgaaaatagtaagctggagttgaattcaatggagtgtagagataagtttgaagatttcaaatgttgggaatattattagttatttattgctacaaaagaaattactctaaaatttagcatctgcaaacattaatcatttcattatgccacggcttctgtggctcaggaatctgggcgtggctaatctgggtggtcctcgctcagagtctctgcaatcatctgaagtcttgactgggatagaggatccagtgtgactatgggagcctcaattccttgctacttagggctgtctcaaacgacccagaatgagtgggctgagggcagaagttatagtctcttataatccagtctcagaagtaactgaacagcactcctagctcttgtgggtcacacataccaaccctggtacagaggcaggcgccactgggaccatcttggaggctggctaccacaggagtcattgtcatgtagattgtacttaaagccacgtggctgtttgcgattacccagggagaatgtgtagatggagaagcagaaacccatgaccaagttctgaggcacatcaacatttggagttaatcaaaagatgagaaaccagcagaaaaaaaagagaaggagcagccaatgagataacagtgcacagtcacagaaagtcagagaagggcatgctcagttgtgtggaatgctattgaaaattctgctaaagtgaggatagaaaaaatggctgttggacttagcagtattgatgttcttttggaccttgagggtaattttagtgcagtgccagaacagaaacctacttagtgtgagctgaggagagaagatgaagaagtagaggagacagcttttccaaaatgtactactcttaagaggacaaagaaatggagcaacagcaagagacagatgtggagtcaaaggaggagtttttgctcgtttttaaagatgtatgtttttaaggcatgtttattaacttaagggattgggagaatgaggtgcaggaaagagtgcaggtaagagcccagcctgagagggtaagagaggtgagagctagagcacagctgacaacagaagcggagggaaggctgagaggaaggatgtggatttaggagggctggtagacttgatgggaatgatgagaaaattcccattttgaatacttctgctttcttcatttaggagagaacactgaccactaagaatgagcaaagacaaggagtagaggtgatgtgagaagaggagaaagtgtgaagtagctgtttttagaggaaggaaagtaaacacaccagagaagcaaagtaggattgctggcagtgttaagtaccacttatggtcataaatttaagaaaataaattagaatttatggtcataatttatggtcataaatttaagatttaaattttattaaatttatggtcataaatttaagatttgactagcaagtttttgtactttcttctaacaacactcagtagcccagcaactggggtctctgaatatcaaaggttatacagagaagggactggaactcacaacagttaaggagcccatctagttactgccagatgctgttgatggcttattcctttgaataatctgccagatgctgatgatggcttattcctttgaataatctgacacctctggagctgtccatttcgatacccaactcaggttgtctccagtcagcacaaagagatataaacagaccttcaagctcttgaacttgaactgtcattgaagcatatgtgtacaggattgtccttgccttcattctgtgctgttaactttctccattccttaggtctggtgggaatgtctcctttcagtgcattttccagctccactagtatatcttttgtttgtttactcatcttttatgagtttcttttacagaatgtatttgattctgatcagtttatacttaagttggcctcctcgtatgaactttcacaagtcaattataccttaggtttatgtataatacagtcttattgatttaacattaaaatatatttctaatttttttttctccctcaataagtctcattcagttacttaatttcctgagaaacactgaaccctggaaagcctgtagatgccacttttggctcctgctatgctaagctgtatgaccttgaacaacaaactggcttttctgagctccatatctttgttgaccaaatatagaaaatagtatttgttttgtccgctttcccagggatattatgttccttatttgtatgttatgtaaaatgaaggcattagacaagttatctcccatttctaaaattctgttcctttacacaggcctttatttagatgttttctttagcaactattaaaaaccctagtatgtttattttattctttttttaaaaataaacctggtgtcttaaagtgctttagtgagataattaggccctcagtgaggacagtatatctattaggttgactgtagacaccaacattagcctccattgctaatttgcagttcacaggttaatggcctagtcattttgttagacagatatgctttgccacttagtgtcttcaaaaactaaacagggaaactgagaagacattgtgataggctgttatttttgaaggttgcagttctctttgttggtcaagttgtggacaacaccctgttcaagctacacatagaggagccgtgagcaactctctgatgctgtgtatcctaaagttggcttcccagatgccactggagaacaccacggttcagcagatggtttttatgcttctttcaaacctggccttgtcgcatgactgtaaaggagtaattcagaaggtacgcacttaaactccccacatatcttaaaagggtactcagtgaaataatctttccaatcaaaagtttacaactcaatttctaagattattatgattttgaggcattttattttaaaggattataaaagggttaagaggttcactttgtttaaagccagttgatagatgacacgtgcagaaggacaggagctagagtagagtcataccatttccttctcatttatcttcttagctttcggattgtattttatcattctcaaagatgagggttttagaaagatagccgtcttacatttattggaaataataaaagtaatatattggtctttaaacagaccaaattgggcagtaacaatttcagtttaatttcattgacaaaatggtttatgaaatcacagcccacttcccccagttagacttaacttccttatggcatgttaagcaattttatgagttctctaggattccagttcccaatctagacttctcatcactgattttaacttaaggtaatttaaaagggatgtaatgagttaaataaattctagtacacatgtgcacttatattctgtatttagatgtgtataaacagaatccctaattgggaaaatcccttcaaatttgaatgtaatcagattatatactacttactagtattgtaatttgagtgtttccatttcttttacttgaaggccaagataaattgcagaagttgagagcatttataagaattgagtctccttttcctctactgtttcttctccctgaactcctcagaagatactttgttatcaccacataaatagaaagttcggtctttctaaggaaatggaaagatcaatcttaccaaggaaagatgttttcagtggcacgttggagccagcctcctactgactcatgagtgtcatcttaaatttgcaggaattttataaaaattccagttgatgttacattgttattttgaaatcagccacagtgggcatatcacaccacgtaattcagcgaactgtacaaatcttggatcttttctaccctcaccacaatcagttgtttatttaccagcacatggctggatattttcttcatgtatatgttcatgtatgtcatatatgtatatatatttgaatatattttcttcatatatgtattcatatacatgcatcacttccaaaatgagacattctcttgaactggatatatgtgattagcatccataagaatgagagattctgcatatgtgagagcagagcgggggcagtgctttccaccacttccttatagagcatgttggtgggaagctaagtgggagcacccagaaggaatgtaagtgccaatctcgagtctggtctgtgactttgagctggagacctattctctttcagcttcatttgggtttaacaaaataatctctaagatatgttcaactcttaatctgttattctggtgctatacttaagaatattttgatgaagtgtgatcagactctctttccagggacggattaatcaagtctttttcctctgctctaattaggaaatgcctgagacttcctctgctgcattaagtaataatgagcccagacacttaacacttctacttcttcattactcatctgtaggacatagaaaatgcagcaggtggtattgtacaactcaggctccgaaatatcctgcttgtttgtttttttttctaccatggtatacatctctacatattctacctggtgtaggaaattgtctgaaaacatctttagaagcagcaaaaaaaaaaaaaaaaaaaaaaaaaaggagtgcccacagcacatttatatttgagagcactgacatctgctttatcacccttgtcagtcccaaatccagcaagggttgaatctaaaaactgtcagtttggctgacagtaggtgtgagtgacagcacatgcagctgaaagtgggcatgtaattttacagtttacttattgtgtgggtaatgttgataatatttctgtagctcatttcattcttaacactcagagtccttttgtataaaaacgttaagtttattttatagattaaagccaacatcttgattttggtctaggaaaacctaagagataaactggagtagatttaaacagagagagagaagagttattctgtgcaatcataaaagttaagtgattgcatttcatttctaaaatgtccacctaactgtggtttccatgctgccatgggctgcagcttgatgcagcacttttatactttgcatatagattagtctaagcaataatttattatctttcttatagtgaagggtttggtggggttttttggaaggggctttatttggaggttgaaaagactcttacagttcaaataatagagctttctcatctgtaagcataatagaatgacgtgtagccatcagaaattcttacttgtaatgataagtacctgggataaagtgaatgtaagatgtatctatagatttgataaaaacaacaacaacacctgtagctataatgattcaaaataccctcactacttccagagttgttaactagtattcaagactgatttggatttttgccttttttccttccatagggtagcttttaatagcaaaatcaccagaaggcagagagaagagaaaactcaagagccctgaaataatctccaaacttaattaccaattctaaataattaagagttaactatagtatacttcatccatcatgaggaaataattagcaggaattaaaacttgagcactattttgttcttcttacctttttcacttatgcttggaaataatatagatggaatattcagaagctattagaaaggagaaattaatgtagagggagagtatatcagaatgttagttaattggtcaccaagggactaggaaaataatgaaaaagatgagaagaaaataatattctctctatttatccacagagtaacttcttacagaacttcctctctctagcattgccaaaaggaggaaataaacatctaagtaatctgactattctttggttgaagttactcctgaatatatcatctggagaagatgggcaacaaatgattctgaggcttgatggctgtctagacttactaacagagatgagcaaatacaagcacaagagcagccctttattgcctcttcttatctttcataatgtttgcttcagtcctgcaaataaacccaagatcctggctaatggtaagttttcacacacacatacatttatatatgtagttattcatagactgttcaggtcaacaccaaataattttataaataattttctaggcatttattaagcacccactgtgttcaaagcactgtggaaggcatgggaatgaatcaggcatggcttcagccttccgtgggcttccaggagtctcctgaggttagcaaatcatgtcattccagtgcacatactggacacctggaggaaggggagccgtggacgagggctccctggccttaccttctgctccctctcctctctccttgctcttcctctaactccagctcccctcttctgcatcttcaagcaaatgctactatgtcaatgaagcctctcgggaaccatgtgttaatataatagccccgcacccagggggccttctctttcctcctcctcactatttcctttcctggttttgtttccctccgtagtattatcgccatctgatagattatgtgtttcatgtatctgtctattcctagtcttcccacactagaaggtaagctcttatggggtcaggaggcttttgtctgctttgtttatgtgtagcacctagaattgtgcctgcaactagcgagcactcaataaatatttgatgattgagagagatcccaagcagaccggagagagttcagggcttgagatcagatggtgcagtgagcctcgcagagacttcattctctgagatgtaggacagatggaggcgaggattggtaaggattcagaaaaaaattgaagcaaaaagaatcggaaagatctttttctgcaaccatgtgttatctctgtgaggagtatgtgaatttcgtggggagtgagttttataaaagacatgtgttctagtgaaaaacagaaggtgggctccagacccctacacacctggtcttgaatgccagcactagggcatcactccagcgtcgcctggtgcagcctcgctgggcccagcttcttcatctataaaagaagcccactcttcttggtttggtaagaatcagtttataaacacacataaagtgcctagcgctatttctggtacatgataaatgtttaagatagattcattctcttgtttttttcatgtttttcacttaaacttttctcagaagcatttttctgtgaaatcaagggttttctaagtgtacgaaaatgattcttcttatattttgtggtgtatatagttgtgattctatttttctgataagcattctgataatcaactgctagatatgatatagaaggatgtttaaagttcagttagcttgtagcagacctaaccttactgtggattttgcactctgccttccggtggctgctgtgctgatgctgcgttctctgttgctgcgtgatgtacatcactggttttatttccatcctctcccactgtagctgcttcagccctcacatttgtaaaatgagggtgatgataatccctcctcagggcaatgagagagcctgtgaagtgtttgtgaccattcttggtatatagcagctactcagtaacatctgttattgtttattcacctttcttagaatgattttttttttctttgagggctacttactccagtttattattgagagttggaaaaaggtcaagctttttgagaagtgaaggagagaagtctgcattttccacttctagacccctctagaattatttttagcatttctttgtagtcagcaatgctttttctccttcattagcttaaagcagatggataaactttggtgagaagcttcccctagcccacagactagagatcagtgggcttttcaggcaggggtaagataagagacatcagctgtgcagtttctgtgtggaactataaagggatgtcacagcctatgcctcgctttccacttggggatttatggaggaggccttagcagagtcagccagcttaaaagtctcccaggaaaggctgcctctgatcggtagcacccacacatctggtttaaatggtcaggagtggagtgtgcagtggagcttgaccttgctggtaaaaatagatctggggcttggcatggtggctcacaactgtaatcccagtactttgggagaccgtggtgggtggatcatttgaggtcaagagtttgagatcagtctggccaacatggtgaaaccccgcctctactaaaaatacaaaaattagccaggcatggtggcgggcaccttgtagtccccagtagtagaattgcttgaactggggagacggaggttgcagtgagccaagatcgcgccactgcactccagcctgggcaacagagtgagacttcatctccaaaaaaaaaaaaagatctggaacattccttgtttctggcaatgccagactaagtctcttctgaaaacgacaataacatgctagacaggctgtattaaaatgcacctcaaaataatcacaaaaactgaaaagatagaaactcccagtccagttttgattgaaagtcttgcccagacaagtaagaagtatatagaaaattattttgccccaagtgcatttgccaaggttgtatgcttggcttttgttgaggagtatcgaggggtgagaggacagaagccgcgattccccaaagtggggattcttactggctatcctgcttgtattaagctggacctccaaagaaccattctcttaatagatggatgggtcaaaaataagttggtttcccaaacttcatgaaggagactgtaaagaaaaggaaaaaaaaaatgtgagaatgggtactacagactgcttctgatagggctctgcacccaaagttggccgtgaacttggcttgaggtgtcttcgattgatggtgcctgtgggtacttagcagaaagcaaactgccttggtgatggatgaaagacaagttcatactgggcctcagggaacctctacaaataatttttcaaaagcattaaccagtacaaagttagagataatcaagcacattaggagacatggcaacatgtagtaagaaacagcagaagaataaaaataccagcttatctgcccagactttgaatatgggaattacaaagcatgggtttaaaaataactttaattataccatatttagataaataaatgacaagcttgaaaattttaggaaatgggaaactgacaagttgaaatatttgaaaagaaccaaacagaacttcaagaactttactgtgcagtatgataatcagccacatgtagctatttaaatttaaactaattaaaattattcagttgtactcactacatgtggctagtggctatcttattaaatagcaagatataaatatttccattattgtaggaagttctgttttacaacagtaatctagaacttcagtggccaaaattgaaaacttaatatacatgtctgacagcaagttaggtatagcagagaacttaggaattagaagatagattagaaaaatattatccagaatgcagcagagaaagctaaaaagatgagaaaggatcaaaagaatcaaaggtaagtgacacagcagatatatcaagacagtctttgtgtttaatgaagtgtcctaggagaatgggagaggaaatatttgaagaaatgatgggtaaaaactttaagaacttttctaagacattaatgtcaccataactgacaactcactgtaattaccaaactgacatccctaaacttatacttaaaccaattgtattaagaaggtaatattcaattattatattaaggtaacattcaattattatattaaggtaatattcagttcaaatattcaaaaatactgtctcattatttacattttactactgtatattcactttaggttatttaaatgtttatatgagagttcagacctacttgttgaactcaaaattgttttattgctttgttatatgcatgtttcacaataacatttgttttgttaaaaaagtcgatccacttgcattatcagaggggcccaccacattaattcacacacacacacacacacacagacacacacacacacacacatatgtatatatacatacacacacagtactttattaaaaatgctttaagggatagctggttgaaggagttataaacttacttagatcagaggagttatatattctgagtgtttgagacaacatttaaaaacatcacttgatgctactcagatggaacataaggaagtcaccctcccatttaataaggggacatttgatgtgccctaatgagtagcacttgcagccataacctcacgtgataaattgcatctgcaagctatgtacatggcttggttctgggtaggttatgatacacgacaaccaaagggcatcagatagtgcagatgaggtgttcagggagtcggctgcagcgtgcccgaaacatcactgcacctgcctttcacattgtcctgatgcacatttccagttcactttagggagcagctttttttgttttgtttttgttaaatatttaaaatcccttaaaataaaaaaattgaattatgtagacaaaatttttgtttattctattctggaatctttcacacaacgaatatttattgagctcctaaaatacactagcattgtggttggtctaataccagtgagtagacactgccatctaactaataccagtgagcagacgttgccctgtaactaataccagtgagcagacactgccttctaaccagtaccagtgagcagacgctgccctgtaactaataccagtgagcagacgctgccctctaaccagtaccagtgagcagacactgtgctgtaactaataccagtgagcagatgctgccctctaaccaataccagtgagcagacgctgccctctaaccaataccagtgagcagacgctgccctctatctaacaccagtgagcagacgctgccctgtaaccaataccagtgagcagacactgccctgtaaccaataccagtgagcagatgctgccctgtaaccaataccagtgagcagacgctgccctctaaccaataccaggagcagacgctgccctctatctaacaccagtgagcagacgctgccctctaaccaataccagtgagcagacactgccttctaaccagtaccagtgagcagacgctgccctgtaactaataccagtgagcagatgctgccctctaaccagtaccagtgaacagacactgtgctgtaactaataccagtgagcagatgctgccctctaaccaataccagtgagcagaccctgccctctaaccaataccagtgagcagacgctgccctctgtctaacaccagtgagcagacgctgccctgtaaccaataccagtgagcagatgctgccctgtaaccaataccagtgagcagacgctgccctgtaaccaataccagtgagcagacgctgccctgtaaccaataccagtgagcagacgctgccctctaaccaataccagtgagcagacgctgccctgtaaccaataccagtgagcagacgctgccttctaaccaataccaggagcagacgctaccctctatctaacaccagtgagcagacgctgccctctaaccaataccagtgagcagacactgccctctaaccagtaccagtgagcagatgctacactcacagaccctgccttgaaccttttcctattttagtacccttatttatttatcttgcctgattgccctggccagaagttccaatactgtgttgaacaggagtggtaagaaatggcatccttgtcttgtgccagttttcaaagggaatgtttccagcttttgcccattcagtgtgatattggctgtgggtttgtcataaatagctcttattattttgagatatgttgcatcaatacctagtttattgagagtttttagcatgaaagggtgttgaatttttttgaaggcctttctgcatctgttgagataatcatgtggtttttgtcgttggctctgtttatgtgatagattacttttattgatttgtgtatgttgaaccagccttgcatcccagggatgaaacggacttgatcttggtgaataagctttttgacgtgctgctggattcagtttgccagtattttattgaggatttttgcatcgatgttcatcggggatattggcctgaaatttcctttttttgtgtgtgtctctgccaggtttttgtatcaggatgatgctggcctcataaaatgagttagagaggattccctctttttctattgattggaatagtttcagaaggaatggtaccagctccactttgtatgcctggtagaattcggctgtgaattcatctggtcccgggctttttttggttggtaggctattaattactgcctcaatttcagaacttgttattgatctattcagggattcgacttcttcctagtttagtcttgggagggtgtatgtgtccaggaattcatccatttcttctagattttctagtttatttgcatagaggtgtttataatattctctgatggtagtttggatttctgtgggatcagtgctgatctcccctttatcattttttattgtgtctatttgattcttctctcttttcttctttattagtcaggctagtggtctatctattttgttaatcttttccaaaaaccagctccgggattcattgattttttgaagggtttttcgtgtctctctctccttcagttctgctctgatcttagttatttcttgtcttctgtaagcttttgaatttgtttgctgttgcttctctagttcttttaattgtgatgttagggtgttgattttagatctttccccctttcacctgtgagcattttgtgctataaatttccctctaaacactgctttagctgtgtcccagagattctggtatattgtgtctttgctctctttggtttcaaagaactaatttatttctgccttaattgtgttatttactcagtagtcattcaggagcaagttgttcagtttccatgtagttgtgtggttttgagtgagtttcttaatcctgagttctaatttgattgcattgtgctgtgagagactgtttgttatgatttcaggtctttggcatttgctgaggagtgttttacttccaagtatgtggtcagttttagaataagtgcgatgtggtgctgagaagaatgtatactctgttgatttggggtggagtgttctgtagatgtctgttaggtccacttggctcagagttgagttcaagtcctgaatatccttgttaattttctgtcttgttgatgtgtctaatattgacagtggggtgttgaagtctcccatgattattgtgtgcgagtctaagtctctttgtaggtctctaagaacttgctttatgaatctgggtgctcctgtattgggtgcatatatatttaggatagttagttctatttgttgcattgatccctttatcattatgtaatgcccttctttttcttttttgatctttgttggtttaaagtcttttttatcagaggctaagattgccacctctgctttttttttctcccctgcttgccatttgcttagtaaatcttcctccatccctttattttgagcctatgtgtgtctttgcacgagatgggtctcctgaatacagcacaccgatgggtcttgacgcttcatccaatttgccagtctgtgtcttttaattgtggcatttagcccgtttacatttaaggttaatattgttacatgtgaatttgatcctgtcattatgatgctagctggttgttttgcccattagttgatgcagtttcttcatagtgtcaatgttctttacaatttgatatgtttttgcagtggctggtacaggtttttcctttccatatttagtgcttccttcaggagctcttgtaaggtagggctgctggtgacaaaatctctcagcatttgcttttctgtaaaggattttatttatttttcacttatgaagcttagtatggctggatatgaatttctgggttgaaaattattttcttgggccatacgcagtggctctcacctgtaatcccagccttttgggaggccaaggtgggcggaccatgagatccagagtctgagaccagcctggcccatatggtaaaaccccgtctctaataaaaatacaaaaaaattagccaggtgtggtggtgcccacctgtcgtcccagctactcaggaggccgagacagaagaattgcttaaacctggtaggcggaggttgcagtgagccgagatctcaccactgcactccaaacctgggagacagagcaagactgcatccccctccccaacaaaaaaagaaaagataaattctttaagaatgttgaatattggcccccagtctcttttggcttataggatttctgcagagagatctgctgttagcctgatgggcttcccttggtgggtaacccgacctttctctctggctgcccttaacattttttccttcatttcaaccttggtgaatctgatgattatgtgtcttggggttgctcttctcgaggagtatctttgtggtgttctctgtatttcctgaatttgaatgttggcctgtcttgctaggttggggaagttctcttgcatttaatatcctgaagagtattttccaacttggttccatttttccccatcactctcaggtacaccagtcaaacataggttgcttcttttcacacagtcccatatttcttggatgctttgttcattccttttcttttttttttttctctaatcttgtcttcacgctttatttcgttaagttgatcttcaatctctgacatcctttcttctgcttgatcgatttcgctattgatacttgtgtatgcttcacgaagttctcatgctatgtttttcagctcccatcaggtcatttatgttcttctttaaactggttattctagttagcatttcctgtaaccttttatcaaggttcttagcttccttgcattgggttagaacatgcttctttagcttggaggagtttgttattacccaccttctgaagcctgcttctgtcacttcgtcaaactcattctccatccaattttgttcccttgctggtgaggagttgtgatcctttggaagagaagagttattctggttttgggaattttcatcctttttgcactgggttttcctcattttcgtggatttatctacctttggtttttgatgttggtgaccattggatggggtttttgtgtggatgtccttttggttgatgttgatgctattcctttctgtttgttagttttcttcctaacgggcctctctgctgcaggtctttgggagttggctggaggtccactcctgcccctgtttgcctgggtatcaccagcagaggctacagaagagcaaagattgctgcctgctccttcctctggaagcttcatcccagagggcaccccccagatgccagctagagctctcctgtatgatgtgtctgtcaacacctgttgggaggtgtctcccagtcaggaggcacgagcgtcagggacccacttgaggaggcagtctgtccgttagcagagctcgagcactgtgctgggaggtccactgctctcttcagagacagcaggcaggaacatttaagtctgctgaagctgcacccacagccgccctttcccccaggtgctctgtcccagggagatgggagttttatctataagcccctgactgggcctgctgcctttctttcagagatggcctgcccagagaggaggaatctagagaggcagtttgggtacaacgtctttgctgagctgtggtgggctctgcccagtttgaacttcccagtgccttcgtttgcactgtgaagggaaacaggctacttaagcctcattaatggtggacacccctctccccaccaagctcgagcatcccaggtcgacttcagactgctgtgcaggcagtgagaattttaagccagtggatcttagtttgctgggctccatgggtatgggatctgttgagctaggccacttggcaccctggcttcagccccctttccaggggactgaacaactctgtctcactggcattccaggcactactgaggtatgaaaaatctcctgcagctggctcggtgactgcccaaatggctgcccagctttgtgcttgaaaccctgggccctggtggtgtaggcacccaagggaatctcctggtctgtgggttgcaaagaccatgggaaaagcgtagtatctgggccggaatgcaccgttcctcagggcacagtttctcagagcttcccttggctaagggagggagctcccccaccccttgtgattcctgggtgaggcgacaccccaccctgctttggctcgccctccatgggctgcacccgttgtctaaccagctccagtgagatgagctgggtacctcagttggaaatgcagaaatcacccgccttctgcattgatctcactggaagctgcagaccggagcttcctattgagccatcttgccagccaccctagtcatttttaaaaaacatcaagcagtgtgatatttgatgatcgtttttgtatagtagctcatgctactgatgtgtttgtatgatagtctttataatttatcatgaaagcagatctgtttttctgcctgccagaatgttagctgtaattgagtaactcattaatgtacctaattgtatacttatttttacacacttgtggtctttaaatgaatgtgccttttcttgaattctggccaaaaaatgaagcagcttcagtgtctttgacccttctatgcctgacatgaaaacaatgttttgaggttgtcctcccatataccacatggcataaaagattggttttgccatagtctagtgataccaactttatgtatgcattctaatgggaaaagaggggggtgtctgactagtccaagataagaatacaatgcagtgtctgggactgaacttttaaaaaatatatgttcatttttagaaaaagtcattactgtgcttgctgcctgtctggaaagtgagaatcaaaatgctcagaggattggagcagctgccctttgggctctgatttacaattatcagaaggtcagttttaaaaatcattgttacacctggggagcaaacaacaaggtataacccaggtataaactcttaggatacatccaaaggtgtcaagagttacagcaaaagaaaaaagacaaaatcaaagatccatgttccctttgctgattcatacaattagtaaaccatcagttgaaatctttttatttaatcatttcaacagaatgtctcagtttagaagagaatctctgaactgactttttcctcttaatttaaattgatttactttattattgcaattttagtatagattgtttcttctaaaagacgtatcaagggaaaacacatcttaaagtaaaactgagtaacaaaagttttatccaattgtacaattcccctttatctagctcagttcttgtacgactgcagcccaaagcctgctctgagaaaagggcaggcaacgtggagatttgtgttctactctttctctggcctttggacttccactttattgcagacatgttgttcccaagagaaatacccataagtatctagtgattaagtagtagccaagtgacagtgttaggatagacagccatcctagaatggtgttctctcagctgactgtctctgccggggctagttttctccctgctggccagagtcacgtacacaaggacaagagggtgttgttttctttctcacctgggtatccccagagcttagcacaggatttggcactttgtagtcactctgtaaatatttgttgaccaactgctaatatttggtatatgtgatcagaaatctgaggtttgagggagtatgaaaaactgaaaccaaggatgactagtttaaaatagcaaattgagattaggggagaaggagtaaaagagaagggaagaaagaaaatgggaatagagaaagaatcaagttagataagaggatatgggcaagacttcagaatgtgcaaggggattggctcaataggatgtattatgctaagatggaactctctagttatattattatatttcataatattctgtttaatactgtagttagcaatgggcagaattagtgttttgctatcatgatccataacacatggcaagaaacctaattaatggattgttctaggcaaaaacagctttgaaaagcccatcagtaaaaagaagagtggatgaagcatactccttagcaaagaaaagtaagttgcaataagaaagagattatagttaaactcagaagctattaagtggattttctgattaatgagatatttggacaggccacagcaaaatggcattgtaaaatgtgccaatattcagtatgtgctttaattatatcattttttaaaataataaaatagatagatgaaggtttaagatgtgattgcttctaaaaatgcatctgtgatcttcgtcttatttttgtactaaattttctttgccaacagtgaccactgtgctgaagtatgttcttagtgataagaactggcccaattagaattaactgtgagcagaaaacctggatctaacatcagggagctggaggacagtcttccaagaattgatcctgttacccttatatccacgtttccctgtgatgtggtcacaatactagagacggttttcttttcaaagcacattattcatttttagtgacaccaaatttcagtgagcgttattctctgaacattttttatgctaaaacactgaattgtgtctttcctgtactgtaatatatctgttggttatttgtgtttttatagtctgatttttttttttaagcaggggaggttttagtttgttttagctgcgaccatgaatttctggagctagtgaagttaaagattatgctttaggaaggatggtacataaaaaaagattaatggcattcatttggaattatagttaatggtatccattatggggggtactttttaaaaaatactctgggtaagctgttaatttaaaaaaatattgattttgtaacttgtttattttttaaaaaatgcaaaatattctggaatgctattacatcaagaacttagagctttaaattatatataaatcctgttcatatgtatttgtttatgtgtgtgcctcctaagtatagtaccaagtttcataaactagtatttctgtactcttatttttctatctcagctttcccaaactcagaagcaaaccctctaaatgcctattatttgaaatgtcttgaaaacctcgtgcagctccttaattcttcctgagtgccatgggatgctacaccttgaagctgacagtcatcaacaggggagctaaagttgaagccagctgtgtgtagcagctgttacctgaagacgtgctacctctctacaaagtgttgatccccttctttcccatgagagagagaactggtgatactccaacaccgtccagttgtggcagctctccagaagtaatagcagctgacaactttctgtgccttttcctttctgttgaaaaggcatagaaagttctgggaacataaacatttttacccttttctatgccatttattttgtaaaaatcctatttaaca

SEQ ID NO: 15783 - DNA, 201732 bp, Homo sapiens
cggcagtttaattctccggcggctgcagattgacgggacgagatggtcctggcagggctcatcaggaaactcggtaactgtcagcttgcccctcgcccaaggcaccccccgcgctctggccacttgctgagaatggtcgtgtcacgtttccgcggccggccgctccgcgaccgctccctctttcacccccgctttgtcaggatagcccccggggacccatctcggactttgtgtaaacttcgcggttcgcgtcccgaaggcaccagtggcctgcttctgaaaaaaactggtttattccgtcttcacgccgctcctgcccacagcataaataacgtagtctctttgcagtcgggaaataaaatagttttgtgccgttcgttgacaggtcatcagctggccgagatcagggagcgcgctctcaagagtattctctgcaagattgagcacaacttaatctgctacgctgatctcattcaggagaggcaactttttcttcatttgctggaatggttcaatttcccgtccgttccgatgaaggaagaggttctgaacctgttaagcagattggttaaggtagggtcattttgaaataaagaaaataatcagacgagtgacttgtttcttagtcatttaattgtagcgtttattgaaagttaaataattggggttaaaagtttttttaatcaaccagagatgtttaattttaattaatctgggtatatggttcatcttttatttgtgatactgaatcccacatggtctctgctgtgctcagaagtaacacagaacttcttttgagttttggtatgttctgtgtttttgagttatctttggaggttaatatttgtattctgtttttgttttctgacatttacatcttaaaaactagatatgtcagtatgaaagggagcactttaaaaataatgttacataaccgtgattcataaataccaatgttaagttgcttgcccatatgcttttagattggtattcttatgcctacctcaagagtagttagttatcggggtcagatatcaaagtgtaagtttaacctttcaaaactaaatcactgtacaatggtagaggaatcttaaactactttgacatcctgttgaccggttggggctgggaccataaggtgagtgtcagtggaaaaaagtaacccattaaaaaaataagagtagggattgataatgtgcatttctagcgttcagtgtgttggctcatctttcataaatgttatcaagtgttggatgtatgtctctataggtgtatgtgctcctcatggaagtgccttacttcggggcagagccatgaaggatttgtttttcagaaaaggaacatctgatataccaaaaataattttatgttttgattgctgtaagttatagagattttgatacagttattctcaagatcatcctcttcttattttagtatcccccagcagtccaacatttggttgacgttggtgcagtagagttcttatctaagcttcggtctaatgtggagccaaatctgcaggctgaaattgatggcattctggatggactttttcttcttccttcggaagttcctgcactatcttctgcctcataccaaaccaatcaaactggtaactctttggaatctgttaaatacaaatatattaattctaatggtaaattttaaggaaagggagattagatttttttaaaaaggatttctcccacctcccccaaacttatttttcttgtgttaacttacatgattttgacctttttcccctcctctactgttagtcaaaggatggtacatttgcattaattgctttttgggtcaggcctaaacgatgccagtgactttgcttttatgaggccagtttgacagattatttttttggcaataacaatgtatttttattgagcacatgagtgctcattgttcttagtgctttatatttgtatttttgaccttgttcgtcatattggagtataatgatatctgtcctagctcatgatcttgttgtggggaccaatcaaaacgacataatgcaagtatttttatatgctgcagtccatcatgatatacttgttaaaatccaagtcaaagagacatggatttaagtctcagttctgctgctagttgtgtgaccttggctaaggtaattaacccttccaggcttcagttttctcattcaaaaactgggataataagaaagaacaccgggctgggcatggtggctcacgcctgtaatcccggcactttgggaagccgaggcaggtggtcagaagttcaagaccagcctgaccaacatggtgccccgtcactactaaaaatacaatacaaaaattagccggacatagtggcgggcgcctgtaatcccagctagtagggaggctgaggcaggagaatcacttgaacccggggggcggaggttgcaacggtgagctgagatcactccattgcactccagcctgggtgacagagcaagactccatctcgaaaaaaaaaaaagaacactttctcatagaatcgtcatgagattagatgagacaatgtctgtaaagtgcttagcacagggcccagcatgtatgaaatgtggctgtgttggctgctgtgctgctgctgttgtgttgttgttaatgcctagtatagtgccttgcacatggaatgcatttgaattgatttgaagaaaaacatcttcatgcaatttatgtgactgagtagtaaaagtaaaaaaaaaaaaaaaaagttttgatgcttaacctgttagaccatattttcttctctgccagtactgttacagcttcagctgtgggtactgcggttcacaacaacaatagcagctgtcatttattgagttttgttgtgggcattgaatacattgatttaaacacatcatcttgttaaatcttaaagcagccttttgactgagatgttattagtcttactctatagctgagaataaaagtataaagtaacttgccccacagtaccaagttttctaacctgtagcagatgcaggattctaacattgctttatctggctcccaaacctgtgatttttaacaatatattttacagtttcgaagacatcacaaataaagtagagtcttacactgtgaatttttaatctgattccttgcgggtgaaagtagaggaatggtttagggctaaatgttatttttctttattagtgttaggaactattgccatgaaaacttaaaattacaaactatagttttagccttttcctcattttcattgcagctgaactgctgaacatataatcgcatgttatagggaattgtaaaggtattgaaagataatatttgactcctttgtttttgacaactttctttttaaggtatgaatgaaaattgaagtgatcaggaactatataattggagtcaagggagagggagatggattaggaagtagagagggatagtccttgaatactttgtagcagattcttcgtgtacattctaacaaataactgtgtttggctaacagtaaaagtgagagggaaaaagcttcttaactggaagtgggctcaatgtgcacattttttcctctttagcaagatagatcattcagaaaaaaaactggacttttttttaatttttaaaatgattccaatacttaagagaaaacattaccacttaaagaaagtaagtttcacttttagcaaataaggaatcgacaatacagtaatgtttatttccttttcagaattgtcaaaaaaccctgaaatcttaacaggatattttccccaagacaaaagtaatttccagcagatggaagtgccgccacgaccagtgggtgtgtatatgtcgggaagtaaatcctgttgacttgggaagttgaaaattaatgtacttttttcgttattgtgaagatgtatttttaccaaacttgaatgtttcagcaccaaactatcattaaatgttttagttgtttcaagttagtttaggatatcgagtagaaatgataaaattttgtgttattctaaccatatttgaacaactgtgtagatggatggtattaatggcagtagtatgtcgtactgaatgaacatgagtttttttttttttttttttttttttttgagatggagtctcgctctgtcgcccaggctggagtgcagtggtgggatctcggctcactgcaagctccgcctcccgggttcacgccattctcctgcctcagcctcccaagtagctgggactacaggcgcccgccactacgcccagctaattttttgtatttttagtagagacggggtttcaccgttttttttttagccgggatggtctcgatctcctgacctcgtgatccgcccgcctcggcctcccaaagtgctgggattacaggcgtgagccaccgcgcccggccgaacatgagttttttgaggcattgtgccctgcactacacatgtcatctcatttgttctccagcttaacgatggcaccatctatccagttacgccagccagaggctgaagatcattttagtttcttttcccatttcctcaccacccagttaattaaaaagttctgatttagaaccctgtttctggaatctggaatctcatctccatctttttgtatctggctgtgttcagcctcagctcacatgccacctcatcagagaccttcctggtgattctagccagtgatcacttcctatgtgtagttttcttcctaacacattattttttattatttttgttttaagtttgataatagccgtgaacattgcattattttcagtgtctggaacaataccaaaaaatgtattaggcactcagtatatattctttgaaggaatgaatgaatcctcctggagtgtctttgagattggtattattagtgaccacattttactaataaagacactgagattagaaaggttgaaaactttgtccttggtgaggcagttaggaagtagttaagtaatcacgtacttaccattttcttgcctgcacagttaagttgaaaaggatatgttcaagagtatatctgctgatgtcacatattcaaatgaactccatttggaagcctctgttattaaaaagctttcatggaaactcacaggtggaataacaagaaagaactgaaaacttgttaagccattagaatactttaccttttcattcattgttaggcttgtagcaagctttgtttttgaggccagatggctgagaggcttaattccatcaagatgagagacatctgaagggagggggaatctctagggttggtaaaggatgggtgtctgaatgaagccgatgaaaacattaagggggattgagattgttacacttttatgtgagttgcagtttgtcttgattgagggtctggcttattttggacacatttttactgtgtggtgtaagcctgtccttccctccacccacctctccttatttccttagaaagtaaatcctgcttttatgttagcaattttgaaagaagtaactgtgctatgtttgggaatttaataatactgctatccacatttagcgattccatgctcttttcaaagcacttggcagaaagactgccatttggaaggacttatgtagatgctatttctcagtgttgccaccttaacttgtactatataagatctgttaaaaataacttgcatggggatagtttaaaactgttgctttctcagatttcttttaatcttgttcgaacactgatacttgttttttgaccttacggtcttcaagtcatcttcgcagaggtttaaaacacctgacaccatataggatatttgaacatggctagatatggtatatcattatgttttatcatttttaattttgaaaagttaaggttttccctaaatgtcagttccttttatgttgaatttaagtttgatgttctggtcagccacagggtaaaatagaaaatttaatggaaacttcatatgtcagtctgtattggattgtgtttaatgctcttcttctaatacttattttgatatcatatgagttctgtttaaattatgaaaagagaactctcttatttatcctgtgatagaacaaatttgcagctgaccttgtttggtatattttaggttactgtaagatgcagcctttattttgggacttgttttaaagggaaaacttactcttaacattgtgaatctgtcatctctttattctttgataccataagatttgctctttcactgacagtaaatcagactgtgaagtgcttgaagttttctacatttccttggctacccctgaccaccacagacagacatgtcctctcctctaatgaaaggtacggtgcttgatgtattttcaggtatttttgttcacttatagtcattaagtttgatagttattacaatatgttttaccaggaaaagatactagtggcagtgaaaggtagtaatggtcatatttaaatgatttttatttttcaaaaagctagccagaaaaaaattcctatttgcttttaatcaatctacacatcaagtttcttttatttatttatttatttatttttgagacagagtctcactctgtcacccgggctggagtgcaatggcaccatctggctcaatgcaacctccgcctcctgggttcaagcgattcttgtgccacagcctcctgagtagctggaattacaggcacgcaccaccacgctgagctaatttttgtatttttagtagagatggggtttccccacgttggccaagctggtcttcaactcttaatctcaagtgatccgcccctcttggcctctcaaagtgctgagattccaggtgtgagccactgcatttggcccacgtttctttttgtggttggactcttgtgtagtccttggtgacaggagttttctcttattggccagattctcttattggccattgcttatgcccttgattgataaaaatggaaaattgaacataaatgtagtctttttggcagaatatatttcaaaatgtgggcttcattaggagacaaattaaaccatgtggataaggttgggtaccactgatccaatctaatgtaatgactgttaattgattgctacccacaagagtaaatagctgatatatagagatttagagagtattttaatgtccagattcactttgtgcagtttcataaatgccacaatacacgagttatctgcttttttggggtataaatctggaaaataaagaccaatttactagggctaagtccagattacaggtggatgccattaagtgatttttaataatgacatgaattctcttggaacaacatattcgagaggcaaagtgcacatgggaaagggttaggaggttgtatgatctctcagttttgagtcagtcccaaaggcagagatggcgataatttctaatgcatgcctgtagatagtgaatggtggatagtataatggaactgggctgagagaaggggtgtgatttttttggggtggggagtgaacaactgccaatcctaggtgggcagaagttgataggtgtcctctgtatgggataagaggggagtcctaatctgattcaccttgagtggggaagatcagtaaggactttaattcttagaatttgcctctgtacttttgttctgtctcatttcttaatttatttggcagatttcctagaattgtgtgctctttgacctcattgaactcgttttgcagacttgtgataatctctgagggtacagtgtttagtatgatgtcgttcctgctcttgagagggtctagtggggaatgcaaaatcaacaggcagttaacaatatcacaaataatggacaaacggaaggagcactgccctagagttgtttattggttagggaaaagatctaggaaggcttttctggagaagtgatatctcagctgagacccaaaagattgttaatggagtcattgtgtcagtaggctacttagaatctggaatagatgaactcttcttaaaaatgattaacgctatgttttgtagctctttaagaagtagtaaccacactttaatctggaacacctgtgaactattgaaggatgttatcatgcaagattttcctgctgagattttccttcaaaggccaaaaattgttcaggtcagtgccctctataattgttttagattttgaactagagaactttttgcaataaagcaaattttgcagagtaggagttcttgggaaggaactttgtactcatgtttttaaaaagtgaagtatttggctatttaaagcacttattcgctaacttgggtggatagttatagttcttccaatagtagtagtttcatttgacacttgcagtccagtctggccaccttgagttaccatttatggatcacctaaatggtagagtagactttggacattgagattgtgcaggagcccttattaaaagtaagaatagcattgcttcttgagtatctcgtttatttaacgcacagtgctacatgctgggaaaatacagtagcggtgagtaacgcagatggattcttttctttttttctagtttattgcttgtatagtagagagagagggatccagggtggggaattgcaacatcttcacagcagccagtaatggctcagcattctcgctccacactcccagggctgaaatggactccagtgggtgccaactgttaatacctaggatcaaagctggcaaatgatcgcagaggaaagctgttaattactaaaatgtggttaaatggtttagatgcttgagatgaaaagggcttgctgtgatttttaaaatgttctctgtaatgtaatgtcctgagtggggaataatttctgtcttctctcagaatggttactcaactaacagattttagaaataggaaacactgactattctatttaaatgttgttgtcttattttattttgacccatctccttgctttatgccaagtcatatttgcccatttcagtttcttatgtcttacaaatatttggcaacttattttctcttgattattcacttaggcttacttacttaagctccacattctgctttgaagttgagctctttgttcccttagtaattttcacggctcttcttgatttcagagccttttatctctgttgaaactggcctttggagatggaaagcatcgcctggcattacagtcggtgtcctgcctgcagcagctgtgcatgtatttaagaaacagacttaactttcaccgagatccaggttttttctccaataaacacggtatttatttttatctgttcattagccactggtgttatttgtagattcttctgggaaccttccattatagttactgttagggtttattgtgtacgcattttcacaacataaactccccactcctaaatgtattcaaatgattatctttacagattgcgtgaatgacagaaactgccatgatctcttgagcctttttttttttttctggataagagatatttacaaggtgtttttcttttttctcccaaacttgcagagattctatatagtgttgttgggatgtagtgactcggatatttggtatggctattcatgtaggactttggacaatttagcaagttacatatagtgttaatacattgttttgtttgaaaaatattgatttgaattttatgaagagtatttttatgcaacttgcaatgtagtcaagtgttgcagcaatgtgagacttcagagaaaaagtgccacctaatggccaaatagagtaccagcctggcttcgacaaaaccagtaccatttaggatttttgtgagcttaatgcaacctgcatcgaaagtcaaatattatagtcatttgtcatcatgtttcatagttaatccctatttcattgggagtttcactgatcctgtgctacttgaatatttatgctttaccttggttttattctagatcttagagggtatggcattgtacaaatgactggtaatagagaacgtctgggtaccccatacttcaacagaaaaagagttacaatgttgatttaaaaagttgatatctctgaagaattgttaatgtatttaataagtatgtatttattacctgttttatgcccctgatattctagcctctagggaagtataacactgaacaaacgaataagatccaagcccttatgagcttctattttaaaaggctgggcacaggtgataaacaatcaagtttgcttgagataaggagaagtacttgaaggaaataaaaagggtgatgtgacagaatgtggttgggtaaacatagcttcatttaggatagtcagggaaagtccctcagaaagcttctattttaaaaggctggggacaggtgataaacaatcaagtttgcttgagataaggagaagtacttgaaggaaataaaaagggtgatgtgacacaacgtggttgggtaaacatagcttcatttaggatagtcagagaaagtccctcagaggaggtgacctgaagggtgacaaggaatcgtcactcgaagagctgcaagaagagtgttccagggaaggccaggcctcaaggttagcactgagggtgatgtccttgagcaactgaaataaagcccatgagagtggactgcagtgagctgggcagaagaggagaatgaggtgacatcagagaggtagttaggggccagagtatattggggcttgcagatctttttaaagattttatattttctttgaagtgtagtgagaagctcttggagagttttttttccccctctctctgactgtaaatgcttttattacctaattctttttttaaattggggtaaaataggtataatataaaatatgccattataaacatttttaagtatacaatatagtgacattaataacattcacattgttgtgcagccatcaccactatctgtttctaaacctcttcattatctgaaacagaaactctaatcattaagcagtgattcctcatttttcctttccccaaagctggtaaactctaatttactttctgtctctgattttgtctattctaggtacctcatctaagaggaatcatacagtatttgtccttttgtgtctggtttatttgtaatgttttcaagcttcatccacattgtagcttgtatcagaacttcattcctttatatggctgaataatattcctttgcatgtatatcccacattttattcatctatgcatttgtcgatggacatgtgggttgtacccacatttggcggttgtgaataatgcttcagtgaacattggcatgcaagtatctgtgcagtgcctggtttcaattcttttgggtaatacccagtgaataatagtgaaattgctgcgtcatatggaaattctatctttagctttttgaagaatcaccaaactattttccacagcagctgtaccatttacatttctatcagcaatatataaagcttccagtttttccacatcatcactgacttgttcatttttttcttttttaaaaataatcgtagtcatcctagtagatgtgaagtggtatctcatggttttgatttgcatttctctaaagacctaataattaatgaccaatgaatctctaataactttttatgtgcttattgtttgttcatgtatcttctttggagaaatgtttattaaagttctttgcccattttaaaaattggactggtttctttattgctgggttttaggttacttatatattctgaaaattaaacccttatcagatatatggtttgccaatatttcctcccactctataagttatcttaacactttcttgtaatgttcccttggtgtaccaaagttttagattttgatgaagtccagcttatctgtctgttccttggttgtttgtgctttcgatgtcatagttaacaatcgattgccaaattcaaggtcatgaagatttattttttccgctaagagctttatggctttagcttttatatttaggttgttgatccactttgaattaatttttatgtacagtatgaggtagccattcttggagagttttaagcagacgagtgcatgatctagtgtttttctgctttggtagtctctaatgttgtaactgaatgccattgactagaaggtcccatgtaatcaagtcagttagatataaacctaaatgtactaagtgaatacttatagaaaagtttgatctttgcttttgtttttacccctgtagaaggattcctactatcttaatttgttaatgtttttggaagaatgatacataaataccacatagtcagaagtctgtttctactaaagaataattttattttttctttgtttccccagacacagtttcccaaaattcttctttgtcttattgtcatgaagcaagaggtactcatcattcccagaatccttccccaggaagcagcagccctcggccttctgtggttgggcgcacaggccagcgacccagaggagatggccaggactgggatgcagcgtcctctaggtgactgctagcagtgtctctggggaaatgagaaatgccggttaacttgtgtgtgtgttaatttcagaaggagataattatttttctgtccttttttttttttttttttttgaaacattaacacaggtataggccttgtgttaaaccctggcttcatactttttttgaccatgatccacggtaaggacagataaatattacatcgcaactcagtgctcagtacttgaacatatgctctgtttatgtatatatatgtgtgtgtatgtgtcccccaaaacaaaatgttcacataatagtattctgatactatgtttgacacactgaactatattttcagttccgatttcattagaaaagaaatgattctgacccaataaattgtttttaccagctgcaaacggaatatgatcaagtttaaaagaatagctttaaatgatagatacattgttgatagtattttacacatatttttgtaagtcttataacaaatggataagtgtttactgttaaaaggaatggttggagaattttataaaataaggactccttcaaggtgaacaatttatggtatttgtttgtgtaaatacagatttttttcttttttttttttttttttttgagacaaggtctcactctcttgcctaggctggagtgcagtggcacgattatagccttgacttctgggctcaagtgatcctttcgcctcagcctcctgagtggctgggaccacagatgtgcactaccatacttggctaagccttttattttttgtagagatggggtctcactatgtttcccaggctggtctcgaactcctgggctcaagtgatcttcccatcttggcctcgtaaagtgctgagattacagacatgagtcaccatgcttggcccccagtgcttggcacccagattttcatacaccaactctgcttaaaaggattggtgtggtatttgtatgttaccttatccttgggtgcaaatgtgttagaaacatattagtctctttagtgtcattctaaaaaatgttcactaagttaagcattggtctgttggcttaattattttcttgcaatactgctactactgttaacaagctaatactgattcatacctgctgtgtgtatggtgttatgccctgtgctttgcatactttgtctcctttagttgtcctagaataggattgatattatatatagcattagtattattattatcatcctcattgaggtttagagaggttaagagcataacagttggtaaagagcagagctagggttaaataaaatgataggagagtctatgctcttagtccttatattgtagttggttgttcagccatgtttttctctttctcctgaagcctttctgcctcattctcttgtgtgcttcatgcttctaagttttcactcctgagtgaacagcttcctcactgaaacttcctttcagagttacagagaagcccgagttgtttccatattttggggtgcttggtatcttgaaattgaagaaacgacaaagttggtttataatttgggcaaatttaaatgttccatagcattaatatgtctcttgtgatccagcttcggttgtggataacatcaaaagacaaaattttgaggctctttgtaagtgtgaggctctagcctttctacactttttaaatccttactccagcactttacatccgaggtaagaactttttaatgaagaaagccaaggacaatgggatgttccgtttttttgggtgcatttttgaagtcactacatgatgtcgaatgtactaagtgaagtaatacatttcccatgaggtttttctagaaacatccttcatttactaacactggcttactcagaacagtggtgaaactcagaaaatctaggaaacggtatgaactattggttttgtctctacacgttgattacagaagagctttcctataaatctgcttatttccttttggaaatgaatgggttatcagtgctaatattgattcctactataggaatgttgacatgttttgagatatcagcctgacaagcaaaatatagatgcatttttggcttcatttacaatttagagtctttttttttttttgagatggagtcttgctctgtcgcccaggctggagtgcagtgtcgctatctcagctcactgcaacgtctacctcctgggctcagaagattctcccgcctcagcctccccagtagctgggattacaggtgtgtgccaccatgcccagcgaatttttttttttgtatttttagtagaggtgggatttcaccatgttggccaggctggtcttgaactcctgacctcaggtgatctgcccgccttggcctcccaaagtgctgggatgacaggcatgagccaccactcctggccttgagtcatctttatggaatttaatttcgtaaatttgtcaaagtttctacaaatctgaccagagttgaatgaagcagtagagttgtgacttgtatgaggcttctaatatgcgaggcagcagatatgcagtaaatctgtttggggattgtttctgtatgcaaggtttatcatttgtttatcttgcagtggaagtagtagtcatgctcatgtaaactccaggatatccgttcattcacctttggatatgggacacatagatctgccagagctggaaactgaagacacattggaactacaattccagcagctcagtcttccccagttttgtgtctccattctggaatcagctgttcctctcttaagaacaggttagttgttttagaaatcgtaattctgatataatttgtgtctgttttgtatttcgttaggattttcctttttttctcttctatgttagggcctttggaatctgtatttacttatcttttgggatataaatttctaaaaacctaataaggtctttattatttttaaattaaatgtggatgccttggagggctattcagcttgcccttccattttatgagtttttattggcacaggctttcatgcttattttttttttagaatttttatctattttttgcatttattcttgctgtcatctatttttttcttttttttttggactgtatggctattttaaatttgagcagtgacaacattcagcaactggaataaggtataaaaggtggactggcatgaatagaccagaataaaaaaatctttggcttttgctctttggaaactttttgattagctgtcagttgtttactcttcccattcatttcttgctacttaagccacttaacatgttaaaaacaaaactccaaaactggattcttacctttgtagtaatttttcttaaaaaagccacaaatattttgagatcccatttttgttcagatgtactaggaaaatttgaagaggttgactgaaatatacactggtatttaattgtaattgtactgaacaatggtaacagcaataacaatatgacagaggtctgctgagtctagtaatgaaacaacagttagcacgtgtccctactgggttctgccttcatacttggttttgtgtgcattatttcgtgtatttttcatatcaacccattttgttttttcactggtagttaactaattttatctccatttttacaaatgatgaagctgagtttttgagtggtttagaaacttgcctgaagtcaaacggctaaaagcagggacttgaaccacgattcttttgaatctaaagtccatgcttttaaatactttagcattttgcaaggtgtaaagaaagttttagaaagaaaacagtcatgatttttattctcaaaatctatacattttcaacgtttgataaactcatcaggatataaataagataaccaagttttgccctttttactttatactggcaaagtaaaaatatatattccaagttaatggttctttaagtcccatgtctattttttgccacttggaggtgatggaggagaaagaagcaggaaggtatatatttggaaaacatttaaaatgtttttatcctgaggaaaactgtgtactcatactttttactcagtaagtgcttctactagctggaactatatattaattcatatactaataatgtgaaatgaagaaagatctgaactttggcatcataaagtacatatgtttatctgtctggtaagctgagaagaacagtcttagactttaatgattttgcatttaacctttccttaatttgctttaaaaagtcagattgataattataaagctatatcttggtacataaaaactaaatgttctcctgcccttttgtggtaaattatggcatgatttgtaactgttcaatatcgtaagagatttgtaagagaatttggtccagctcttctagtgaaaaaattaatctagatccttccaatctggtagtttgttttactttgattcattagaacttaacctttgggatgcggggtgggaaagtctcgtgtgaatgttcgtctcacacaggataatggaagtggagtctttgttattctgtctctgtggagaaaggaggttgctctggtgggtgtgactttgggaagtttttttgagtttaaggtgagtacaaatagtttctttagcaaatgttagcatgttcatttattcctttagttgctccagtccaagcttagcttcccaggcaactcctgtgtgggaaaatactaatttatgagaaggctcacgccttctagtactaagtagaaattattggaatacgttttctaaacctttctggtgctttgtcacatattacgtgtaaaatggatggtccctaaattcgaaaaattattttaatctatctcacagtacttgttagattattgctactttcaatatcttttccaattataaatgtatttgatttgttatgtagtaaagtagtactgtgactggaacagaagccttcagtgtgattgtaaattgtgatttctctacagttctaagaacattagaaaaaaagagaaaatgttggagcatgactaactagaaaattgagcaatatgatattcagctgattattttaaagttaagtaacttcttctcctttacttttttctgtttgtattcctaggtagcagacaagtgataataagagttctggaattgcttacagaggatatgacacttattggtgaagcaatttcaacagatatctgggatgacagcagcctttttggtatagatatggtaagaatcaatgttttctttgggatatagggaatagtattttttaagattttggttcttttaagccggtttcattgtctcattcgtgttcaaaatcttttttctttttgactcaatatgtcccaggcttatgttataaatagcctggaacaggcctatttttccaaaggttctggttacttctaatagtggaacgtatattaagaccaaaaccaggccattagaggtggttatagctactgtgatatcattcttttctttcaggaacaattaggaaatacgtatttttaaagatcgtgagtttattgctatttttcttattttaaatttgtatttcttatccttgcgcttgtagaaagtcttcgttcctagcaatatcagcataattgcttattagctttgaccttaaacatacataagatagtttcagaacagcaatattaacattgctatgaacaattctaatgaaaagttcaagatttcctggcagttctttttgagatagactaatctcactaaggatatacagtcaaaatactgtgccttaaagctaccgttacccattcagcatacagttagatttttttttgtttgttttcactattgggaattgttttttcttcataaaaatgtagctcagagatgcctctctcccatccagttacctttaagatgttttccttattggtagtcatttttattttctggctatttttttctatttttattttatttttgcaaatgtaagcaactaagtatgtagattcttatcctctccccatcctgcataaaaggtggtatattatagacactgttttgcaccctgtttttataacttaaaaatacgtcttatgtgcatagaatagtaggtatgaggattattccctatctatctatacgtgagattttctcgttcttttttataggtagcaaatgcttcgttgtgtatttgttaacctagtctcttgatggatattattgttaatataaattatgtacaaagaataatgggcttatgctatttcataaatgtgcaggtatgtctctagggtagatttatttaagtgggcatgctgtttttctaaaaaacttttatttagcttcagcggtacgtgtgcaggtttgttatgtaggtaaactgtgtcatgggggtttggtgtacagattattttgtcacccaggtaataagcctagtacccgataggtaatttttgtggtcctcctcccactctctgccgtcgagtaatccctggtgtctgttattcccctctttgggtccatgtgttctcattgtttagctcccacttataagtgagaatatgtgtatttggttttctgtttctggattagtttgcataggataatggcctccagctccatccatgttgccgcaaaggatatgatctcatgcatttttatggctgcatagtattcattggtgtgtatgtaccacattttccttaatcagtctcccattgataggcatttaggttgattccatgtctttgctattgtgaatagtgcagcagtgaacatacacatgtatgtgtctttatggtagaatggcctcaagtgatctgcctgccttggtctccgaaagtgctagaattacaggtgcgagccaccgcgcccggctgagccatgttgtttatgtagtagtacagcagttcctcacttggcatcatagataggttttcggaaactgtgactttaagcaaactgacttataacaaacccagttattttttctcatcagcatttagtgaaatggcatggaacttgtaatgctgtttcattaaagtcagtttccaagaacctgttgaccaagttaagtgaaggcttactgtagtttattcattttatttctgagtagtattacattgtgtggacataccacaatttgtttatccattcacctgttggtggacaatggggttgtttctagttattacaaataacattcctatggacattccagttgttccacatcttcaacatctattatgttcagttttttttttttttttgggggggagagggcattctgatagatgtgcaatggtatcttagtgggttttaatttgcatttccctagtgactgatgattatgagcatcttttgtaatttttagagagcaagtctaggtttttttttaaaaaaacacttattcttaagtattcttttcaatgccattgtgaatgaaaattttaaaagtttttggattgctcattgttagtatatagaaatacaattgatttttgtgtattgatcgtctatttggtggccttgctgaacttactagttctggtagttttttttgttttgttttgttttctggtagatcccttaggattttctatctataaaatcttgttatctgtgaataaaaacagttttaagatcatcttatctgtgaataaagacagttttatttctttctattcactctggatacctttaatttttttaaattgcctaattgccctggctagaagccttagtataatgttggatggatgtggtgagagccttcttcatgatttagagggaagcattcgatctttcaccattaaatacaagattagctctagtacatttgtattttgtagatgcctttataaagttgaggaagttccatgtattcttagtttgttgaaagttttgatcatgaatgattattgtattttgccaaatcttttgtctctattgagatgatcatttagctttttgaagagcagaaaaacttaattttgatgaggttcagtttcttagtttttcttttatggatcatgcttttgatattttatctaagaaatctttgcctaacttggaatacaaagagtgtttcctatgctttcttttagaattattacatatgttttaggttttatatctttgattaattttgagttgatttttgtatctagcacaaggtaaggaatgaacttttttttttatgggtatacaattattttctcagcactatttgttcaaatgactgtcctttctttcctgaattccttaccaactaactatatgtgggtttacttctggaatctatttgatcggttttctcttatgatgccaatacccaactgacttaattattgtagcttatagtgaaggcttatagttagctatagtgaagcttattgtaagtcttgaaataaggtagtataagtccttcaactttgttcttgttttttttttctgatatgtagtcctcgctctgttgcccaggctggagtgcagtggcgccatctcggatcactgtaagctccacctcccaggttcacgccattctcctgcctcagcctcccaagtagctgggactacaggcgcccgccaccacacacacacacacacacacacacacacacacacacacacaaaaaaaaaaaaaacctgctgtggttttgaatggaattgagttgaatttgtagatcaattcaggaaaaattgacatcttaatagtattgaatcttctgatccatgaataccatatatatgtcttcacttgtttagctcattatttatttttatttttattttttttaacatggaatctcattctgtcacccagactggagtgcagtggcatgatcttggctcactgcactgtccgcctcccgggttcaagtgactgtcactacagcttcagcctcccaagtagctgagattacaggcatgtgcccagctaatttttttgtatttttagtagagacagggtttcaccatgttggccaggctggtctcgaactcctgacctcaggtgatctgcctgcctcggcctcccagagtgctgggactacaggcatgagccactgtgcccagccttatttagctctttaatttgtctctgcattgttttgaagttgtcagtgtataggtcttatacatttgagtatttcagttttgggtcttgtccactggctgacttttctctttatggatcttaatatttgatatgtgtagtaatttctgattggatgctggaccttttcaatgttaccatgttgagtgtcttgattttttattttacccttttagaagcactttgggagggttctgaagcactttgggaggccagcatgggagcattacttgaagccaggagcttgagatgaacctgggcaacaaagtaagatcttgtctcttcaaaaattagtaacattagctgggcatgtaggtgcatacctatagtcccagctatttggaaagctgaggcaggaggatcactcgaacccagaagtttgaggctgacaggtggttatgttacttgtagagcagtttcattttctcaagactttaaaaaattttgctagaatgggtctaaaatagtggttttcaactggggggtaattttgcttcccagaggatgtttggcaacgtcgggagccatttttgattgtcacacctggagtggtgctgctggcttctagtagatagaagccagaacagctcaccacaacaaagaatgttttagctcaagatgtcagaaaaccttgaggaagtgttaaggttgagaaaccctgatctagaagaacctttgcttggggttaaactctgctcctgagatgtgatcctttgggacctctattgaatgtccaaagtgatgattgatgactgtctactctgcctggttgaagactgagttttattgtcttgtgtgagccctgggagttgttcaatttaaatctcagtaatcatctttggcctgtatttacagagtatctacctataatctaagccacctaatctcagcatggtctgggtggaaacttgtttaggtctctgaaattctttctttgcatagctctcccacaattcctaaccatgtcagcttccacaggcatcttcatctcctaaagtcatcgagactgtcagactctttggatttctcttgcctgtgtttgctgtacagtaattgttttcaggtatagtaggactctcattgcttattttccttctctctggcatcacagtcctgcaatgacactatgccactttctagttgatttctggggaaggacaggagatgtccttgttattatttcatggccagaattggaagttttacgtaaagtttttaattatgtcatttaagcaactggcctatctgtgagttattaggagcttaaatgtacatttatctagagtgaaaattctggatcaactttagaataatcattcaaagtgtggagagttcaggataccttgttttttgctgtttgtatttcagtagagtagataattttagaaaatatggaattaaattttgttttttttgtaagaagtgttttgataagtaatattttgcatgagtaatcaacatgtgtacagtagtagccttaagaatgttatattacaacataatatttaagagatctatggaataccagagtatgtctccatgtaactggaaaacatatcttttttaacatttcaaaatatcataaatcatttgtcatttaatatctttcattttgaaattgtcatctgataaccttgccttccttgaagatttggcattctatctcttctgttaatgtgaattcctaatgtctggtcttccttcctctccctttcttccttcccctctcccttcctcccttcccttttgctgccttgtcagggcagtagaatcaaaatttattagtcataaaaatatatattgactcttacgtttatcagttttttttctctttatgctattttgatgtaagtcggtctatatttaattaaacattgttacaggctgtctgaaatccttgtgaatagaggtctgaatataaaaaaataaattacagatatttacataataacaatacccatgtaagaaagaaacccaaacttttatttttttcataacacgagcctcttaaaaagagaaacaaactgcatattttaaaatgggtgtattttcaagtctttcattttctgataatagttctgaatcttggtttttctttagtccttaaggttatcacactattttgtagtacttttaggagatttttcacatattgaagattttcaacaagtaaatttttcctttgaagtgtgaggaatgctttatcagttgtttcttaaattaacttaaattttcttggccagaacatttatctgtaaaagttagtcattcacttttaacttttggctgctggtactttatgattcaatgaattatttttactttaaaggttaattctgttgtacaagtgccagttggtatgttacaaatgctaaataaaacagaagtacttcaaattatatttgatttacttttacttgtttaaaaagaataaatgtctcttttctttggctatattttaaaagaagcaaacaagtaaaatttcttaatgttcatacttttgccagttttcaaaagaaagacggaagcagtatttttgttgagtcattaaaggaacaaaataataaatgttgctatcaatttagaaattaagtacctgaggatatataatcaaatctctaggtatttccacacagtactaatatcagtaacatcaatcatgtctggaaccctgtaactcagcatggaagggaatttcaatttccccccttaattgaatatttttatattactcgaagtaaataaaagaaaaaatattttcaccaaaattagttatgctgacctaaagtatgtcatatgtcattccccctagtcctccatcatcaaatcaggtctattttttccctatttacatgctaagtcaggttcaagatgcaaggagaaagtagctttcacctcctgccagataacctagactcttaggtctatattctgtttcttttccgcatttcttctgtgtcattcctgtcattgcagtcattggaaagcagtcttttcatctttatgactcattgcttctaaattcccatctgacctgctgtgaactggtaacttcaacatcaaggcatgttggtagaattgtagaatgttggtaggacttcaagaggggctaagaggattgtgaaagaaactaaagatctttgtatccagtaagggctcattaaggatatttggaccagattgtgaattgataactggtgtagtgggatctctaattacatagaccttccctgctgctgccaccattccaaagacagttattttaactcacatttcttgattgcccgttattaatatatgctaggcacttgggatatcaaataagatgtagtgctttttatgcctatgggtgatagatacttttaatatgacattagtaaaatagagataagcataaaggaataacacgtaaactaagatagtttaaatatagcacttactgtatgtcagacactaagcactatttatgaggtcatttaattatcatgaccctgcaaactccataactgaggcacagtttatttttcagggtcacttgtggttttgtatttatagccattatgttttattgccaatggtgctttgaaaacactatgaactatgaacttgggatgtcagtgagggctttttttttttttttttctcttccccagactcagagtctcactctgttgtccaggctggagggcagtggcgtgatcttgactcactgcaacctccgcctcctggattgaagcaattttcgtgcctcagcctcccaagtagctgggattacaggcatgtaccaccactcctggctaatttttgtatttttagcagagactgggttttgccagattggccaggctggtctcaaactcctgggctcaaggcaccactcctggctaatttttgtatttttagcagagactgggttttgccatgttggccaagctggtctcaaactcctgggctcaagtgatcctcctgccttggcctcccaaagtgctgggattagaggcatgagccaccgtgcccggcctcagtgagggctttttgtagatctgaatgaactgagttttaaattataggtaggatttggccaagcaaataaaatagcattttttttttttaatctggcggagcgtgagaatgaaccatgagccatgacaaagaggcatggatagttctgatcggagataaaggataggcctggtagtagatggaacacaagcacctagaccatgaaatgtgaggtgcaaatagtggagagagactggtgggataaatgagggtctgctggtaggggtcttttggcatgatgctgagtagtcctgcctttcctctgaaggcatgatgagattgcttttaatcagagaagtgccttgtgagactggcaggaggaaccgtgactggctgcagtgtggaaggtccattggaagcatgtgaggggcagagcctgctgcagtttcttactccaggtgccttgtagaatccacaacccattgtatattgcagaggtagtgtgtaagttgtgtttacactataaaatctgttttattggtaatatttaagacattttgctaacctggtatttcaattttgtaccttctgttgtaaaaactatgagtatcctgtgaggacgggtcttttcccccaccgtcaactcctttagggttgttgcttaaacatctttagcccaaagaattaaaaaatgtgggccagttactattgtttttcaatcctttcctacaaaacaaaacaaaacaatacaaaaagccattttttttatgcttagaagaaatgttggaaatagaactgtaaaactcattcctaaagtattttctttttatgatattttgagaagtactcaattcatcattagaattagcaagattattttaaacaatttcacaagtaaatagacttgaataatagagatgttgttcctagtactgttttcatggagaaatactgtatggaggaattaattgcctgtcaatataataagactgtcactgtatttccaatttgttttctctagaccagtagttgtttgtatgagggcgttttactttttctgttttaattttgtaaggattgttctactttcggtttaaatatttattgctttttagttttatttcttggggatcagagaaatatagccttaaatatacactgaagttttctttgtggtaaagtatgtttaaagttaatttttgtcagtgtttcttggaaacttaaggagaagttatattctttgcagtgttcaaagtttatgtctattaattttaattatgttcaaaaagactgagttaaaatttataagtccatatcaataacatgttttgttgatgtcctgttttattcagatcacagactcatttttattgagtctttattgttaaacatgtcatcagtagaaaattactctaatttattttgccctaaattattcactattcatattgcttagaatttttgttttaattctactactcattgaacttttaaccttttattcacaaagtttttttagaattttattttctttttttacttataatcccatgacagttaaggatttatatataaatttttaatttttgttttttacttcaatatgaaattgtttcatttataggaaaatttaaactttttatagtatagttatgcttggtctactctcaaaagtttttgccttgttttgcttatgtagatcattttgtcttccttttacttctgcagtgacattgttgtacaaccattatcattatctatgcaactttttcatcatctcaaatggaatctctgtacccattaaacaataacccctcattctgcctatccccagctcctggtacctcatataagtggaatctatatttgtctttttgtatctggcttattttacttttgtatttggcttattttattttatgttttaaaggttcacccatgttgtagcatgtatcagaatttaattccttttgaatgctcaacacccttttctttttttctttgagacagagtcttgctctgtcgccaaggcctgagagcagtggtgtgatcttggctcactgcaacctctgcctcctgggttcaagttcaatcctgctgggattacaggcgtgagccatcgcgtccggcctccttttcttgcatgtatatacaacataccacattttgtttctgcatttattggtcagtggccactttcattgtttccaccttttggctgttgtgaatagtgctgctgttaacctgggtgtgtatacatctcttttggagaccctgctttcagttcttttgggtatattcccagaagtggaatttgctggatcatatgataattctgtgtttttttgaggaactgcccattatattttccacagtggctgcaccattttacattcccaccagcaatgcacaaggcttccattttttccatattcttgccaacgacttgtgctttttgggcctcataccttttagttgttccctgtatagtcatccttgaattgaagaaattctggtatattagatttttgttcttagtttgcaggtatttctcattcttcttttcatatgttttcaatggaaaattgaaagttaagtacttcagttttttttttctttcttactgagggtgtccttttacccgctagtttatgggggcatatcagtatatctgggatatactttgtctatattgatgtgacttacaagacagtctactatgcatagattcttcttcatatttaatgtataccttttagtttaaaagatatgatttctcttgaagtagtaaattatttaaatttatgatggcataacattttccacttgaaaccttattatctaaagagagtttataaaatttgatatttaattgttttttaattatttgactttccttgatgcatttctttagaaatgttggtatcaatttgaggacagagatcatcatgtctcttgtactaatgcattgttctttcattatgcctgccactgtgttaggcgtatagtaagcataagaaatacttgacgaggggtttgcgtgttaacgttccaaattggaacaattaggcactagaaactaggaggaaattatggttcatttaccttttatattctattgtttgtatttattcattgttaagattcatcatattaaatacttaaaagattattgtatttttaaaatgtaggtggtttatcattcttttgtgctttttaaattatgtcagcaggcattggtaattctcacaggaataaattctgttttgatttgttttcctatttaatgaaaatgataatattttaaactgttctccatggcttttgtatactggcccctaaaattggttgttttcttctgtttcatgttgtgtaaatgttttcagaaggagaaactactcctggtgttgggagcccttggagaaaccatgtgctaccataaaagtagtatcagtttggagcagccagaggtgatgcttgtgcaccacagaatggcctttatcagcatttccctgtttgcagttcgactgctacaaacgcttctccctgttgaaaaggtaaggcaggcaatgctgctcatttgtactttacagactattataaataaatgctctgttgtaaatttcttctgctcttttcatggtgtgaaggtattgtgctttaggccattttcaaaataagtgtaacaggttatatgggaaatgtagaaattgagaaatggctaacattttgaacaattttgacaaatcatttgatgggaaattattttttaatcgtgctgttgcttttattgcatatgttttattgcagtctgtacgtttgtttattccttgttcattcagtgaataatttattgattgcttacagtggactaacagtattacttgctggatgtaaaactgaataggttagaattagtccctggcctcatggaacttagttttgtaaaagacaagacttggctgttatctatacatatacatatacatatacatatacatatacatatacatatacatatacatatacatctacatctacatctacgtatacatatacatatacatgtatatgtttgacttctttggtttctttaataactttgggatcacttgagggaagagattatgtcttaatatacgaatacatttttccatacatatatacatatataattggtacacttgtatcttttaattgattggagggcattgaaagcctactgatcttatctctgcagtgtgtgtcttggttcttatcattaatatcaagagtagcctttccttctcttcagctaggtacgtgttgtcagagttctttacttattcactatttcccaggttccttgacacacagaatacaaacaatagtttccattgctgctccagaaattattttatagttagcatatcttaatgtcatggaaccttttctttttcttgttttatctattcaaaatactgttagcagtgctttagtttctaagtattggtcaagttggtttctgaggactgtcctatttcttgtatttgttgtactttatgtatattgctggtgtgttgcatattttagtaacttaagggattttttttttttttggtcccatgcatttctcttgaaggtatcccactatttcctttctgtcagcaacttaattgcttaatatttttattttagcacctgatcaaaagaatttcagaagtcatctttggtaggattaaatatcctgatttttatttgattcatctagttaatatttggtaacttgttttatgtctaaaccatatttgtagtttgagttacgtaatatatgatttcataccttagtatgtcttttgaaagttgtttttttaattaacgtgttgctttaggtgtctttcacaaagctgcttttctgcccatgatagcaataaactatcttctgtgctagtctttattctagtacttttctttttcctacttttctattttacctagacctttcttttcttaagctttggtgttttcagtttttaacttttattcagaaaataaaatgttcatttaaaaaacattttgatgtacaaagaagaataaaaattcatttataatttcaagttagttttgaggcttttttcttttctgctttaagtccaattgacagcgtctataaaagttatttattctttttttttttttttttttttggttttggttttgtttttgagacggagtctcactctgtcacccaggctggagtgcagtggcactttcttggctcactgcagcctccacctcccaggttcaagtgattctccttcctcagcctcccaagtagctgggattataggtgtgagccaccacacccagctaattttcgtattttttttttttagtagagaccagatttcgccatgtttgccaggctgatcttgaactcctgacctcaggtgatgtgcccgcctcggcctcccaaagtgctgggagtactcgcgtgagccactgcacctggcctgtttattctcttttttttttttttaaccatttcttattatctaacatacattttccatttaattaaacacttcataaattttaatgggtactaatattttaccagcaagatgttctatgatttccacaagtattccagaaattaagcttttaggtttctttttttctttttttggtattttgataaataacactatgctgaattgctacttacgcatgtttactcatattttggattcttaaattcctagtggcattactagttcaaaggctgaatgcttaaacatgtttttattataagcataatttaaaaatattatagtttcacgagtttcattgtttttaactaaagaatggataaaaagagtagtacacggaaaagataattgtgagaatatatggccgggaaattactaaaaagaagcactttttgaaagtgcctaaggctggtgtctcttctgtgtgtttgccaattacagtttctgaaattgtgcactgttagtttaactagaacacttaaatttttaaatgatttttaaaatgctatcagaaaaaaacattaattctgtaaaggcttttttttttttttttaaactttcatatacattcagaaaagtacatagttcagtgctttttctactaagtgaatgcatctgtctttaaaaagtgaccacccccataacagaaaatagaatgttaccagcattccaaagaccccttctctgttacctctccctccttctccaagccacactcctttctgacttctgtcactatagatcaattggcctgttttgaatgttgtttaaatgaaattataaagtatgtactctctcaactccttcttgaggttcataactattgttgcctatagcattaatttgttaacttttattacaaaatattccattgtatgaagtctgttaaaagtgattttaatatgtgtaaatatttctttaaaatcttcttactgactgtatttttaaacgtgaggttatctctgaatttgaatgttagtggtaaaaatatctcagatcattcagacatcagtgtttcgtggtgtacttattaccaaaacaaaggagtgacacactaaaatgcaggtatgggagaaattatgaaaactagaaaactattccttatgcctctttgttgcccttagttattaaacatttgcagctttgtttcctagaattctgtagagcatatagtccaaactctattttcttttttttttttttttttttgagttggagtcttgctctgtcaccaggctggagttcagtggcgtgatctccgctcactgcaacctccgcctcctgggttcaagccattctcctgcctcagcctcccgagtagctgggattgcaggtgtgccccaccatgcccggctaatttttgtatttttagtagagatggtgtttcaccatgttagccaggatggtctcgatctcttgacctcttgttttgcctgccttggcctcccaatgtgctgggattataggcatgagccaccgcgcctggcccaaactccattttctaagtatcacttatatacacaatgtattatcaggtgatccaggaaaacggataaaacactgcattttaaatatagtattttgctttaaggaaaataacatcacttgtgttacttttaatttttaacttgtattcactagtcattatgtttctgaagtccttttctgttttgaagagtgacaatttttcaaggcataagcatcaagaatggaagaattccagtctcttaagaaaggaattgaatttaaaatatgggtgtcttccttaatattatataaatgaaaaattagtggtgctacaattgcttgctattaagtattgcaaatggtcaatctatctatgggtcgaagtattgatggaaaacttatcctatcagttgcatcatgtagtttttgattgtattttttcatctatgtgcttatttggacaggaaccaaaaagaaatcagtaatttattttacttagtgccagaataatgtaaagttaattttccatgcttttttttttaaaggtagttattgttttattgtttccgtttttaaaaacaaatcaattatctaatttttggtagttattttaaatatataacttggaactttattaaaacaattttgatcattgtgggagattgtaattaaggtatttgtttttagatgattatatttgttttgattaattgactaagtactttaaaatgagatctaaacaaaaatgctatttcattgatgttaaatttcttctttggtttatataaatgtaaggttatgctgccctctgtctgttgctagcccactaataattgaagtagaatttggactctgaaactttttgcctttaaagtggtttttttgagttgccactgaccaagtaggtagtttggatgttggaaaataaatatgaatctatgtagagatttcctaagtttaacaaaatgtcctctgatgcctgttttgaaactgatatttgttgatattaaatgattttggagaatactcatgtataggttaaaatgatacgttggtaatcttctgaaaaatattgtggttgagtaaactaaattggtaaaacaaatgaaggtaatttcatttggggaaacatctgggaagtaagagctaaaagtactagccctgttctggaagcagaagcacagagcattctaggaactgctgttactcttagctagtgatgcttaccaaggctaaggaagaatttgtaacacaaggtctttagcttttcagggaggtatataaaaagatctaatgacctggtgaagccagttgagtgactgagagcagtgcttttcaaacggtaatgttcaaacagatcacttagagatattgttaatcacatcttgcatattctgattcatcaggtaaagggtagggcctgagagccggcatttctaacagactcatagaattatgccatggctgctgagtggctagtttacaggaaacatttatagcccctcctcccaatgcacatgaggtgatgttgctgattattttttatctaatggggtgatggatttgcactgaaacatcttcacttttagttctgatggcatgtgactaatgcttatatatgcaggacagctatcttagattaggggtgtaaattgtgattagtccattgggccatgtaaagattagctaatgacattagcatggggctttgagttgttgagatagcaagagtttcaaatacaagtacgcagggtgaaacattggaattcctttgtggtgaagcgagaaaaggaaattaatatttattgagtgctatatgccatatgctctgcttaatgcttgtttaattctcacagcagctgttatttttctgactagagtcagagagaactctcttaaactagaacacagtgcctttagagttagatccattaggatttactctcttagcacagtgtaaatcgcctttgctaatttctctttatcttcctaactcttcaggagtggaaccccaggactgacagtagccctcatgaaatatatcccatttgtgattgttaaatgccatctatttgttgatgcctgccaaatttatacttccagaccagacatataacctgaactctgaacttacctgtatccagtgtcctttttgatgtcttcacttgggtgacaataaatgtctccaactgaacatgtcccaaacttcattctttgtttccccttccaaatatgttcttcctatagtcttgcctgtctcggtaaatgtcaactttgttgttcaagttgatcgttgatcaggcaaaaaccttagagtcagccttgattcctttcttttgctcatatgtggatataatccctgagcaaaatttgtcatttctcccttgaatacctatacagaatctgaatacctgagttaagcccaccattctgtcctgcctggattactgcagtaaagtcctctgtctcttagcttccacttttgcacattaccatcagttctctacagaccaattttgatacttgtttaaaatgttccagtggctttcagcagaggacaattccttatgacgacccaaagccttaactgatctggcccaccactcctttctgactccatccctcagaaccagctccactggctttcttgctaccaaataatagtttttgtaattgctcttccctcttctataaatgctttccctcagatagccacgtggctcctgacccttccagggttctacttaaatgtcatcttattagcgaggccttcctctactactttggagaagtagcagttccctgcctccactccccattacttctctgttcctcttcatctttcctatcctgttttaaaacactttttagccacacctaacatcttaggaagtatatcgatttacactctactttcttcagtgggatgtgagcttcatgcgggcagaggttgtattttgctctctgctgggttcccaggactggagaggtacctggcatatagtggaggaacatagtaaggcctaattaatattcaccgagtgagtgaataataggtgagcagataattgagtttctctttttcctcccccgcccacaaaaaaaaggaaagttcttcacagaataatgaaatttctctttactttctaatagctgctgttttactaatctggaggtttgtcatgtctgtgtaatctaaaattttgatttctgtagtttctgatcttcatttagcaactatattcatttaaaggtatcgttgtttagctgattcagctcttagactttcaggtagttaatgattatccttgaaataggttatccatgaaataaatcatgaccaaacccacttttgtaaagacagcatttcagccgtaatagtgagtcttgtcaagagattttctctgaacgtcaaatttttagtcctttttattcctttaattgatatttagaatcctgtcacaaaactagaaccatttttttaaaaaccataattctttcagttttaaatctattgatttaaggttataatgtgtataatatttcatttgggcatattgattttatactaattaaggggctatcttctgtattttagaactatttaaaatattatattggatttccactatcccctctaaaagacaaaaccaaagaaaaaaattcgtttctgttcaaatcaatctatagctatacttgatttcgtgttattaatatgtcattaataagctctgtcatgttcagctatgggatggggaagtgttcttgtcttcagtttatcaggttattggggagatttgcgtacatgtacagaaaatacttagagaaaaaggcctcatgccttagttcaatagcagaggtatatacaaggtgcagggctcaaggagagaagaagttggtttggggaagaagaaagtagttagtatcttaggctttgagaaagagttgatatttggacttgagacattttgtattgaaaaaagacagagatagaggtagatgatgtgttgggaaatgggattttctttggaaaaagtttcagttttttgacaaagaattgctaaaaaggaagttggattagattaagactatagcccactatgtttctctaaaataagttttttttaaacaaagttttaatttttttgtttttttaattcaccaaggcaagcgagtttttatcagagcctatgtcaacagcattatttctcctttctttggacatgcctatttctttggaatatccaaatattcatgaagctgttgtggcctatttggaacagctgaattctgaaaactacagtatttataaacgaactgcagaggccgtttattcaattgaatgcacctgtaacttcctgtctgatattgggaaagaggtaaaaagcttttttaatatctcttttaaatccctttgacatattttgaaaatttaatctatacttttcaaattgatggacatataattaaattgtcacaggtgggatacattattcctgagtgggtcaattatacataacctgttatttaacaggttaaagtaaggatatgatttgtatagaagtaaaacgaagactttaattaatggtgtatattcctaacatcagtgatttacaaaaaagcagtggttattacaaatgtcttaatatttaataatgagtacctctattaagtgacttactgatatgaactgaatgacagttgatgtaaccaaaattataagggctattttagtgcttacttgtagacatatttttgcctcaatattttatagatagttcttacatatatataaaggctgatttttgaaatatattaagtacagtgatgaactacattgtttataatgtattaggatgactttatggcagtgttacagcaataattatgtgtcggtatttatcccttttaaaaatactattagaatattagtatgttatcaatgaaagggttaatgggtcttagagacagacattgatacaagagttgtttattgtttgaaaataaggacatggatcctgaagatcttgaagaattagggataaaattcttactcattttggtgcctacagtagaatctatctgaacctatttattttctttgaattttttttttttttgacagccttctcagttgcctaggctacagccttgatctcttgggctccagcaatccatctgccttggcctcctaagcaactagtactataggcacatgctaccacacctggctaatatttaaattgttttgtagagatgaggtctcactgtgttgcccaggctggtcttgaactcctggcgtcaagctgtcctcccaccttggcctcccaaaatgctaggattaaaggtgttagccaccgtgcctggccttgaacttgatatttatgatttttcttacttaccactgtagtttgttttttttcccctttccttttgccatgttagtaccactgtcttcttgttttctctgtgatagaattttgaattgtgtctttaagttgaagtatttctgtggcttttttttttttttgagacgaaatctcactctgtctcccaggctggagtgcagtggtgcagtcttggcgcactgcaagctccacctcccgcctcagcctctcaagtagctgggattacaggctcgtgccaccacaaccagctaattttttgtatttttagtagagacggggtttcgccatgttggccaggttagtcttgaactcctgacctcaagtgatctgcccgcctcggcctcccgaagtgctgggagccactgggtctggcctctgtggcattttgtgtggtcagttaatcacacatgtgttcaatgtcctgtgtgttcctagtggtcaggctgctacaagaggcaggtttataataaaataaatacattagccctacttttattaggggaggtagagctacaaagaagtaatcaaagaaccaggcaacttgattgtaactttaagcttactcagagttaaataatagaaagtctcatgtggcatttagctagggaattttcctacatttctccacctcggctgacatttttaggttgcttgatgagaaagtggacttaaacaaatgtaaacagtctcatggtctctgaatggtctaatttcttgaagctgcttagttagctgttgagaatatcattgcacatgaacttgacatttattgttccattctgcttcttttgtagggagagaagaatctcttagaattagtggagctggcagaccaagccttgcgtagcttttcctatcatcagcatttcccgctaataaaggaaatcatcagcatttgttcaaagatgtaatattttctttcttaatgtgattacgttattattggacacttagggtgtgtgtaaacttagaaacagtgaaagtgaaactgactgtatatctttgttattattttttagtttaattgcttttatatgtgtctgatttttaaagggtatatgtacagctgcattaggatacttaactgttatattcaagattaaacttcaaaaatgtcatgcctacaatcaaaatgaataatccttggatttttatacatttgtttttggtatccatccagactattcacacacattgtttatttatctttaaagttttaattaataacttaaactgagagttttgtaacttttattactttgtacctttttcttatgtggatttttagaaaagactgtgtattggttaatttattttgaggacatcagcaaatttctatttagaacttagtgtctttattgcttttggaaagaataaattctgtgatgtgataatcattaactgagtaggggattttaaagacattttgggtttttaaaaatactctttaagacagaacctcctctgccctgaaacaaataagtgcttaggtgagtacttgctagtattggttatttttaataagatctcagtttgaggagttggagtaggaagaaatcccttccagtatgctttgcagtcttttgcttactaacttacttgcctcacatgtcttggttgttttaccttttcaccagctggaaatctgctcaggccagtccattactacaaggagaaagtcagaaggtgcttctccatatgttgtctcacccattgccacgagtgaaagctgaaacttaccactgctgtctggaaatcacgaaggtgaggttttgttttttcgtatgttttgtttttgagaacaaatagtagactctcttgttataccttcaaacttaatttacttgaccttttgtatgagatataagaactatatcccataaaagtagatgataattactagtcaattctggaaaatttgtactattaaattctcttaacttagtaagtccagcaattgaattgctttatttgaagttttattaagaattacatttatgttgtattaatgatggaaaaattataaggaaaattgatttccaggtattcaaaagtgatttctatgcccaggaaaccttttaggttgttgtggcctagattttatggttttaattctgttttttttaatgttattttttatttttcttttcttttgaaatatttatttttctgtcttcttaaatgataaaatatttcagcatagaatattaaatatttcaatattgaaaagaacactgtacataggacaatatttaaaagtatatatattactgcgtactcttgaaagtgtccttttgtatttaacactcttgtaagtactatttggttataataagtgtttacattttgccatttttacttctgattcatttttattcaaagaaaaatactagttatagaggaagcttctttgctttctcttctcccaccagcatagcctagccactcttacacagctggtgtatattcttcccatccagttgttgtatattatttataaagctgtatctttatatataaatattatctttaaataatttaaagaattttatatatagcatgattagtatatatagcaggatttgagatttgcctagttcattcaccttaactgctattaagtttgaatatacttccttttattgaatgataaatatttaggttcagtctcctttttattgaagtaagtttttcagtattttcagtgacagtctgtgactgtgtgcatacgtttgaaaatgtcatgatttcactttattttgaatagtaatttggctgcatataaaatacaggttgactgctagtttttattagcactttgccagtattgcttaattcttattcggcttctatcattgttgagaagtctgatatcagttaattatgatttcttttaatttttttctctagtttgttttaaaatattttccttttctgtggtgccctgcggtttcattaaaatatgtctccatgcatacatgattttccatttatcttgcttaggacttttcgctttgaacactccatctgccttcacttctgtataattcttggtcatgcttattttgaatattgcttttctcttatccttgctgttttctccaagtggaactcttattagacctgtgttagaccttcttagtttaccctttgtgtcttttaagccttctttcatattttccacatctttttaggttttatttgggtagaatttctcagtgttatcctttcagtacactaattctttcctcagctttgtctaatttactttttttgatggtgatatgtatatataacataaaatttattttaggccaggtgtggtggctcatgcctgtaatcccagcatttgggaaggccaaagcaggaggatcactggagcccaggagtttgagaccagcctgggcaacatagggaaatcctgtttgtacaagaaaaaaaaaaaaaatagctgggcatggtggcatgtgcctgtagtcccagctacttgggaggctgaggcaggaggattgcttgagactgggaggtcaaggtacagagagctgtgatcatgccactgcactcaagcctaggcaacagagtgagtacttcatttctggaaaaaaaaaaaaaaaaggaaaaaattttaccattttaactatgttctgagtgtacaattcagtggcataagtacattcgtattgttgtaccatcatcaccattacccatctcccaaattgaaactttatagtcattaaacaataactcctcattctccccttctcccagcccctgacagccacctttctactttctgtctctatgaatttgaggtccctaggtaactcatataagtagaatcatacagtgtttgtctttttgttactggcttatttcacttaatataatgttctcaaggctcatccatgttgtaacatgtatcaacatttcattcctttttaagacttaataataatctattgtctgtatatatgaacactccaattctgaaaatccaaaatctaaaaggctccacaatctgacacttttcgagtgccgaaatgacacttaaaggaaatgcacgttggagcatttccagttttgaattttcagattagggatgctcaactggaaagtataatgcaaatattaagaaatccaaataatttcaaaatctgaaacacttctggtcccaagcatttcagataagggacactcatcctatactacattttgtttattcatccgttgataggcatttgggttgtttccatctttttgcaattgtttatatacccagaagtggaattggtagatcacacagtaattctgtgtttaatttttgaggaattgccctactgttttccacagtgactgtactattttatgttcccactggcagtgccaaggattccagtttctcttcatccttggcaatactttttatctggattttttttttttttgagatggagtctcgctgtgtcaccaggctggagtgcagtggcacaatcttggctcacagcaacctctgcctcccgggttcaagtgattctcctgcctcagcctcccaagtagctgggactacaggcgtgcatcaccatgcccagctaagttttgtatttttagtagagatggggtttcaccatgttggccaggatggtctcgatctcttgacctcatgatccacccacctcggcctcccaaagtgctgggattacaaatgtgagccaccgtgtctggccttgtttttttttttttttttttttttttttttaataatagtaaccatcctaatgggtgcaaagtcatttcccatcatagttttttttaaatttatcaagttttgattatcacttatactgtttttcatgtctataccttttctttgctttctttaactgacttgttcttttttcatgtaatctttcattagtttctgttttttttttttttttttcaacttttattttagggttgggggtacatgtgcaggtttgttacatgggtaaattgtgtgctgctggggtttggtgtacaaatgattttgtcagccaggtagtgagcatagtacccaataggtagttttttgatcctcaccctctgatatggtttgtctttgtgtccccacccaaatctcatcttgaattgtaattctgtaatccccacgtgtcgtgggagggacccagtgggaggaggtaattggaatcatgggggcagtttcccccatcctgttcttctaacagtgagtgagttctcatgagatctgatggttttataaacatctggcattgtctctgctggcattctgtctctctcctgccgccctgtgaagaggtgccttctgacatgattatttcctgagacttcctcagccatgcagaactgtgagtcaattaaacttctttccttatgtattacccagtctcgggtatgtccttatagcagtgtgagaataggctaatacgttctcttcccaccttcccttgtgaagtaggccccactgtctgttgttcccatctttgtatccatgtgtatacgcagtgtttagttcccacttctaagtgagaatgtgctgtatttggtttttctgtgttaattcacttaggataatggcctctggttgcatccatgttgctgcaaaagacattattttattcttttttaatggctgagtagttttccatgatgtatatgtaccatagtttctttatccaatccactgttgatgggcatctaggttgatcccatgtctttgctattgtgagtaatgctgcagtgaacatctgggttcatgtgtctttctggtagaaagatttatatttttttgggtctatacccagtaagggattgctaggtcaaatggtagttctgttttaatttctttgagacatctccaaactgttttccacagtgactgaactaatttaaattcccacaagcagtgtatagggcttatagtactgtgttcccttttctctccaaccttgccaacacctgttattcttttactttttaataatagccattctgactggtatgagatgatatctcattgtggttttgatttgaatttttctaatgattagtgatattgagcattttttcatgtgtttgttgaccgtgtgtatgtcttcttttgagaagtgtctgtttatgtcctttgcccatttgtaatggggttatttgttttttacttgttgatttaagttccttatagattctggatattagacctttgtcacatgcatagtttgcaaatattttctcccattctgtaggctttttacttagttgatatttttacttagttgatagtttcttttactgtgcagaaactttttagtttcattaggtcccacttatctatttctgtttttgttgcaattgctttttttggagacttcatcatgaaatattttccaagacctgtgtccagaatggtatttcctagggttgttatagttttaagtcttacatttaagtctaatccattttgagttgatttttatatatggtgaaaggaagggggtccagtttcaatcttttgaatacgcctaaccagttattccagcactgtttactgagtagggagttatttccccgttgtttgttattgttgtcttttcaaagatcagatggttgtaggtgtctggctatatttttgtgttctctaacctgttctagtggcctgtgtatctgtttttgtaccagtaccatgctgttttggttactgtagccccatagtatagtttgaagtcaggcagtctgatgcctccagctttgttctttttgcttaagtttgctttggctattcggtctctttttttggttccatataaattttagaatggttttttctaattctgtgaagaatgacattggtagtttgataagaatagtgttgaatctgtaaattgctttgggaagtatggccattttaacaatattgattcttcctattcataagcagagaatgtttttccatttgtgtcatctctgatatctttctgcagtgttttacaattctcattgtgatttggctctgagcttggatgttattggagtacagaaatgctactgatttttgtacattgattttatatcttggaacttcaccgaagtcatttatcagttctaagaacttttgggcagagaatatggttttttcttttttttttttttttttcaggtatagaatcatctgtgaagagagagagtttaacttcctcttcctatttggatgccttttatttttcttgcctgattgatctggctaggccttccaatagcatattgaatagaagtggtgagagttggcatctttgtcttgttctggttctcaaggggactgtttctagcttttgcttgttcagtatgatactggctgtggctttgtcatggataactcattattttgaggcttcaatgcctagtttgatgagggtttttaacaagaaggaatgttgaattttatcaaaagccttttctgtgtctgttgagatgatcatgtggtttttctttttggttctgtttatgtgatgaatcacatttattgatttgcatatgttgaatcaaccttgcatccagtggataaggcatacttgatcgtggtggattagctttttgctgtcctgctggtttcagtataccaatattttgttgagaatttttacatttatgtccatcagagatattggcctgaagttttctttttttgttgtgtctctgctagggtttggtatcaggatgatgctggcctcatagaatgagttagggaggagtcactcctccttcattttttggaataatttcagtaggattggtaacagttctttttacatttggtagaatttggctgtgagtttgtctggcccagtgtttttttctggttggtaggctttttttattttttaatgactgattcaactttggaggaacacattactgttctgttcatggttttaatttctttctggtccaatcttgggagtttgtatatttccagaaatttatccatttcttctaggctttctatttggtatgcatagagtttttcttaatggtctctgagggtctttctgtggggtcagtgataatgtcacttttgtcatttctgattgtgtttatttggattgtctctttttttctttattaatctagctaatgatatatcaatcttgtatattcttttggagaaccaaaatttggttttgtcgatcttttgtgtgaatttttgtgtctcagtttcattcagttcagccctgattttggttcttctgctagctttcaggttggtttgctcctgcttttctagttcctctaagtgtggtgtcaggttgttagtttgcaatctttctaacttcttcatataggcatttagtgctgtatagtttcctcttaacactgccttagctgtgttctaaagattctgatatattgtgtttctgtttttgttagtttcaaagaattttatgatttctgccttaatttcattctttactcaaaagtcattcaggtgcaggttgtttaagttccctgtaattgtatcatttttgagagatcttcttggtaataatttctatttttattgcactgtggcctgagagtgtggttggtatgatttcggttttcttgaatttgttgagaattgctttacagctgagtgtgtggttgatcttagagtgtgtgctgtgtgcagatgagaagaatgtgttttgcttttgttgagtggagtactctgtagagtctcctaggtccatttggtcaggtgtcgagtttaggtcccaactatttttgttagttttctgcctcagtgatttgtctaacactgtcagtggggtgttgaagtctcccactattattttgtggttgtctaaaactctgtaggtctctaagaacttgttttatgactgggtgctccaatgctgggtgcattatatttaggatagttaaatcttcttgttgaattgaaccctttatcattatgtaatgcctttctttatccttttgatcattgttggtttaaagtctgttttgtctgaaataagaagagcaactcctgctctttttttgttttctgtttgctggatagatctttatctccattctattactttgagcatgtgggtgtcactgcatgtgagttgggtctcttgacagcatatagttgggtcttggttctttatccagcttgccactctgtgctttttaagtggggtgtttagcccgtttatgttcaaggtcagtattgatatgtgaggatttgattctgtcgccatgttgctagctggttgttacgtagacttgattgtatagttgcatcatagtgtcagtgggagatgtattttagtgtgtttttgtggaggcaggtaatggtcttttgcttccttttttagcactccattgaggaccccttgtaagtcaggtctcatggtaatgaattccctgagcgtttgcttctctgaaaataattttgtttttcctttgcttatgaagcttagcttggctggatatgaaatacttggtttgaatttctttaagcatgctgattataggtccccaatcttttctggcttgtaaggtttctgctgaaaggtctgctgttagcctgatggagttctttttatatgtgacctgctctttctttctagcttccttttaagattttttctttcctgttgaccttggagaatctgatgactatgtgtcttgggggtggtcatcttgaatagtatctcactggggttctctgagtttcctgaatttgcttattgacctgcctagtgaggttggagaaattttcgtggaaaatatccacaaatatgccttccaagttgcttgctctctctccttctctttctggaatgctgatgggtgttaggttcgttttgtttacataatcccatatttcttgaagtttttttttttaattcttttttctttatttctgtttgcctgtgatgattcaaaggagtagtctttgagctctgagatttttttcctcagttatgttattaatgcttccaattgcattatgaaattcctatcatgaaatttttgtttccagaagttcagttttgttcttacttaaaatgtttgtgtcagatccaatcatggatcaaaccaccattttactggtttccatgggtggggcttcagccttcttctatatcttgtcgagcttccttgccttccagcttctgaattctgtcattttagccatttcagtttggttaagaacgattgctggggagctagtgtggttatttgaaaataagaagacattctggcttttagaattgccagaattcttacactgtttttttcttacctgtgtgggcagatgttcctttaatctttgaagttgctgtactttggatggggccttttgcttttatattatttgatgccattgaggattttactgtggtataagttgggattagtcaattggcttggtttctgtgtgctttcagggccagagctcagctcagcacccctgggctgtgtgctctaaccctgggggtgcactgaacaggccagtggctttgatttctggtcccttgaggtcaagcatctgctgcactggaggagccgagatgttcccagactgctggcaacaactttccgatggtgactgcccgagaaagtgctctgggggggcgtggggcggtgctttgggagagtgcacttgtggtgggggtaaccatgggcaagtgcgcactggcaggggaggctgcaggcaagtgcacaccagtaggtattggctgtgggtgggtgtgtgcttgcaaaagcgctctgacaggaaggcagaggctgttggcaaaagacctatggggtggctgttggggagcatttcggcagggcagctgaggctgtgttgcaagctagtgagacagacaggaccctttgagaggctggcagacagggtggcattcagatcaggttggcccagtcttgtgggaaagatagccctgctctttctacttctggcagcgaactaaggctaaagccacctagaggagtatatcaagatttgggtgatgggcacctatcagggaacctgccccaatagtcacgtagtttcttttctgttttccctaagtgtcggctgggttgggaaataaagggacagagtacaaaagagggaaattttaaagctgggcgtccgggggagacatcacatgtcggtgggttccgtgatgtcccacaagctgcaaaaccagcaagtttttattagggactttcaaaaggggagggagtgtacaaatagggtgtgggtcacaaaaatcacgtgcttcacaaggtaatagaatatcacaaggcaaatggaggcagggcgagatcataggaccgcaggaccgcaggcaaaattaaaattgctaatgaagttttgggcaccattgtcattgataacatcttatcagtagacagggtttgagagcaaccggtctgaccaaaatttattagatgggaatttcctcttcctagtaagcctgggagcgctatgggagactggggcttatttcacccctacagtctcgaccatagaagacggccacacccaagggggccattttagagacccaccttcaagggcacattctctttctcagggatgttccttgctgagaaaaagaattcagtgatatttctcccattagcttttgaaagaagagaaatatggctctgttccacccggctcaccggcagtcagagtttaaggtgatctctcttgttccctgaacgttgctgttattctgttcttttttcaaggatcccagatttcatattgttcaaacacacatgctctacaatttgtgcagttaacgcaatcatcacagggtcctgaggcgacatacatcctcctcagcttacgagatgacaggattaagagattaaagtaaagacaggcataggaaatcacaagcgtatttattggggaagtgataagtgtccatgaaatcttcacaatttatgtttagagattgcagtaaagacaggcataagaaattataaaagtattaatttggagaactaataaatgtccatgaaatcttcacaatccacattcttctcccatggcttcagccggtccctccgttcggggtccctgacttcccgcaacaggcacctatggccatgccccattgcagccattactgcgccagaccctctgggctctgtgcagactggcattctgtctctggcaactcattgggcagttctcccttgcaactcaaaggtctgtgcaggtcatggggtctcccatagttaggatcctagaggatcgttgcaagagtgggctgctccatgcctgttgcacttgccacttccctaagagctgctcaaggccaggaacaagtcctctagtttcttcttttgtgttgttgtgaattttaaacatatttattttataatcttgtttagattatggtattagaatcctcccacttgttatggctattgaatcttccttatgttgtttattttagcagatactgttattttgattttcaggtcttctttggcagggtagctttttcttgtgatcttgtattctctagatggtggttgtatatttgtttctgccttgcctttagggatttgacagttagtggtgatgcaccttggaaggggtttgtaatgaagttacattttcatttgtgtatgttgaaataataaaaagaatcagaggaggaaagattgaagatagtgggtagcaagtagctaattaaaagaagctagtgcctttgaaagttgaaggcggtgggaccttgaacatgatggctaattggggttaggtgggcttagatatcacaggaagttgcaggagcctccttctattgagtctgtattttctttgagattgaaagtgagatgttgaatgtgtgaaatgactaatatgagtagatatttgataatatcaaatagtagcatttttgggctgcatgaagagcttagtcaattgtgtctataatcttaatagggagactcttctactttgcatgtttatctttggctagctggtgtggtttctgggaatgtgaaccttgcgatcaatcaagggttgagttatttcattgctgtcggggaggagggaatgcctgtggtgcaagtgagctgagtagttgaaatgacatgtcgactgtagaaccaaaggctgtaaagactacagggaagaaagtagaagggtttatggactggaggtcaaagaaggaccatatttcaagttgagtaagaagattagaaacctacatttatgattttagaggtagaacaagtgaaaagagaaggggtcctcagttatagggcaggtgagtatcattgagataaataggtcaagaaactaagatcactgtatttgggatagttattataccccgaaatttaaaatggtggaatacgatttgatatctttcttgaggcagattttaaataattattggaaataaaaatttttgcagataggaaaatatttggtgtaaattgagttattgatgtatatgatcattttggtatatgatgaatttcaagtaggaataatctggatgttaattttttagaggagttctaaaaaattaacatccagataatttttcctgtcatagaatgataggaaaaaaggaatgtcagaaataaatatgtatgtgtcagtttcgaatttgtttttaaaaaaaatgcactgaattttagtaattttgaaaattctaaattttaatatactatagtttttataaccaagtgtcatacattttgttgcaaaatttaaactgaaagaatattttttgttaaaactcgccttattatcctagttgtagaaggagataaaataaaagaatgtgaactttcatttaatgttttattttcttgttaactatttggaaatttatattagttgacactgttcttgcaaaatattgtgatttttcttttgtcacaaaagataatcatctgtatagtgcaatgtggttttaaaaaattcatgtgtatttactatcagggagttataataatccaagtcaaaagctccaaatgatgagatttcttgtagttagcccctgtgtcataaagatatagtatcttggtttggatataaggatttgtaaaggcatttcactttaattggctatgtctgtcagatgatattattccagtgtcttctggtaaatctccaaggcattgctgcagctttacctacctaaatgtaggagcgtgctagtaatgtggaggttactttttctgaagaggcaagttagctttttattgtaagacttaactttgaggacggtatggtaaagaggtaaaatagcttttaaatttagggatgattaaatggccaccacttccatgttacctacatctaacattcatttagcaatatttactggacactttaccatatgctagactgtagtgatataaagtacagaaaagagccttatcagagagcttatattctgataggggacagagagagatgtatgtaataattaagaaaaattccttaaatacataaaaagtatgtatgtgtatgtgtgtgtgtatatatgtatatatagttttctttataacactatatgtatagaatatgtatatatatatatagtttacaacactgcatatacattcaatgtatatagtgttttaaataaaatagtgttgtaaagacaatgaaaggataaaggactagagaatgactagtaacgtggactaaatttatgtaggctggctagggagggagggagaatttctagcccgaggaaacaacaggtgaaaagcctctgcttttcaggtgagaatgtactttgcgtgtttcacgaacaaaaagaagggcagtataatgagataatagaaaaatggtaccagattgggtctgaaaagtaggcagggtgccaaacattataaagctatgaattgtattctaagtacagtgagatgctatgaatgattttaacgtgatctgatgatctttctgaaaagatcactctcccattgtggggaatggattgtagggggtcaggatggaagcaagaagaccagtttcattgtagtagccctgatgagatgtggtggtgtagtggagatgaagagaaggaaatgaatttaggaggtattacggacgtggagctaattggtcttgctgataatgagagtaggagatagagagtgatcaaggatgaattttaaggttttggatctagcagttggattgatgtcccaaatatgggattgtggattgggtagaattctgttttgaacctaagtttgacatgcctttttatatcaagtgcatatgttaagtagactgttaaatataataatgctaatgctaataatttcattgataatgatagcagctaacatttattgagcatttactcttatgtatcaagtacttttataagtatattatctcattgaatcctcctaacagctctgtgagctaggtactacctctttctgaaaacggagatactttgaatttgtccaaggtcattcaactaaaagtggtgaaactgggctttgaaccctataggctcactccaaagcccatattcttaagcattgcaccacactacctttggagtgtggagcccagattaggtataaaattttcagtcatcagcttagagatgatattaaagccacaagccttgataggatcaactactgagagactagggaagagaaggctgtctaggatctaaccagttagaagttgggaacagagggagccagaagtggagacagaggttagaaggaagagtcacatgagaacagagatgaacacgttggatttggcatcgttgaggttgttggtgtcctctatgagaagctcctgtggaatggtaggaacctaagtcctgctgatgtgcattgaagagggtttggcaaatgaggaagtactgactgaggacagcgaactcttgtgaggactcgtggtgggaaggagagctgaaaaatgaattgttatcaagaggagaaagccagggccatagacacattagaatatgtcatatggtgattagaataatcatgtgaagaaaaataaaggtgctggagaaaaataagacaattttaggaagtaaatcttggtttcagaaggggatagtcacagtttagatggtagataagtatcttaaggaagtaggtgacagctattgtttagggctgaggctttagatctttgaaaaccttgtaatatgaacgaagttgctgtctgtggcatgaagttaacagttgaaagaaaaataatgtatgcaaatacatatgtgagtgtatgtgtgtaactttttgacctttgaattgttgataataggaagtagaaatttgcagaatgaaaaaaagtagtattcatgtaactcattatttattgtatttttaccttctatattgtatttaaattccattaatatttcaagtagctttttttcccctctcaccttaaatagctgctaacaaaatactattctctatcacatattgagaaaaaaattcctgatagttactctaagtgttggttcaaagtaattgtattttaggtacatagctgtattgatgataactttatataatcatatatatatcacatatataggacataaatatgtagcataaaaaattatatataataggtatattatatataaaatatgtattctttatattctatatatatagaatataaatatatatagtatataaagttatgtctcccataacttgaagtccttgaagtcttttcatgttgaatttttctttcccaacctttgtaagtaaaatgcaaacaccttaggataagtttcttactgtgtttatgtcctttgtgtctgtcatgatgaattaactttaagagattatggttgtctcagccgtttgtttacttaatttatcatgattatgcttgtggcagaaagtaatataatatgtatctcctacaaactaagaaactgttagacaggagaatctttttcattctgtcttgttaaaaaaagtttcaatgaagtaaaaactaaaatagaaatgggattgtaaacagaagaaagatggatcttttggaaaaatcagtgttgctaatttaaaaatactttttaatattattttacaggaatgtttaggtgtccataatgtcactaaacccgtgtcttcactttgcaatggaattcattttctacttcatccaaaagttctgtatgaaatctctgtatttggcattcaagagcccgaaagtgaggtatgacattaaacatgagtgaaaatattacagtaacttagatactcagctaaatcaaggtgatattctaatatagtttagatagcatggtgagaaactaaaaagaaacctgtctttggtgcattggttcagttgaagtgttatttaaataaaaataaatgttacataaaatgtgggaataaaaatacaggacacacttgatttcaaaaaattcagatcagtttacttacatttttcatctaagatgtagagaactatacagtacaggtagtaagcagattatttcagttagggaaatttttactcaagggacaaatgtacattaaaggtaaaaaattagaaatattaaggaagaaaaacagaacagaatgtaagatgatgctgtggaagtacgaacatttgaaagaaagagatgttaattatagcatctttccacatgctataaaatgttccaggtgtgtcaggtgacctagcgggacatctcatttgactggtttatcgggtctgtgttgttgagcaggtgaacactgctgccaaggccattctgttatacctgcttcagggacgattgatgatgacagcattgacctggaacaagtttattgaatctctctgtcctgtcatcccaatactacaggtattctgtgaaattcactttttatgataccatttatctttggctgggtgtgattgatttaaatgcatgcaaacagctaaactgtcaagttgtgagagaaatgaagagaagctgtgaaggcgctggggataagtgaacaggaagtgggtggctgtcttgtttctggcagaaagttaaaccaggatagctaatttgtctgtatatattttatatatctgggtgggaggttaaaaagtgaggtgcattcacagcattgactgtgaaaaatagaactcaaccttatataaaggcttttaggcagagctaacagtgctttttaaggagaccttacataactaacttgcctcatgagttctatccatgcatatgtatgattagagtgataccgtaattaacatgctcctagaaacagcttttttttttttttttaaaaaagcaatccttctggacattaaaggagtcagtttcctgtctcttttggatgaaaaggtggagttcagaaatgccatcataagcacagtcctcttttagaagagagagcctgggccttgtgccttgagactcacagattccatgcgtgtagcatttagagcactccatcttcttagggtggggatgggctgaggatctgtgaggtgcttcaccgaggggaggtgccactattagaatcttagaaaatagaaaaatcagcaagtgtcaagaaggttggcatgttttcctgaagttctcctgtatgtatgtgtattttcttttaaatacagttttatttaggctccttggctcatagaagttattttaaaaaataatgattttattcaactgaatccaaagacatttatgagttgctgataggacaatacaattcttattttcaagttgaaaagttatgtatacaattagacaataatttctctttaaaaacaaatctattagggctatgccgacacagaagatcctctgggtaactgcattctccttctaagcaaagcaagttctgacacagaagagatgcttccgtgtactacccgattaaagtccatgctgcgacttttgctagtgaaaaagccatcgtgagtacaacgtaatcttgtgaacgtcaaagattgatggaaacatgctaagaaagtatagtaactatatataatttgaaacaaaactaaagaatttttaaggagggtgttattccattactagaggaaaccaatgcgtgaaactaagcagatacaaggtcttgtatgtacttgctgacgtttcatccactttacagccaagttattccttgccagatcagcctgtgttacaggactgctactaagtgccgctcagtagtgccctaggcaagttggagagccatggagataaatagatggtaaaaattatagtgcattcccatcttctctttagaaattgttagccttccagagtgatccttttgtaaacatctgttctgaatattcagtttttcataagtatagtaggccagttgtctcaaataccagagttatgcaggtattttaatcccatatagctgtgttcttacttggggaactgaaaacatatcctttctttgactgccattaatataagcattgttttaattaatgaaaagaaggagaatgatactgtttttcttccttctctgtcattgcaacatgaatcttttctattattatttttaggtaacagtggttagattttcccttactgaaaaaagaaaaaaatgctgagtcgagatggataagcagggataaagaggaatagttggttgaaaaggctaggaagaatggacagacattcttttcacaatggataatttgtgtttcccaaaccttacatcaggaaaatacagcagcttatttatagacagatcattggactgaaagataaggaaataggtggaagttaactaaactattaagagaatggaaggaggaaaattatagtctttaaaatatctctgtattgtagagagtaatgttatgggtgatccaggaagaagtagggcagagggagttaacgtgcttgtgttctcaggggttgtcttctacacatgcagaaaagctgttccctgttaattaacatgctagtgtggtactccttacttgaacaaacccccagtttggagaattaacacaatagggggcatttcttgtttgtttttcgggcccaaggtcctcagtttaataaagacattctaaggcaggacacccccaggagcatagtgcaaggaaaggccagatctttctttgggtaagataagtctctattatatagaatttgaaacaattcaaatgacatatttgttttccttattgtattaattctaccccatcccatcaacccatccataaactccatgtagacaggaaccctgtccgttggctaatctttatattctcagaacttcatagcgtaccttatacataaatacacagtcatgcgttgcttaatgacatggatgcatcctgagaaatgctttgttaggtgattttgtccttgtgtgaacatcatagaatgtaccttacacaaacctaagcaataataacttaactacatacataacctaggctatatcctatagcctattgcttctaggctacaaacctgtacagcatgttactgtactgaataccatatgcagttgtaacacagtggcatttgtgtatctaaacatagaaaaggtttagaaaaatatagtaatataatcctatgacaccactgttgcatatgtgatctactgttgactgtaacattgttatgcagtacatgactgtactcaaaagttttaaagaatgacatacatgtataggaataactggattctggcatcctatgctaaacctaaaaagatgctaaatgtatataccagagaacaagatgcataaatacatgctttacatatctcatctctagccacctttgctaggggttatacctgtctctcaactgacaaccccagatgtgaatacagatatcattggcttagaatgtaaggaacaaaggaaaactattaggtaggtgtttagcctttctaagctctcttgaggtaactcaggaaatggagagggagaaagtttgcctgacttattagtcctctggagatgatatcagttaacaatattgcagtaaatatctactttgtgtttgattcaggaagtatttattgggtgtcttactatgtatctatgagctgtgggaacgtagcagcacacaacacagacatgggccctgccctttcagcatttagtgtgtaaccgggaatatagctcttattatcaattattctttattattaattgtcataaagtgagataaaagttatgatacaggggctcaaggtggcaggcctgcatacagaaggcaacctgctctagtctgtagtaggagggccaccctaatgatgcatgttttaattgttgtcttataggtagttcttaaaacctggcaacttgtattattgcttaaaatttgtccagtttccaggtagttcaagaacctatcagaggagtgacagatacatggttgtctcaatatctgccgcctcagtgacctttgtccactcagtggtttttctgtttctctatttcattgtttagtggcatacagtatttactcttttcttgaaaggtctcccacctccccactcagctgaccttattcctaatcccttccagataaggaaaaagtatttgtattttcatatttgacaggaatctgtttggcccctaatatgagaagattttgatacattgtagtgttatcacacttccattatgagcgtcattactctcctgtgggttcaacttaacatttggactgtggtcagcggtctgtgatactttttatggtggagaatagttcactagatttgaagacaggagttattgatttaattcgcagatgtacttattgaagtttactgatatttaatctcagtgagtctgtctcatttgtagttattattttttgtttctgatgtttattttataactattacattgaataaatcattataattatatatcgaagaatttttagtagaaaaagtaaattattactagtaatggcagtataattgtgactacttattgtactttgttgatatataattacttgtaattacaagcccttttaaaatagacatttgcatatcacgaaagttcgacttaagtactttgtgttctcagggtccgttcgctagcattaaagcttttagcattccatcttaccagtgaagaaggggctgatacaaagcgtcctctaatagacgccagagttctctccagagttactgatttattcattgggaagaaacctattgaactcagactggatgacagaagagagctggttattaaggtgactataaattttgagtttattactgtgtggtaatttgatacatttttatatcatgtattttatgtgacattcttcagtttgtgtatgtcctggggagggagagaagtatggggattcagggctggtttgaaattgtgttctggctttatctggcttctagatacgttgatttattgcagtggtcccaacctttttggcactagggaccagtttcacaggacaatttttccatggatcagggcaggagtattgttttgggatgattcaagtgcattatatttattgtatactttatttctattgttattacattgtaatatataatgaaataattgtacaactcaccataatgtagaatcagtgggagctctgaacttgtttttctgcaactagacagtcccatgtgggggtaatgggagacagtgacagatcatcagacattagttaaattctcttaaggagcagccagccaagatccctcacacacctagctcacaatacggtttgcactcctatgagaactgaatgccgccactgatctgacaggaggtggagctcagatggtaatggcagcaatgggcagcggctgtaaatacattttcctgtctttagctaggactgtacctatagcatactggactgatggagaattctataaagaaagctgtccactagtccactgttttcatggattcattcctgtgttttgtactttctcatttcactcaagtttgcaatctgtctgttttattttagactaacttgccaaggcctgtagtagtatggtagagccacatgtaatacagtcggtttttttgtttgtttgtttgctttttaatggggaaacacattatgttcttctaaactgaatgttcagggctttatgacagtgctggcagggggattggagagtcttcactggccacataccaggtctggttgggacttccctgagtactaagccattggtagtcactcctgtgccctgatgtatggaggaaggcggggagagggcattctaatacgtcttctgtgagtccatgttaggactggaagatagcagtgagtgggagaaaggagcttcatctttgttattttcttgtccctttttcctgatgctggttttgccacctcagattctgttctagcatgaagtgacagtaagggacttgtctggggggtagctttgaaggggtgctggacagcaagtcccagagtgctgtttgctctggggtcttctaaaagaaagaatggagaggcccacgggaataccagctggtggcttctgggagcaacagggaaatcttgagtcataggtctgggtcgcttttctcaggttagcctggtactacctgtaaagatgttagggaacatggttgttttctgttacctttgtaaggttgctaatggattaatgggttatgaataacttcctagcaaaaatgtatattaagaagagaggggccgggcacagtggctcttgcctgtaatcccagcactatgggaggctgagatgggtggaccacttgagcccagcctaggcaatatggtgaaaccctgtctctactaaaaatacaaaaaattagctggggttggtggtgcatgcctgtagtcccagcaacttgggaggctgaggtaggagaatcacctgagcccaggaagtcgagtctgcagtgagctgagattgcaccactttactccagcctgggtgaccagagtgagaccctgtctcaaaaaacaaaaaaaaaaaaggaaaacttatttgacatgatgactctttattttagatcttaagttccttcctgacctactgcatcattgttgcaaattttatttatttatgtatttattttaaacttttatttcagtttcaggggtacctgtgcgggtttgttatataggtaaactcgtgtcatgggggtttgttgtacagattatttcgtcaccctggtactaagcctagtacccgatagttatttttcagatcctctcccgcctcctaccccccaccctcaggcaggccccagtgtccgttgttcccctctttgtgtccttgtgttttcatcatttagctcctgcttataagtgagaacatgcagtatttggttttctgttcctgtgttattttgctaaggataatggcctccggcttcatccatgttccctcaaaagacatgatctcgtccttttttagggctgcatggtactctatggtgtatatgtaccacattttctttatccaatctgccattgataggcatgtaggttgattccatgtgtttgctgttgtgaatagtgctgcagtgaacatacacatgcatgtgtctttatggtagaatgatttgtatttgagtatccaacatctataaggaacttaaacagatttacaaaaaaaaaccaaacagctccattaaaaagtggacaaaggacagaacagacatttttcaaaagaagacatacatgtggccaaaaggcatatggaaaagagctcaatatcactgatcattggagaaatgcaaatcaaaactgctacgagggaccatctcacaccagtcagaatggctatttatttattttttttgtgagacagagtttcactcttgttgcccaggttggagtgcagtggtgcgatcttggatcactgccgcctccgcctcctgggttcaagcgattctcctgtctcagcctcccgagtagctgggattacaggtgtgtactaccacacccagctaatttttgtatttttagtagagatggagtttcacaatgttggccttttgtgtttctagtagagatggggtttcaccatgttggccaggcttgtcttgaactcctgacctcagatgatctgcccacctcagcttcccagagtgctgggattataggcgtgagccatcgcacccggccagaatggctattattaaaagtcaaaaaatagcagatactggtgaggttgtggagaaaagggaatacttacacactgttgatgactgtgtaaattagttcaaccattgtgaaaagcagtgtggcaattccttgaagacctaaatacagaactgctacttaacccagcattgtgtgaatttacctgtaattatgttggttatttaaataagttgactttttgagcttttgttcatagggcacaaactataaaatcttattggagaattggaagcagataaatgtaattttggtttttttttttttttggtttgtagttggagactgttgaaaaggtatatgaaatcttcacctcagatgatgttgatctcgttttgagaaagtcagctgctgaacagttagctgtgattatgcaaggtaatgtcttttaagggaaatgattgctgtactgctgataatagaattttagattgccatatggtactggcaggagttggcaactatggtttatgcgccagatccagcctgtggccttttttttgacagccctcaagaatggtttttgcatctttagagttgttaacaaaatccaaccaaaaccaaagaatatgcgagagaccatatgtgtgtgtctagcaaagcctaacaacatgcttactaacctggttctttacagaagaagtttgctaatgccttattattatttgacctgtaaaatgccatttgatagaattatcttctttctaaaatattagtgtacttccaatagtgaagtgcatgttccttcctctgtttactgagtgcatgcatcatattttcaatctgtaccatcttgcttagggaaattaatcaaataatacttttgtggtaggtaaaagaaaaatagtacactgtagctatgccttttctttaaacgtttatttttatttttttaaattatactttaagttctagggtacatgtgcacaatgtgcaggtttgatacataggtatacatgtgccatgttggtttgctgcacccatcaactcatttatattaggtatttctcctaatgctatccctcccccaacccccaactctgtgacaggcccgggagtgtgatgttccccgccctgtgtccaagtgatctcattgttcagttcccacctgtgagtgagaacatgcggtgtttggttttctgtctttgtgatagtttgctgagaatgatggtttccagcttcatccatgtccctgcaaaggatgtgaactcatccttttttatggctgcatagtattccatggtgtataaatgtttatttttaaaaacaactagtgtaatacactgttagctttgtttgtagtgttgttattccataggcttttgttctttgggttagttttgaatttttccccatacgtgatgtatgtactttaatatttatgagaaatgataactttgagtttatgtaaaaagatttttatggttagcacttcttgtcttgacattagtggaaactggaatgagagagttatttgaaaaaacatattccacatatttttagttttaacaacaatcacacagactacagaaaagaagactagaaaatgtggaaagccctggttaaaaaaaagatcaagaaaaactcgttaaagagtattccttcaatattgttaacatttcaaaagtatgccttataattttggtatgcactatattggggggcaatggaaatttttttttttaagtagcagctaaagattgttacaatgatagcttccacttcaatatcagtatgtgagtgtatgtgtttttcctaatgagaatataggagaaaatttgtctgcaagttgttaaatacttgtaacgaatatataatcaattacagttttgggttccggtaacatttgtgtgtgcgtgtgcacatgtctatacatataagatttttttatgtatatacaaaaacttctttattacaaacataatatgtgaatatatgcttattaaaaagaagctcaagttctccagaaatatatagtgtattataatcttgttccttttatatttgctattaatagtttgaggttagagatttttttatagatagaaaaatgttcatgttgtaagtcatattttacacatgagcttgtggagaattataaacatttgaaggtgataaatttggaagagtcaatgaaataatataaagaagataatttgcatgtataaatataagcattcatttgtacacttaaattctcgtagttttcagagtctgaactagttccataattctttttttatagttttgtattttatgtgacagaagtaagatatgctttttacttaaacattttcaaattggacaggtgtacgtaaagtaaaaagttaaaagtttcatactcttatgtcaaccccaggtctaagtatttttaatagtttgaaggttgtgtggatatcagttctgagtatttcaaaatacgtgttttaaactacaaaaaatgtgctttaacttttagtaactttttttatctacagatattaaaatgcatgctgtggtgaaaaagttatgcttaattgacaaaataattgagtatttaaatgaatgtgtgagtcaagatggcaaggtaaggctaatgtgcatctagacattgttttacaggctgttttgattaatcagatctgaaattgaactgagcagaatttggatgagtacttggattttaaattctaagtaacacctcctatctcattcattttttttttttaaattcgaaaagtggagtctctataaaggaaaactaatcctaaaatttccataagataggtgatagaagtatatacgaaacttactttcagtggaaagtaattcctagtatttatttacattttagtttcagataattttgatgaaaacgcataaaatttagagtaagataatattatggtctgtttgatctcacctgataattggtgaaaatgaaaagctgtgtttttcctcctggcccaggttgtagaatgtttggtacaaccatgcctcacactcttgaggaaggttttatgtggtgatccagtcatgcgtgtttcgctctcgcaacagtcttctcttttgaccgtgttattcagaggtaaataaaagaaaatctgctaataattagattgttcttaaattttaagtgtttcttctttaattgtaagtcacatttactttttattttactattagaacaacagcatttattagtgaatacactactaatgtaaatggaaaatgtttaatatttttgtggaaattgctttctaatcctgttgctgagtggaggctagagctgagaaaagctgaaacctctgattgttctttgtgccttgatgtagatgtcatctggtgctcagacagtaaactattatctataaagagagaaagttgcagctgctgttattactatcttctttccaatatctctttcgtctttcttgttttgcttatacctttggatcttggtacattttgtctgattatttcatttgacaggtgttaagagtataggctcaacctgtgtgagtagaaactagaccatcctaaatgactctgagcctaaatttattacattctataaaatgtggtttttaaaaacccattttaatttgattctaatttagtaaggtgttagatgaacacgtttcatgtagttttgtccttcctgtcttctctgtttttttttttttctcaatggagagcttggtaacattttgtactattttttttcttagagacttaggccactgctttttgatattttgcaagagtcatgtagaatcatctgaatgtgctgaagagtcacgtacaagcatctgaatgtgcttcatcttgtctattatcaggcatataggagataagtgagatttatgttcaaaatatgttattataatgtagtcattttattttagcatcttttcctcctgttggcttctgcttgccaagtgagtaagatgcagtttatttaagtagcagccctaaaaccaggtaaagctctaaacagattcagtgtgtttaggctcataacattttgagtggactataacgtttttataagattgtatagactgatcatctgaaagagcagcagttacggatttttagttttctttaatcctgttaataattgtcttcttattaacctcattcacttgaatttagttcctggtttaccttttcatttataattttcatttaaattattcaagcatggaacttattatgaacacctactggattcaaaagcacatttcaaggcaatataatctatacccttttcagtatttcagtttttctatttcattgctgtttgtggaaattactttcaatgagtttgagaatgaatatagtatcctccattaatggatttagtttcaggaaaaattttacttacttacttatttatttattgagaaagaatttcactcttatcacccaggctggagtgcagtggcacaatctcggctcagtgcaacctctgcctcctgggttcaagcatttctcctgcctcagcctcctgagtagctgggattacaggtgcctgccaccatgcctgggtaatttttgtatttttagtagaggctaggtttctccatgttggccaggctggtctcgaactcctgacctcatgtgatccacctgccttggcctcccaaagtgctgggattacagtcgtgagccactgtgcctggccgaaaaattaatttttaaccagctgcttaaccaagaaaacccatttctcagcaaacgtttattaagcacatgctttgtgctaggtgcaatgctaggcccttgggttatattggtgagcatggtaaatgaccctcatggagcttacagtagagttggagacattgacaagtaaatatacagtacaccacagtaatacttgtaattggggattcctggtgccagaggacatgctggtcagattggttggtgaaaagtatcagagattgtttctagggaatgtggcatctaagatggaatttcagaaatgagtaggagttcaaataggcaagattgacttctagatggagccgtggttgtgtgtatgagaaattgatgtgtttgagatggagctggctggatttggggagtgtggagtgaaggggaaatgatgggatgaggcagggagggcagttcgtgcagggcctgggagattttattaaacagcagtgaagagctgtttaaggttgttaaacaggggagtatgtgttttaggaagattatttctgtagcatggatagtggatcaaatgagtacaataaataacttctcagataacactgctttgaattataaactttatgttatgacagaattctatagtgtatttcagggttagaaattaacttagaaatcatttactataccatctgtgtgaggtctagagagatttagcaacttggccaaggctataaccaaaaaatggttattgggttatttactttgctactgagagagaatcgaaacttccttacctttgtttgtttctgttttaaataatcacagacctatacatccccattgtaaaaattcaggcaatatagaactatacaaattctaaaagttttcattttcttctcgttctcaatttccccaaagaagactgttctggttatcattaggaatatatttttccgaatgattttttctacatacacatgtagttttcattctgtatattacagtattgtgttgcttccttttttcaactggaaatgtaacttgaatatctttctatattatttcatgtgagtatacattctttaaaaaaccctaaaaactactgcactggtgttgcagaatttcagtttgctatgttactgggtatttgttttagatttttcaccatgacagtaatcatgttgtgtgatcatctttgtgcattcagtgttggaattcctaggtcaaagagattttataagataatggttaagttcctttccaaatcactctcaccaaaggtgtttaaaaatgcttattttcattacaactttgccaacactgaatatgtctcattaattttttttaatcttataggtaaaaatatataattgttttattttcttattttagttttagtgaagttatcttttcatatatattcaaatttcttcatctatggattacttattttcctgttgtatttactttctttttagtgacttgtagggttttttattataagataggcacaatccttatgcttgattttatgtgattaatattttctctcaacttttctatcctttaaatttatttattattatatttttaaccttaaacttaaatattttatggaaacatatagaacttttctgttatggcagttgggcaattttttatcatgctcttcaagtaggactttctctagttccagattgaaaacacttttcctgtgtttcaagtgttgtttaaaaaaattaaatttgaaatcaggcaaaggcattgctgtaattcttatttatttggaaatattatggttcattctattcatcactgatgtgaaatgtcttttattataagttaatttttacatgttctctgtttctttactttttggtttatggctatttttaatcatgccaattacataaggatgattttcttttcctgcagttaggaaaaatctcttctctcaaaacttcttattgctgcttccctgaatttgctaactgtgtattatgttgttattcctgtgagataacatcgtacttctttgtttagaatttcataggtttcaaggagattgtagcattgggatcattacagaagtgggaactgagacttaatgttaaagaatctcaccagggcatttagctaagtagtaagtggtagagctagtgttaagtctgtccattcagagcacttcccttttccatcatcttgtcataattaaaaggaaccaaaacaatgacacagcccaaggataacattttaaagtcaaatccaagttctgtgatcacatgtttgtagtaaagggcaaaagttataaaataagatctcttggtgaggaaactttagctagaattatctgactcggcataaccttcttagaggctgtatcagtttgtttctctaattacctaagactagacagtgtctagtgagtgtatctacaagtgtggctcctggactggcagcatctgcatcctctgagaacttattagaaattcacattcacaggctccaccctaaacctatccaatcagaaactgttttaaccagccttccaggtgattcttgtacatccacaagtttgagatgaaagcctgtgttttagtgtcaccttatctgggtttatgttgcatttcttttctcttcaaatcaagatattttaaatttgaagttcattctttctagacgtacaaatatttcataaagttgtgcttctttttattcagtttccttaatatttcatgaagattgtagtgtcgtgactgaagttggagcactattttgtcttctattatttgatgaagtatcgagaatggatatgtggtgagatataagaatttataagttttttactcttaactatttatctcaggtatctgatgtaatcttatagcaaggcatggaaatttctgatttacgaagcttatgctgtccatgctacacatatgtggtatgaattttgatttgaataaacagtattcaaaagcctattagctcagaaagtctatctcaaattttatttttaaacattactaaatataaactttaaaattactgcagtaatttttgtctttaatacatttttagtacataccttcaactatgtgtttttttcttaatatttcatgatttttaaaaaacctcggaagatatttaggacgatagtatatgattagcgctgatcttgagcaggatccgtgggaggagacgcacaaagtccacctgctagtcccaccactgcattgtatgaatcatttgttatgtggaatttttttttaaaacataatttactcttcataagcaaatctaggaagtagcaaacatgttgtttctatactaaatgatagactcagttgcactgcttgatttcatttgcagtcaacgaagtgaggtaagttgtatttgttagacaaaacttggtctactcagttgtttctttgtttttgtttttcttttatgaaataggtctgttaatccttccaataaaccttctttgccatcggtcttcagtttgcctgtttccgtttttagaaggtaaaggatttatttctctgattttcttgaaggacgaaatgttgttacagaaagggaaatcaaaatctataatttgtcacaattttcatttagcatttaaatcccataacttgggctttcatggttccttcacaatggtgctttgaagatttcagtaagtatatctccccaccaccaattttttattttgataccgttcaaatttacaggaaagttgaaagctatacggtgcatacttgtatgtcgttcagcctagagtcatcaattatttacatatgagtctctttgctttctctctcctaatatatatttttatttatatttaattctccctcacccaccaattggaaataagtttcagacataaattcactcctttcctatatattccagcatgcacatccttaagttaaggacattattctacataactgctacaatatgatcccatctaacaagattaaaaataattctataacatggtgtggtttctccagttatctccaagtatcttttgtgtatattttttcagaatgcaataaccagttaaggttctgcattgtatttggttttcatgtctctttagacttttgtaaaaagtaaattgtttttattgacatatatcgtacataaagcatacaagtcataagggtacagcccttgaatttttctgagtaaacgtacttatttatctcacacagattgacatagaatattactgacagaccggaaaccctttttgtgctttctcattaccttctaccaccccaaaatgtaatcctattttaatttctattgctgtacattatttttgctagtttttgaactttataaatagagtgcattattatattgctttttgctcaacttggagagatttgtccatgttgctgcatgaagcaatcaatagttggttcatttttattctatgtagtattctgtctaagaatatacaacacttttatttaccattctatttgtggatgtttaatttgttttctgttttgggctattatgaagaaatgactgctaagaacattcttgaacacgtgtcattgttggaatataggatatttatgtttagctttagtagatgttaccagacagtattacgaagttgttgtgctgatttacattcctaccatcagtggaaaagtactagctgccccacatcctcactagcctttggtatttgcattaccagtcttaatggtgtttagtttggctaaataatgaaactcacacgactgcagtagtcatgcttagaatgagatcacatttgtgggtgctgggagctgtcttggcttggaagcctcatgtcccaaatagaaaatatgttctctagtaagtgtgctgtaggcatagtttccaggttgcttataagagccacagcactcaagattgctcagagctgtgacatcccatcatgcatttatagtttattcctagatgtctcagtccagatgtggggagtcattttcatcataagcaaagcagcttagtaaattcttgacattccatatctatctgattttactgggtaaagggacagagagttacctcaatatcatgtttgtccgtaaagaggagaaagggttttattactcttttactcacagtaatgttggcatttaaaaaattgttgcccatctgatggatgtatagtgtatctcaaagtggtcctgatgtattactctttgctttttattattttcttccttctgtgtttttcaaacttaattttctgttcattttctaacttactggaggattggccattgattattagccgccctttcatttaaagctatcaatgtttctaagtatggcttttggtatattccacgaatttgatatgccatattttattatttagttcaaaatattttctaagtgttttgtgatttttttttattgatgcaagggttgtttagagttattgggggtaactagtgaagatttagtttattaggttttctagttattttattattaatatttagctaaatattgacattagaaaatattttctatgattttaattctttagagtttgttgaattttactttatggcccagcatatggtcagctttttaaaatgttccatgtgtacttgaaaataataatgtatatgtagtagttgttggatatactgttctataagtctcaaaatatatcaggtttattgatagtgttcagatcttccctgtgtctactttattatatgtgtgtgaagttctttcaggtagcagagaggcatgttaaaatctccactatgacattgtcattctggctgacaatgtattttgaggccatgtaatttagtttgtaaacatgctggtgggttgtctctatcattatgaaattatttctttatctctagcagtgcttcatcatatagaattcactcgatctcttatgactgtagcttccccagcttttatttggttagtggttagcatgatatgtatttttccatccttgtagttttagctgttctgtgtccttaaatgtactttttttttttaagaagtatatagttgagtttttttgtccaatctgacattatttacagttttaatggaatattttaatgcattttacatttactataattactaatatttttggatacagattattagcttgctattttctatttgtccaatgtggtttttttctttctttttcctctctggcttttcttgattaatttttaaaattagtccatgttttccagctgttaacttgtagttacatatacattaagtattttatttatttatttatttgtagcgattgggatcttgctttgttgcccaggctagtcttgaactcctggcttcaagcaattctcccacctcagcctcccaaaagtgttgggattacaggcatgagtcactgtgcccagctaagtattcttctatatacattatttctatatattttatacagatgattattcttttataatatagagattataatttacttccttgactgtgaactagtatttttaccacatcccagacaatgcaaggaccttagaacacattaattccatttatttgctcttcttttttttttcttttattgtcaggtatttaaattctatacatattttaaattctataagatgttattataattattttatgcagtaaatagtcatttagatttgtataccgtggtcgtttctgttactttttattgcttttttggtttttctgcctccatctgagaatttgtttttttaagagttttttattatttaatgtagtgcacttatattagcaatgatttctgtcaggttttttttttttttaatctaaaaattctttctgttttaaaaaatgttatcactaggtatagaattctaggttggcagttggagtccatttttttgtaggaacattggctgtcagttttattgttgcttctttgaaggaactgtgttccccattctcttaggagttccttcagctatatcccacagcactttgcttgcttgcttatttatttgggggagtttattttatttttatgggtatataatagtacatatttatggagtacatgtgatattttgatataagcatacaatgtataatgatcaaatcagagtaattaggatgtccattacctctaacatttattgattctctgtgttaggaacatttcagatctgctcttctagttattttgaaatatacaacaaattactgttaactatttttaccctattgtgctactgaacactagatcttattccttctatctaaatttttatgtacccattagccatcccttcttaattccccccttccccaccatcctttacagcctgtggtaatcatcattctactctttatctccatgagatcatttttttttttttttagctcccacatataaaggagaacatgtgatgtttgtttttctgtgcctggattatttcagttaacgtaatgacttccagttccatccatgttgtttcaagtgacaggatttcattcttttttacatctgaatgatactccattgtgtatttataccacattttaaaaaatccattcatctattgatggacacttaggtagattccatatcttggttattgtgaatagtgctacaataaacatgggagtgcatatatctctttgacataccaatttcctttcttttggatatatacccagcagtgggattgttggatcatatgtaggttctgtttttagttttttgaggaactccatactgtttccaataatgactctactaatttacattcccactaacagtgtgtgagcattctccttcctccacatctttgccagcatctgttatttttttttgtcttgttgataaaagcctttttaactggggtgagatatctcattgtggttttgatttgcatttctctgatgattggtaatgttgagaattttttcatatacctgttggtcatttgtatgtcttttaagaagtttctattcagatcttttgcccagcttttaattggattattattattattattttgctgttaagttgtttgagttccttatatattttgatggttaatctcttgccagttgaatagtttgcaagtgttttctctcattccataggtggtctcttcactttgttgactgtttcctttgctatgcagaagctttttagcttgatatgatcccatttacttatttttgctttgcttgcctgtgtttttgaggtcttacttaataaatctttgcccaggctaatgtcctgaagcatttctctaatgttttcttctagtagtttcatagttgcaggtcttacattaagtctttaattcattttgatttgattttcatatgtggcgagagatagagatctagtttcatttttctgcatatggatatccagttttctgagtaccattcattgaagagactgttctttccccaaattatgttctcggtgcttttgttgaaaattgaccaaatgtgtgtatttatttgtgcattctttattctgttttattggtctgtgtgtctgtttttatgctagtatcatgctgttttggttactatagctttgtagcataattcagagttaggcagtgtgatacctccctctttgttctttttgctcgggattgttttggctatttaggaccatgttttgttccatatacattttaggagttttaaaatttctttttgttccttttaggatgcaaatttacatgcatgttagattatttcaccatgttaaaggaaaaacttgagacaaaatacacatgcatgtgtctttacggtagaacaaaattaactttggtttaaaagatactgctattgaatctgtttttatttctaaacatatttcttggttcttgttgaatttattgatgatgaaaccatgttctcaagtgaaaacaataagctggaattcagtcatttagtgacctctatgatcataggcaattcatttatcagctttaagcctcatttttgatcatttgtaaaataggtatcatagtgccataccatgtaactgtgaatgaatgatacaaaataagcagtgtttggcataaagtaaatatcagtgttttagctgaacaccttttatgtttggttcactgtattcatggtccctgacttcaaggagcattagttatctccacaacaactctaatatagcatagaatgtggtaagtcctcaagaaaggatttaagtgttctggggagtttagaggagatgaaaagaataattgaaatactgtataaattatgataattgtttaaaatagggactaagagaaacctttgcattattgtgggttgggaggcattgaactagccctcatttgtggctcatctttttgagtagcatttaagaatttgaaagtttgtaattatttgtacacattttctttaggtaccatctacctgttcatgtaattggacaccatgctgtgagtccttactccatagttttgcccttatctgctgattgtttggccttgaagccggtgtcagatatgctgagaatagcttggaacctgtcatggtatcatgggagtgataatctgttgaagcaaatgaactctgaaactaaaacgcaagagtaagctcttatattagtttaaaaagcatttgcaattaattaattgtaattaattagttaagttttactttttccttaggtccagtagctttttcccttggtatcatctgattctgctttttaacagttataatttttactttcttttaaatattacatgtgtttattacttttaacaatctatcatatgggaaaactttaaatgaaaaagcattttactctgtactgttttagaggttaaagtctgatttgttcgtagatatgaatcactaggaaaagggtcctggattagaacaaaatctcagtaagtatatgcatgagtgttatcattagtgtgatggtgattacttttgaatatcttaatattctaatctgtctgtcttaagtgaataaaaatttttataaggaggaaaagtcaatataaacatttgggatgccaatgtaaaatcctaatattgacagatatgtatcagtttttcttctggctgtaagtcaaccttttgttaaaagaaaatgaagataaaacagcttttgggagagtttataatagaaataagtgtgagcttttatttaaatagctttatgttcctccttcattttttttctttttgtctagaattttagatgcattgaagttatctacagaggacatcctcactctgaagataacacacatggctagtgggctgcaggactgcctccattccattgttcaggctgcaacccacagggaagttagggctgctgtcaccaggatgagtttttatcttctgaatgacagattgtctttaaagggttgccctggtccatgtggggttaccttgaagtccttggcttggcacaccgcactaaacaggtcagtgtaaggtcaaggctgccagtttcaaagacctggattgcattgtattgtgttcatctcctaacctttgaagataagagtctatgcccttactgctgctatcatagaaagaaaaactccaggatttttatcatctgtaataatagccaaagagaaatttttaatttagttattgcattgttgaagggattattaataaacttgtaacaatttattcttagaaaattttacctcacaaaagcaaataattaggataagacatggatgaaacaaattgaatgtttatttctatccatgttataaatgagttgagacatcagtgaattgattaatagctgtgatacacctgccacaggctgttttgttttgcttttgttttgttcttaagtaaattatatcatttttctttttactctcaatttcatgaagttgattgccatgtggcggtcctttatagcagttaattgagaaggctctagcttgtcaatttaacatgcttaacttgtagcagatggttgcatttgcaacaagactgataagcaaccactgcaagcaggttttcattttattcttcatgtgactttagtataaaatgtataactttattatttaacataaaatgtgcagtttttaagctgctaggttaaatgagtttccaaaatatgaattcctttattagtttagctttaaaaattagtttatctgattaggctttccagtggtgtgctggtgcccactaatgcagccttgtgagagagctgatggttgaattttcaggatttttgtaaggtgattgttaaacacagccattcttaattatataaacttacaattaaataaattatatgaagacaaaaggtaatgaatatgcaaacatcactttctaattatgtggcaacattttactgttatctttgttcttgaggttatgcatacatatgcactacaggggtatgtattttatggaaataactacaatggagtaccactgtgcatctcttcacaacttcatgttacatggtagctccacattgtctacagtagtatatttacaccatggaaattgacaaacacaataagtcagcactctcagttacatatttatcagcacactcccgcatttaaacagtctcgccagttgaagaatgcataaatccttcactttaaataaatgtaatatgtccctatttgtcaaaagaaattttaacataaaagctgattgaattcattgcactaagttttctttctcttgtgaattaaaaccatagaaatagtatgcaataccacattacaggaaagactctcaaactgtgggtcagtggaagcctttagagtatttcaaattgcccaatagcagtaactgtatgtgagcatcacattttttatggttagtttcctcaggactagtgtaagtggagagtatagactgtgtatatgtttaatatatacacacatgcatatataatattcatcttgtatttggtttttaggcctgtgtttgatcatggcaacacagacactactgcctaatttataaatattcatgtatttctgctgtattatgtttcactaaggaatgtatcaaaaatatatatcacagaatccaccttttttcatgaaaactttttaaaaactttacttccagcaatgtatgtactaatgaggctttgggaaactttagttttgctttcattcagtttaatgatagaaaggaacattatctttttgactgattatctaagatgaaccaacagcttaaagggtgcttggagatagaagattcccataaatcatggctgtataaagtattgagatattgagaacatttttataagcttagtttaatatttttaaaatacagctatttcaaattatatcattctagacaaaacaaaatatagagaagcatgttcatacctgtgtgaatggttttttattgtattttaaaaataatgttattttttacacattttccatgtcagtaaatatactttgaggctaatttttcaaatatatgatatatccaaatgaatgttccgcaaaagaggtccttttaggagtgagtgtgtatgttagaataattctggctttgctcagatattttgaaattgtcctctcaggtcatttaaacagcagatgtaaggaagtcttattatattttgaagttatatttaattttttactaaaaaatgatattagcaaactcaactatccagagaagggtaaaaatgatttttacatgtataccgaaatgaacaccaccctaaaccatgactatttatcactattaacaaaagtatatttcagtttgacaaaaaacatggtttctaaaatctttttacttacggtactgtggcttctaaacataactttccaagatgattattttaacagcccaacattaatttatgtgtatgtttttatatgtgtatgctaacacacaagcatacaattataatctaatatcattttggaaacttattttaagaaaacagatgatagtcatggtttagtaggattacaagttgtcagaggtatctagagtcttctttcaactagtttctgttgagtttgcatgtttaatgcctctctactcctttcctactggaagtcctattgctactgtttttctccatttttcaccagactgtagactgactagcgaattggtttttctgcttttaaccttatgccactcatttatgttgcttcctgaatgatccttctgaaatacatgtcacctgtgggttctcttccatggtgtgctagatattaatagaattccaaccccttagcatgctgtagaaagttctttttgatctagctcttgcttaccttttcagctacagtttcctcctctctctctaacatatgctgtgtttctatgaagtgcaaatattggggttttatgaaactgcttgatattttagggcatacacttctgttttatacatccttgcttttacatagttaactccttggctgccttgtgaatatctactcttccttgagctccagggtcttcttactctgtgatgtatgtggaattctagttaccctgattgtcatgtggctttcctgcattacttctacagttgtttaaatatttgttttctcatgtgccttgggtttattacattcctttttatatccctcacatatcgcataagtcatagtatacagttggccatgcagcctcagcgtgaacacctcctttgaaggatattcattctgtttttgcgctgtgattattcgtaagttttttgttcttttagactgtacctgatcatttctacctgttattctgtcctttaaactcacagaataaataatgtcttcacatgtgacagctcttcatttaaacataactataatttcttctctattccccccaccctgctttaaatgatttgtttttttttttagatagactttaaaagccacagtgtccagacttctcatttgttcatgctattttacaagggtattgtgtttcttaggactctccctgagatctggacatgataccttatatgggtgtggtgctgtggcatggggtgaataggaagaaaggggctactgcctttcttttcctactgcttttccatcattcaacaaacatttattgatcacctactaggtgtcactcttgtaggaaatatagcagtgggcaaaactgatagggtcctgctctcatggaacttggaattaagacagctaaaagtataatcaaaagtagaaatgcttccaagcagactattaggaaactgcattagaggagcaccctatccctcttcagtagagagaaagtggttcagagaatgaagcttaagccaaggcataacaggtagaaggatgttaaaagtctatgggattggaagccgaaaagataccaggcacacagagaaacaaataccacatgatctgtcttatatatggaatctaaaaaagtcgaattcaaagaagtagagtagaattgttaccagaggcaagtggcaggtggatatgggtagggaaaagggagacgttgctgagaggttacaaaattccagttagacaagaggaatgagttctggtgatctcttacagcatagtgactatagttaataataatatatgtttcaaaatagctaaaagaatagatgttaaatgttctcaccacagagaaataagtatttgaggtgattggtatgttaattagcctgattggatcattccacaatgtatacatgtgtcagaacaccacattgtatcctaaagatacatacaattattatttgtcagttaaaaataaaacaaataaatggaatatagtttggtgcatgttatgtgacagaaatttgatactttgaatccgtaaatggatggtcagttgactcacaaccacttgcagaatatattatttctcctctagactaaaatgccatattcaacaaatattatacaaattaattttttttttaaatgccaggcaaagggataggccctgagttaggaaagagtgtcttgtgtcttcaagaggaattgaaaagaggatagtacacttagatttaggggatatgagggtggttataaaatggggttacagaggtgatattttaatgttacactggatatcatagaagacttcttataatctttgtgattgttaaatcataaatctcccaaagatctatggttgttagaatcacctctcaattttcataatccggcacttgccatcctactcagctgaatgtcattttggggatgtgagaattttaagtaaggaaaaataataatgagacaaacaccacattactaagaaatacagcattatatatccctggtgttggactgcttagtttagtattcctgttttaaaacttgctagccgtgtgactgtggaaaaacgacttaaccatatttttgcttgggtcttcttgtctttgaaatagaggtgcctacttcataatgttgttatgaagtttgacagaaaccctgctgttagaacataggctggcacaaggttggtgctccataaatgctgagtattaagattcgtattattgtcactcttattaacattttgatgcaatggctttagatttataaaaaataaaacattacagataaaattggatctcatatctcttgctgattgctttttaaaaaaaacgatttccaaactacttctcccttttaaataaaagttttattgtctactaatcttttagctctcttaaaccagtttttttttttaaagaaatcttagaaaattggctcatatccttttgctctgaacttaaaaagaaatttcatcctaagtctaccttcagtgttttccttgcctgttacaaactctagtagcgtccttgcaggcctttttttccccctcactttattaccttattttttcgagttggtcagaattaggtttgaagtactaattcttctcatcagtgaaacatgacattcccagtatgaaaagcaagtttcactgggcggttattagagtcagtgtttttccccttggtatttttttggtactttttctgaatttgttatttttctcttatgatatttgtcacttctagttattttagttacttgtccacatgttttttccactataagctcatgttcttgaaggcagatacccagtttgtttcaactttgcattttccaaagcatttaaaacagtgtctcataaaatagcatcctcacaagacatctgttaagtccacatatctatgatgaacagtggtattgtgtattttaaagcgccagaaaccatgattattgtcttttcattataggtttttacaggtgcttcctgcttgcactgaagatgagaaactgctaatagatatcatacattttttaaataaattaataaaggaacaaagaaaaaattcttcactagaacttctaaactggattctcgaattacttcttagacatgtaagtggtgttaaggaatttggattttaagtttgggaaataacttatttgtagaaatcattaacattatattatggaaaaggataattttatattgtctatgcttggtaaagtagtcttcatgtaatgaatggctcataacaacatggctttcctgatacgattgtgaatgtgtttattaaaattctgtacagtgaatgggacctacagtcttgtgtttaataaaacctgttctgcatgtgaactttctgctgcaactgtatttttaagtggggatttcagttcaggtggcaggggacagggtggatgtccagataggcatgttgagagttagctaacaaagccagatggaggcaggagggggtatagtgatggtgcagttataaagataaagtgtgttcaggccttaaataacggttactggaatatttacccttctagcccccactactgtcagatttttagctcttctaaaaattctaaattttttttttttattttttttgagacggcgtctcgccctgtcacccaggctggaatgcaatggtgcgatcttggctcactgcaacctctgcctcctgggttcaaatgattctcctgcctcagcctcctgagtagctgggattacaggtgcctgccaccacgcccagctaatttttgtatttttagtagagacagggtttcaccatgttggccaggctcgtcttgaactccggacctcaggtgatccgcccaccttggcctctcaaagtgctgggattacaggcgtgagccaccgtgcctggctctaaaatttttctaaatagctattctaaaaattttggctattcagatttcttattctaagaagcgtgtgaagaacccaagaagccaggtccctgttgttggtctatctgtctctttatgtatttatttgcaaataccgtatgaatttactcaacttagctaagataaagctttacacaaataagaagaaaaacaaaacaaaactagaaaagagggcctaaactgatataggacatagtggatcttataaggcaaatatgtttcattatatattaacacatttgcgaaacttagagataattttatgtaaaaatatgaattactgtgttgtcagaaatgctaactgatatgaatgtttgtgtgtatataaaacttatttagaggtttattatcgtcttaggctgttttctgttgtttttaacataatatcagaagctgggtaatttataaaaaacaaaatttatttcttacagttatggggtgcaggaagtccaggtttaagagggcatatctggtgagagccttcttgcagtggggactctctgaagagtcccgaggtgatgcagggtatatgtggtgagggggctgagcatgctgatgtgctatctcaggtttttctcttcttacaaagccatcagttccccttccatgataacccattaatccactatccatgaatggattagtctattcatgagggtagggccttcatgatccagtcacctccaaaggccccacctctcaatactgttactttggggattaaatttcaacatgaattttggagggaatgttcaaaccatagtaattatcttttcctttattgtagattggtgaaggtagggactgttttgttcattattgcatacccagcatttattatagtgccttgcacatagtgagctctcaataaacatttattaactcagtaataagctatgtagttaattacaagaagcacacaaaaccttaattttatcactagttaagatttaacaaaaatggaaaccatgtattactttcaaggttacttatatatgcaagtatatttatagactgaatttctagaattgtaattgctgagtcaaattgtagaggtgcgtgtgtgctgaggtttttgtggttttataaatagataacttattttgaattagatggagattttttcatattcggtcttttcatgaattgtatcttgatgtccttgctggttctccgccacaattgggttgttagtctcctttcatttcttctttcctgtcctttcttttcctcccttcccttctcccttccctttctcctttgctttttccttccattttcctcttccctcccctcccctttccttggagcgtgatttcattctggtacctgcaacttggacattagtgtagagatctttcaccttttgattaaatttattcctaaatatcttaattttttttggtagctattttaaatgaggtttttttttgggggggcgcggttactgtatagaaatgctactgattttttataagttgattttgtatcctgcaactttattgaattcatttttaagatcaaagttttttggtggagtctaggtttttctagatttaagattatatcatcagcatagagggacagcttaacttgccttttttctaatgtggatgccttttatttctttctatatactaattgctctggctaggatttccagtaccatattgaatagacatggtgagagtagacatccttgtcttgttcctgatcttagagaaaaagctttaaacttttcaccattgagaatgatgttagctgtgggtttttcatatatggcctttattgtgttgggattccttttctacttaatttattgagagtttttattatgaaaggatgttgaattttgtcaaatgctttttctgcatctgttggtataatcatgtggtttttgttcttaattctgttaatttggtgtatcacatttacgcatttgtgtatgttgaaccatccttgcatccctggaatgaattccacttgattatagtgagtgatctttttattgtgctcttggtttcagtttgccagtatttggtaaaggattttttatatctgtgtttatcagggatattagcctgtaattttcttttcttgtagttcccacgtctggctttggtatcagtgtaatgctgccgtcataaagtgagtttggaagtattccttcttcatttggttttaggagtacagagattagtattaattctttaaatgtttggtggaattcagcagtgaagccatcaatcaggtcttgggcttttttttggtgaaagactttgcattactgatttaatctccttattattggtctgttcagattttctgtttcttcatgattccatcttggtagctctatgtgtctagaattttttccacttggttgtccaatttgttgacatgaaattgttcataatagtctcttacgattccttgtgtttctgtggtatctgttgtaatgtcttcccttttcgtttctcattttgtcttctttttttattagtctagctaaaggtttgtcaattttgttcatcttttcaaaatctcaattcttgattctgttactgttttctattgtttttccagtttctatttcatttgtatctgcccttatcttcattgttttctttttactaagttttggcttcatttatgcttctttttctagttccttgaggttgtttacttgatatctttctttttgacatagatgtttattgttatgtatgtccttcttagacctgcttttgctgtatcccataagttttggttggtttggtgtccatttttgtttgtctcatgatattttaaaatttcccttttagctttttctttgacccactgattgttcaggagcatgttgcttaatttttatgtatatgtgaatactccagaattccttcttttggtgacttctagttttttatcactatggtcagaaatgatattagatatgatttcagtcttgttatatttgttaagacttgtaacaccatacatgtactgttaattttgtagtatgtcataaggtttatgtatattttataatttattcatagttatgaaattaaaattaaattcctacaagactctagatgattgtactataattttaatgcagtttttgaaaaggatttttggtacagttacatttacttatttggttttgtatggtattaaacctttcttcggaaagcttctactttatctcatatattatcaccacaagtgttataaataatactacttttaagagtgcacaaaagtgaacttaagtgttcactatcagttgggtttactccctaaatattatgctacaagataaattaatatatgttatataactaccaatgtttaggataaagggaacctggaaatagaaaatcaagtaccttttaaagtttatcctttgaagtgagtaaaataagtgagaaatgatttaagaagctcagtaaaataacatttccaagtaaattgctttgaatgtatggacatacatgaaaagatatacaaaagttgtggttgcaaaaacaaaattaggcagatatgaacgcctgattagtcagaagaatgctaagaggaagtgaaaagaaaaatcagctaacttcccgagggaagatttaggaactttctcttgtgaaatttttttccatgtgttttatcaagacattcacttattacaaacatattgtaattcttaggcaatttaggagtttattgcacctctaatctgtttttaatatgatattttgtttatagtaacctagaagtgctgaatttgaatacctttctttttggaatgcatttttttgatggaagttcacaaatgtggggctgttagtttttttcttcttttggtgaagctcagcagaactacacagcatatatattttccttggctggctttcccgtaacgggctcaatgtgcactcagacattattgagggtcttgcagttacttttggcatagcttgctgatggatgtaaagttggatatgatgagtggtaactgtgtgtgtaaacaaaatgagccatcattatagaaatggttgccttttagaggtcaacagtgacaaaataatggcccaagtagttggtttaaaattaggattgaatcctaacgtctaaagacaaaaacttcagatatgattaagcacttgacatctgtaggcatcagtagagacatcttattctactctattgtacttgagaaatggtaattcaccctatattttacaagtggtattgctgaggttcactgaatttcagtgttaacatgtaaatcaaaggtgaaaagagaaaaaaaaacttcagtaatcttcaagtggaagcaagttattaataggatgagattctttgggagaatcttaatttttaggtatacacatactgtttcagtatattcatgtattaatagtagcttctacttaatttttatcagcatatcagaattaataattcctaataataaaattgttttacaagatggagtttgcgtcttggtataaacagtttgttcattttgtcagtagttttgggagtcagaaggcacgtgaatgtgagtcagcttttggatatttagggctcagaacattatagaaaatttatttatttttatgatttactaaatgtgtatttcgattcttttattcatgtatgaaacataaaagttgcagttatgtcttattcaatcttaatttatccaaagacatatattgcttaagataaaagaaaaagttgggaaaaaaactatttagatgttaaaatactgtaaaataagagcaaaatgtcactactagtttccaaaagctctcagttatattatttataattgtatatatctctatatactataagcaatttagaggtttctttacatattttcatttcttttccctaaagagaatgcagttaattttgagttgagctcttttaggtgaaggattttataagaacaatagttacattttgattgtatctctttttgtatgtttttacatgcactagtgatgtgacactgtgctgaggatggaatattaactagctttggagtaagatgcttcttgctctgcccttgtctgtctaagacttagacaattatttaacctctttataaatctatgttcccatctgtaaaacaggaatgaaaatgcaaatcttctagtttattcaaaaagtcaaatgaaatcttactatcttttttttttagcacagtgcctgaggcatcatagatgattaataaatatcccatatatctattaatgcttctgattaatgtaacgttttcttttgtcaatattattagaaataatcctcttatattcctttatctattttttttttagttgggaaaagaggaaaaactttagaaagaactagtatttgtttactagcctatcaaggtggcaaagattattgcagtaataatccacatagcactggcttgggtgctgtgggtcttttcatgtcctgtgtaattgtatgtattggtacattttttacagggacaatttggcaatatatatcaaaaaattaaaactactataatattttgatttagtaattttattgcagaattcatacataagataaaatccaacttgagtacactgtgtgttgcagcttagtgaaattatgcatcattgattatccaggagttagtgtggtaaatccttattgttgaaaaacaatcagatattaaactaatgtttttgcagaaatattgttaataacgggaagtaggaaaaaatggttacagtagtgatttttttcacttgatacgggtttgtgaaaaatgtactgttttaattctgtttatattctcagaaacaaaaaggagagttatatatcaatatataatagtggcaatttctgtgtggcatgattatgtgtggttttgtttttctcgtcctttttttctattttatatgataaatatgtttttcttttgttgagaatatattaaacatcttttgaatttagaacatctctactaatgcagtaaaggcccacacctactagttaggtaatatagctcttactagaacttgcttagcaaccaaaccctttataggaaacaatatatagttcaattagtaaatacattttttacaaatttcattttttagagtgcaaacccactgttagacctcttggttctgacagagtcacaggcacgagaagaaacagatgatatccggactgctgtcaggcaacaacttcagaaagaactgattgctctttttgataccttgctgctcaatttcatggaagttactgacaggtaccatttgtaatattgcaggtttaggtgcatttatatagaacccaagttttctttgattttcaaagttttactttgtacttctttcaaattaagaaatacttctttcaaatacttaaataataatcagttatagtgttctgtttgtttttgtttcagtttaatctgttacagcctgattgtacctgcttggtctctttcactacacacatgcactcacatatgcacacacacagttttgttctctagggtttaattcctggttctctcttaattatctacaaatctacttgagcagtcatacctatgcctatgactttatgattatctttacactgatgactttcaaatacatatctctagttatgaattctgttttttaaaaataaaaatattaagatgaaagtcactattttaaccattttaaaatgtacatttgaatggttttagtatatccgcaatgtttgcaactgtcaccactacctaattccagaactttatcatcaccccaagagaagccttgtatccatgaaaaagtctctccctattcacacattcctctgggccctggcagccactagtcttctttctatgtctgtggatttgcctattctggatatatcacataaatgaaatcaaacaataatgtgacctttagcgtctagcttcttcacttagcatcatgtttccaagctccttgcatactgtagcaaatatcactacttctttctatgactgaataatattctatttatagatatgccatgttttgtttatccattcattcattggtggacatttgatctgtttctaccttttggctattatgaatagtgttgctgtaaacactcatatacagatttttgtgtggacatgtgtttcagttctcttgagtatataattaggagtggaattgttggttcatatggtaactgtaatggtaactctatgtttgacttttcaaggaaatgccaagctgttttccacagcagctataccattttacattcccaccagcaatgtatgagtgtttcattttcttcatatcctcaccaacacctgttattatagcatcctaatgggtgtagactggtatcattttggtttttatttgcatttccccaatgaaaaataattttgagcatcttctcatgttcttatggctatttgtgtatcttcttcggagaaatacctattcaacatctttgaggatttagtatcagtgtgcatcagggatattggcctgaaattttccttttttgttttgttttgttttttgctttaaatatgtcccagagattctggtacattgtgtcttcgttctcattgatttcaaagaacatctttatttctgccttcatttcgttatttgctcagtagtcatttaggagcaggttgttcggtttccatatagttgtgcggtttggagtgagtttcttaatcctgagttccagtttgattgcactgtggtttgaaagactgtttgttatgatttgcgttcttttgcatttgctgaggagtgttttacttccaattatgtggtcaattttagaataagtgcgatgaagtgctaagaagaatgtatattctgttgatttggggtgaagagttctgtagatgcctattaggtccgcttggtcaagagctgagttcaagtcctgaatatccttgttaattttctgtcttgttgatctgtctaatattggtagtggggtgttaaaatctcccactgttattgtgtggtagtctaagtctctttgtaggtctctaagaacttgctttatgaatctgggtgctcctgtattgggtgcatatatatttaggatagttagctcttcttgctgtattgatccctttatcattatgtagtgcccttctttttctcttttgatctttgttggttttaagtcttttgtatcagagataaggatggtagctcttgcttttttttttttttttttgctttccatttgcttgataaatcatcctccatccctttattttgagcccatgtgtgttttttgcatgtgagatgggtctcctgaatatagcacactgataggtcttgactctttatccaatttgccagtctgtgtcttttaattgtggcatttagcccgtttacatttaaggttaatattgttatgtgtgaatttgatcctgtcattatgatgctagctggttgttttgcccattagttgatgcagtttcttcatagcgtcgatgttctttacaatttggtatgcttttgcagtggctggtaccggtttttcctttccatatttagtgcttccttcaagagctcttgtaaggcaggcctggtggtgacaaaatctctcagcatttgcttgtctgtaaaagattttatttctcctttgcttatgaagcttagtttggctggatatgaaattctgggttgaaaattgttttctttagaaaggttgaatattggcccccactctcttctggcttgtaggtttctgctgagagatctgctgttagtctgatgggcttccctttgtgggtaacctgatctttctctctggctgcccttaacattttttccttcatttaatctttggtaaatctgatgattatgtgtcttgatgattatgcattcttgaggagtatctttgtggtggtctctgtatttcctgaattggaatgttggcctgtcttgctagattggggaagttcttctggataatatcctgcagagtgttttccaagttggttccattctctctgtcactttcaggtacaccaatcgaacatagatttggtcttttcacatagtcccatatttcttggagcctttgtttgttcctttttattcttttttctctaatcttgtcttcacattttatttcattaatttgatcttctatcactgatatcctttcttggtgaccttcggttgggatctttgagtggacgtgctgttcctttctgtttgttagttttccttctgacaggcccatgtgctgccggtctgctggagtttgctagaggtccactctcgaccctgtttgcctaggtatcgccagcggaggctgcagaacagcaaagattgctgcctgatctttcctctggaagcttcgttccagaggggcacctgccagatgccagccagagctcttctgtatcaagtgtcggttggcccctactaggaggtgtctccccgtcaggatacacgggggtcagggacccacttgaggaggcagtctgacccttagcagagcttgatcggtgtgctgggaggtccactgctctcttcagagtcgtcaggcagggatgtttaaatctgatgaagttgcgcccacagcctcccctttctccaggtgctctgtcccagggagatgggggttttatctataagtccctgtctggggttgctgccactttttcagagatgccctgcccagacaagggaaatctggcaatctggccatggcagccttgttgagctgcagtgggctctgcccagttcgaacttcccagtggcttagtttacactgtgagtgtaaaactgcctactcaagcctcggcaatggcggacgcccgtcccctcaccaagctctagcgtcccaggtcaatctcagactgctgctgtgctggcaacgagaatttcaagccagtgaatcttagtttgctgggctccgtgggagtgggacctgctgagccagaccacttggctccctggcttcagcacccctttccagcggagtgaacacttctgtctcgctgctgttccaggcgccactggggtatgggaaaaaagaactactgcagcttgtttggtgtctgcccaaatggccgcccagttttgtgcttgaaacctagggctctggtagggtaggcaaccgagggaatctcctggtttgtaggttgcgaaaaccgtgggacaagcgcagtatctgtgcaggagttcctcaggctcagtctgtcacggcttcccttgggtggtggagaaaattccccgaccccttgcgcttcccaggtgaggcgatgctccaccctgcttcagcttgccctctgtgccctgcacccactgtccaaccagtcccagtgagatgaaccgggtaccttagttggaaatgcagaaatcacccgccttctgcgtcgatcttgccgggagctgcagactggagctattcctatttgaccatcttgccagcaatccccccaacctttttttttttttttttaaaaagggatgggggtctcactatgtcaccccggctggagtgcagtgacacattcttagttcactgtaacctcaagctccagggcttaagagatcctcctgcctcagcttcctgagtagctgggactataggtgtgcaccaccacacctggctaattttttttactttaattttattttatttcatttttttagaaatgaggtctcactgtgttgtgttgctcaagctggccgcaagcaatcctcccacctcaggctcccaaggcactgggattataggggtgagccacagcccctggcccagtgtaatcgttacttgtattttatatgacattctctagttggtattttatgctttccttgaaaagtctcattttgatagagactattttctgccattttgtctggttcatttttttctattactatgagtttaagtaaccttttatagccagtaagatagcccattaagcccattatactttcttggtggttgattttccctcttttgcatacataggaaatgctcggaacttctttacgtttttcaaacgcagctggctctgaaactgctccagtgtctgaaagtgacggatgcgcctcatttctatggcctgccgtcccttgagcggaccttacgagggatggctaacctcactgcgtttccgggatggagctcacactctcctctcacaaagcctctagatatctgtgtgaagtacttgtcaggtctccttgaggtaagtaaaaatagcatatggtagttatttactattagttgcttttactttatgccaggccacaagtgcattatacgttactctattcaatgtagaatattatacattatttatataagtcataatagtgaaatgttttagtgatttttattaatagttaagtaaggaaggtcacttttataaataccctcattttcaaaagaaataaatggaaacttttgatgctcaaaggaagtgttcgctagagcatttcagattttggatttttggattaggaatgctcaaccagtaagtatatgatacaggtatttcaaaatccaaacaactccaaaattcaaacacttctggtcccaagcattttgtatacggcatactcaggctgtacaatgttaaaggatatttgttttttctttttcttccagtttgtgcagttctagatgctactgctatgaacattcttatcttttggtgaaaatgagcatcttttttgaaattttatcttctgttattgaaatatgtaaatatagccaatttttatatgttgaccatgtatcaggcaattcttatttccaatatcaaaacaaaagcctttaatttttcacccttcagtatgctgtttatagtttttttttgtcaattaagaaagatcaagttaaggaagttttcttttgtcctgttttgctaggagctttgttttttaattcataattgtatattgcttttttctgtatcttttaagataatcacatgatttttcccttatattccattactgattgattttaaaatgttaaacaaccttgcatttctcgaaacatttcagttaggttgtgatgtattactctttttatatgttagtggatttcgtttctcaattttttagaattctgaagtttttagaattattctatttcctcatgtaaaaaagtttttcgaattttgcatcttttttctcttaaagaatttgtcaggtttttaataatcaaaatcattccgttcttatgactaaaatgggagaatgtgagattgtaagaacgtgactttttcaaccattttaaatcttttcctttatataactttcttttttggaatagctgatttgcattggtgtgattttgttctctaatgttaggtagaatttgatcgtgaaacaatcttggtttgcagttttctttttgggaagattgtaaattgtgaaatgaaatgactttttttttttttgagacagagtcttgctctgttgcccaggctggagtgcaatggcatgatctcagctcactgcaacctctgcctcccgggttcaagtgattctcctgcctcagcctcccaagtagctgggattacaggcgcctgccaccacgcacagctaatttttgtctttttagtagagacagggtttcaccaggttggccaggctggtgtcgaactcctgatctcaggtgatccacacccgtcttggcctcccaaagtgctgggattacgggtgtgagccactgcgcctggcctgaaatgactttttaaatagatctaaaatcgttcagagtttctttttatgtgtgtcagccttagtaagttatgtttttgtagaacttaaaaactttttatctaatttttaaaatttgttactgtgaaggtattcatcaaatcatcttacacttttaatgtctgctgaatctgtagtgaggtcccctttcattgcagacattaattattcctttctcaatttttcttggtttatctttctaatagaatgaacctttggctttgttgagcctctctttaacttttttctcctgttttatttctgccaatatttattatctccttctacttttagtttagtttacagctcttttttctaacattttaaggtagaggcttacgtcattgatttttttaaaagtctttctcaaatgtgtgtttttagctctaatcctctaagcatggccttatgccatgtttttatcatcaatttaggtcaaaatatttctactgtgatataataaatacgacaatgatatggttgtacatagttctatgagaacagcctcatcacagtggcctgacaattttgcatatctgcccttgggcttcatagacaaggcttaactacagccaatctaaatcttggcagaatttcctgtgatccttctggaacatgagaatatgaaaggcttatgagcagctgactatgcaagattgattctcacttacttcacagtctattaggaagtcagttaggagcccgtttcttattggttcctaggttccgacgagcactgggctttctgccttgctctccttggggcatagctacagcttataaaactgctttactgcagcacggcatgggcttctccgcaacagagtgtcctacatctttgttatagtcatctggcccctttgtttcaatgtcatcctgtgcaagggatactagtagctggcacctttgtctattcttgcttttgctgtttatgtaggtaataaactgtctgaatccaaaaattactcattgttttcttactggacaaatctgtcagccttgttttgattgctaactgtgttcggacctcaagaatgattcttgtaggaagcactgtagagttagattttgaaagataagtaaattgatagtgatagcaatagacattctagacatggaattttctgataaaattgtatctataacctcctgtttttttttcatgctgtgggtgacttcttgacatcatataatctctacctattgccagattatttttcagaaacataaatttttcaatccaaacctctttttttttcaagagcataagactcaatattttgcatttagagatttgcctccattgtagttttttcccacatctctgaattttcagttatatctggctgtttttccaaaataaaaatgcactttaaaaagactgcttctttcacatagtttcctctcttttagggatggcaatatctacaaaaaatttaagatctaacttatttatttaccttcatttagtaaaccttttcttattcttccaaggttggatacttacctaatactgtttggcctttcctgtaggttatatacctgtaacaatttatatatgtggctattacttaatacattatatttttatttattttactttatttctttgagacagggtttaccgtgttgctcaggctggaatgcagtggtgcaatcacagctcactacagcctcaacctcctgagcccaagtgatcttcccacctcagcctcccaagtagctggggccacaggtgtgcaccactacacctggctggtttaatttttttgtagagatgggtctcactatgttgcccaggtttgtcttgaattctttggcgcaaatgatcttcccactttggcctaccaaagtgctgctattacaggcatgagccactgtaactggacctttattttgttttctgcattgctctagtagactatgagcttataagtatcatctttgggctatttctactatcccatggctactgcattgacctagcaccatggtttttacatagtggttagtgaatcagttaattaatatatgtgctacataatacatatatattgtgtatagtttttaaattaagatacagtttgaaaaacattttggaaatgtagcataaatgattataaaaatatgttttattgttgtatttttattactaaataatgatttaaataatgtatatatatattttatctggtcttatctagaacttttttccaaaagcacatattgtttttaaaacaagtttaaagatcataaatactctttgctgtactgtaaaatttaatatgaatttcactggagtccctttaataaaataaatttcggagaggttccaagatggccaaataggaacagctctagtctacagctcccagcatgagcgacgcagaagacgggtgatttttgcatttccagctgaggtaccgggttcatctcactggggcttgtcggacagtgggtgcagcccacggactgtgagcagaagcagggcggggcatcgcctcacccaggaagcgtaagaggtcagggaattccttttccaagccaagggaagccgtgacacatggtacctggaaaattgggacacttccaccctaatactgtgcttttccaatggtcttagcaaacaatacactaggagattatatcccacgcctggcttggagggtcccacgcctatagagcctcgctcactgctagcacagcagtctgagatcgaactgcaaggtggcagcgaggctgggggaggggtgtccgccattgctgaggcttgagtaggtaatcaaagcggccgggaagctcgaactgggtggaacccaccacagctgaaggaggcctgcctgcctctgtagactccacttctgggggcagggcatagctgaacaaaaggcagcagaaacctctgtagacttaaacgtccctgtctgacagctttgaagagagtactggttctcccgttacagagtttgagatctgagaacagacagacagcctcctcaagtgggtccccaacccccgagtagcctaactgggagacacttcccagtaggggccaactgacacctcatacagccgggtgcccctcttgagacgaagcttccagaggaaggatcaggcagcaacatttgctgttctgtaacatttgctcttctgcagcctccgctggtgatacccaggcaaacagggtctggagtggacctccagcaaactccagcagacctgcagctgagggtcctgactgttagaaggaaaactaacaaacagaaaggacatccacaccaaaaccccatctgtacgtcaccatcatcaaagaccaaagatagataaaaccacaaagatggggaaaaaacagagcagaaaagctgaaaattctaaaaatcagagcacctcttctcctgcagaggaacacagctccttgtcagcaacggaacaaagctggacggagaatgactttgacgagttgagagaagaaggcttcagaagattggtaataacaaacttctccaagctaaaggaggatgttcgaacccatcacaaagaagctaaaaaccttgaagaaagattagacgaatggctaactagaataaacagtatagagaagaccttaaatgacctgatggagctgaaaatcatggcacaagaactacatgacatatgcacaagcttcagtagctgatttgatcaagtggaagaaagggtatcagtgattgaagatcaaatgaatgaaatgaagcgagaagagaagtttagagaaaaaagaataaaaagaaacaaacaaagcctccaagaaatacgggactatgtgaaaagaccaaatctacatttgattgttgtacctgaaagtgacggggagaatggaaccaagttggaaaacgctcttcaggatattatccaggagaacttccccaacctagcaaggcaggccaacattcaaattcaggaaatacagagaacgccacaaagatactccttgagaagagcaactccaaggcacataattgtcggattcaccaaagttgaaatgacagaaaaaatattaagggcagccagagagaaaggtcccgttacacgcaaagggaagcccgtcagactaacagcggatctctcggcagaaactctataagccagaagagagtgggggccaatattcaacattcttttttttttatgatttgcttttttttttttttttgaagtatttattgatcattcttgggtgtttctcggagagggggatgtggcagggtcataggataatagtggagagaaggtcagcagataaacacttgaacaaaggtctctggttttcctaggcagaggtccctgtggccttccgcagtgtctgtgtccctgggtacttgagattagggagtggtggtgactcttgaccagcatgctgccttcaagcatctgtttaacaaagcacatcttgcaccgcccttaatccatttaaccctgagttgacacagcacatgtttcagagagcacgtggttgggggtaaggttatagattaacagcatcccaaggcagaaaaatttttcttagtacagaacaaaatggagtctgctatgtctacttctttctacacagacacagtaacaatctgatctctctttcttttccccacatttcccccttttctttttgacaaaactgccatagtcatcatggcccgttctcgatggtcgctgtctcttcagagctgttgggtacccctgcagacaggctgtcacttcatgcttggaagattgcacagcggccaggcagaggcgctcctcacttcccagacgaggcggccaggcagaggcgatcctcacttcccagacggggtggcggctgggcagaggcgctcctcacatcccagacggggcagccgggcagaggcgctcctcacttcccagacgggacagctgggcagaggcgctcctcacttcccagacggggcgcctgggcagaggcgctccccacttcccagactggacagctgggcagaggcgctcctcacttcccagacggggcgcccgggcagaggcgctcctcacttcccagacggggcagccaggctcaacattcttaaagaaaagaattttcaacccagaatttcatatcctgccaaactaagtttcataagtgaaggagaaataaaatcttttacagacaagcaaatgctgagagatttgtcaccatcaggcctgccttacaagagctcctgaaggaatcactaaacatggaaaggaacaagcggtaccagccactgcaaaaacatgccaacttgtaaagaccattgatgctaggaagaaactgtatcaactaacgagcaaaataaccagctaacatcatgatgacaggattgaattcacacataacaatattaaccttaaatgtaaatggtctaaatgctccaattaaaagatacagactgggaagttggataaagagtcaagacccatcagtgtgctatattcaggagactcatctcacgtgcagagacatacataggctcaaaataaagggatggaggaagatcaaccaagcaaatggaaaacaaaaaaaggcaggggttgcaatcctctctccgataaaacagactttaaaccaacaaagatctaaagagacaaggccattacataatggtaaagggatcagttcaagaagaagagctaactatcctaaatatatatgcacccagtacaggagcacccagattcataaagcaagtccttagagacctacaaagagacttggactccacacaataataatgggagactttaacaccccactgtcaacattagacagatcagtgagacagaaagttaacaaggatatccaggacttgaactcagctctgcaccaagtggacctaataggcatctacagaactctccaccccaaatcaacagaatgtacattcttctcagcaccacatcacacttattccaaaattgaccacatagttggaattaaagcactcctcagcaaatgaaaaagaacagaagttatgataaactgtgtctcaaaccacagtgcaatcaaactggaactcaggattaagaaactcactcagaacagctcaactacatggaaactgaacaacctgctcctgaatgactactgggtacgtaacgaaatgaaggcagaaataaagatgctctttgaaaccagtgagaacaaagacacaatataccagaatttctgggacacatttaaagcagtgtgtaaagggaaatttatagcactaaatgcccacaggagaaagcaggaaagatctaaaattgacaccctaacatcacagttaaaagaagtagaaaagcaagagtaaacacattcaaaagctagcagaaggcaagaaataactaagaacagagcagaaatgaaggaggtacagacacaaaaacccttaaaaaaaattggtgaatccaggagctggttttttgaaaagatcaacaaaatagatacaccactagcaagactaataaagaagaaaagagagaagaatcaaatagatgcaataaaaaatgataaaggggatatcaacaccgatcccacagaaatacaaactactatcagacaatactataaactcctctatgcaaataaactagaaaatctagaagaaatggataaatttctggacacatacaccctccgaagactaaaccaggaagaagttcaatttctgaatagatcaataacaggctctgaaattgaggcaataattattagcctaccaaccaaaaaaagtccaggaccagatggattcacagctgaattctaccagaggtacgaagaggagctagtaccattccttctgaaactattccagtcaatagaaaaagagggaatcctccctaactcattttatgaggccagcatcatcctgataccaaagcctggcagagagacaacaaaaaaagagaattttagaccatatccctgatgaacatcagtgcaaaaatcctcaataaaatactggcaaactgaatccagcagcacatgaaaaagcttatccaccatgatcaagtgggcttcatccctgggatgcaaggctggttcaacatgcacagatcaataaacgtaacccatcatataaacagaaccaaagacaaaaaccacatgattatctcaatagatgcagaaaaggccattgacaaaattcaacagcccttcatgctaaaaactctcagtaaattaggtattgatgggacgtatctcgcaataataagagctatttatgacagacccacagccaatatcatactgaatgggcaaaaactggaagcattccctttgaaaactggcacaagacagggatgccctctctcaccactcctattcaacagtgttggaagttctggccagggtaatcaggcaggagaaagaaagaaagggtattcagttaggaaaagaggaagtcaaattgtccctgtttgcagatgacatgattgtatatttagaaaaccccatcgtctcagcccaaaatctccttaagctgataagcaacttcagcaaagtcgcaggatacaaaaaatcaatgtgcagaagtcacaagcattcctatacaccaataacagacaaacagctaaatcatgagtgaactcccattcacaattgcttcaaagagaataaaatacctaggaatccaacttacaagggatgtgaaggacgtcttcaaggagaactgcaaaccactgctcaaggaaataaaagaggacacaaacaaatggaagaacattccatgcttgtggataggaagaatcaatatcatgaaaatggccatactggccaaggtaatttatagattcaatgccaccttcatcaagctaccaatgactttcttcacagaattggaaaaaactactttaaagttcaaatggaaataaaaaagagcctgcattgccaagacaatcctaagccaaagaacaaagctggaggcatcacgctacctgacttcaaactgtactacaaggctacagtaaccaaaacagcatggtactggtaccaaaacagagatatagaccaatggaacagaacagagccctcagaaataataccacacatctacaaccatctgatctttgacaaacctgacaaaaagaagaaatggggaaagcattccgtatttagtaaatggtactgggaaaactggctagccatatgtagaaagctgaaactggatcccttccttacaccttacacaaaaattaattcaagatggattaaagacttaaatgttagacctaaaaccataaaaacccaagaagaaaacctaggcaataccattcaggacataggcatgggcaaggacttcatgactaaaataccaaaagcaatggcaacaaaagccaaaatagacaaatgggatctaattaaactaaagagcttctgcatagcaaaagaaactaccatcagagtgaacaggcaacctacagaatgggagaaaatttttgcaatctacgcatctgacaaagggctaatatccagaatctataaagaacttaaagaaattttgcaagaaaaaaacaactccatcaaaaagtgggcgaaggatatgagcagacacttctcaaaagaagacatttatgcagccaacagacacatgaaagaatgctcatcatcggagaaatgcaaatcaaaacgacaatgagaaaccatctcacaccagtcagaatggcaacattaaaatgtcaggaaacaacaggtgctggagaggatgtggagaaataggaacatttttacactgttggtggaactgtaaactagttcaaccattgtggcagacagtgtggtgattccttaaggatctagaactagaaataccattttacccagccattccattactgggtatatacccaaaggattataaatcatgctgctatattcatggaactagcccaaatgtccatcagcaatagactgggtgaagaaaatttggcacatatacaccatgtaatactatgcagccataaaataggatgagttcatgtcctttgtagggacatggatgaagctggaaaccatcgttctcagcaaactatcgcaaggacagataaccgaacactgcatgttcgtgctcataagtgggaattgaacaatgaaaaacttggaaacagggtagggaacatcacacaccagggcctgtcatggggtaggaggagggtggagggatagcatcaggagatatacctaatataaatgacaagttaacaggtgcagcacaccaacatggcacatgtatacatatgtaacaaacctgtacgttgtgcacatgtactctagaactttaagtatattaaaaaaataaaataaacttcattttttaattataaatattaaaaaaggttcaactgtcagtatactaattagttattttctgctgtctattagaaatgtatgaattttaaaaaacaggtatattaaagagttaatgataatatttcttagaaagtcagctcctctagtgcatttaaaatataattcagttagtctagctagtggcctatctatctcattaagtttttcaaaaaaacaactcctggatctagtgacctttcgaatggtttttcatatcttgatttccttcagttcagctctgattttggttatttcttgtcttctgctagtttggggttgatttgttattgctgctctaattctttcagttgtgatgttaagttgttaatttgagatctttctaactttttgatggaggcatttagtgctacgaatttccctcttaacactgccttagctgtgtcccagagattctgatgtgttgtaactttgttctcatgagtttacttgtgtaacaaacattcacgttacccgtgaacctaaaagtttaaaaattaaaaaaaatatataattgaacctataagtacctagtttatagcattttttgtcatgtgatttataaatactctatttatcaaccttttacagagtcagtctcctctagaaaatgagttttactctttgaaatcaggaataggtgaggacctgccacagcggtaactaaagaagaagtgaagtgttgcctcatttatgtttagaaactatcagaagtgcttttgttttaaaattacgtgcaaagactttagatcacacctacgtttcaaataccagaaattgaaatgaactgttaatgtattggagaacaaaagggcttagttttaggtaagaagtgtaggcaaaaaggcagtagtccattctgtgttcagttgtctttgaggtaataaaatttagtaacagtttgttagctaaaggatacataaaaagcacagtccctgttatgtaatgtttcgcagttataaaaaatttgattagccaatcttgctttggtttaaaaaggaggtcgttttgtgcttcataaaacatctcgagcagaaaatctttatgactttatgttaaatggcaggcaaatattaggaaagaatccgtcacttttgttaaaaattgtagcagggtaacatttaatcttgggactatctgcttagtttattaattacataaacaggtatccctgttgtactactaatgactaaattcatcttttaaagaataaagtaaggcttatgtgagagaacattgaaacaaagtcattgttggtccaaatgatttgcttcatagtttcttagtaattaaagctgtttcctttttggaagggagccatatttctaataaaagattagcttgtttctgcacagtgaaatttgaatatgagtatttgctttttgtagctgtgaaatgagactttttaactaagcatgattaattatgataggtgaataaactatgataattaaatctttaaatcagatacatgatgtataattccagaggtctgacaaaaatatcaagttgaaagaaaatactggcaaaggtcttggcttgtcatttataagctagaattaaaaatcattacacagatcacagatgttagatatctccaaagatgacttagaggaagataataaggatctgatcatttagatattttatttttcaagtagtcacttaaaattttaaatttttgaccttggggaaggggcagctgtgggcacagcttcagcaaacttaaatattcttgcctgccggctctgaagagagcagtggatctcccagcacagcactcaagctctgctaagggacagactacctccttaagttggtccctgaaccccgtgcctcctgactgggagacacctcccagcaggggttgacagacacctcatataggagagctctgctggcatctggcaatgcccctctgggacgaagcttccagagtaaggaacaggcagcaatctttgctgttctgcagcctccgctggtgatacccaggcaaacagggtctggagtggacctccagccaactccagcagaccagcagcagaggggcctgactgttagaaggaaaactaacaaacaggaatagcatcaacaccaacaaaaaggacttccactcagagaccccatccaaaggtcaccaacatcaaagaccaaaggtagataaatccatgaagatgaggaaaacccagtgcaaaaatgcggaaagttccaaaaaccagaatgcctcttttcctccaaaggatcacaactccttgacagcaagggaacaaaactggatagagaatgagtttggtgaattgacagaagtaggcttcagaaggtaggtaataacaaactcctccaagctaaaggagcatgttctaactcaatgcaaggaagctaataaccttggataaagggtagaggaattgctaactacaataaccagtttagagaagaacataaatgacctgatggagctgaaaaaaacagcaccagaacttcgtgacacatacatgagtatcaatagccgaatcgatgaatcagaagaaaggatatcagagattgaagatcaacttaatgaaataaagcaagaagacaagattagagaaaaaaaaaaaacaaaagggaatgagcaaagcctccaagaaatatgggactatgtgaaaagagtgaacctacgtttgattgatgtacctgaaagtgacagggagaatggaccaaattggaaaaaactcttcaggatattacctaggagaacttccccaacctatcaagacaggccagcattccaattcaggaaatacagagatcaccacaaacatgctccccgagaagagcaaccccaagacatgtaatcgtcagatttaccaaggctgaaatgaaggaaaatatattaagggcagccagagaggtcgggttacccacaaagggaagcccatccctgttagtcttaccagcggatctctctcagacaccctgcaagccagaagagagtgggggcctatattcattaataaagaaaataattttcaacccagaatttcatatctagccaaactaagcttcaaaagcgaaggagaaaatcctttacagacaagcaaatgctgagagattttgtcaccaccaggcctgccttacaagagctcctgaagaaagcactaaatatggaaaggaacaaccagtaccaaccactacaaaagcataccaaattataaagaccattgatgctatgaagaaactgcgtcaactaatgggcaaaataaccagctaacatcgtaatgacaggatcaattcacacataacaatattaatcttaaatgtaaacaggctaaatgccccaattaaaagacacagactggcaaattggataaagaggcaagacctatcagtgtgctgtattcaggagacccatctcacatgcaagacacacataagtttgaaataaagggatggaggatgatttaccaagcaaatggaaagaaaaaaaaaagcaggagttgcaattttcatcactgataaaacagattttaaaccaacaaagataaaaaaaaaaacaaggcattacataatgataaagggatcaatgcagcaagaagagctaactgtcctaaatatatatgcacccaatacaggagcacccagattcgtaaagcaagttcttagagacctacaaagagacttagatttccacacaataacagtgggagactttaacacctcactgtcaatattagatcaacgagactgaaaattaaaaaggatattcagaaaaaaaaaaagggatattcaagagttgaactcagctctggaccaagcggacctaatagacatctacagaactctccaccccaaatcaacagaatatacattcttctcagcaccacatcgcacttattctaaaattgaccacataattggaagtaaaacactcctcagcaaactcaaaagaatggaaatcataacaaacagcccctcagaccacagtggaatcaaattagaagtcagcattgagaaactaactacaaaccgcacaactacatggaaactgaacaacctgctcctgaatgactactgggtaaataacacaattaaggcagaaataaattagttctttgaaaccaaagagaacaaagacacaatataccagaatctctgggacacagctaaagcagtgtttcaccaaatgcccacaggaggaagggggaaagatctaaaatcgacaccctaacatcacaattagaagaactagagaagcaatggcaaacaaattcaaaagctagcagaagacaagaaataactaagatcagagcagaactgaaggcgacaagagacacaaaaaacccttcaaaaaaaatcaatgaatccaggagctggtgttttggaaaagatcaacaaaatagatagaccactagcctgactaataaagaagaaaagagagaagaatcaaatagacacaataaaaaatgataaaagggagatcagcactgatcccacagaaatccaaactaccgtcagagagtgttataaacacctctacgcaaataaactagaaaatctagaagaaatggataaattcctggacacatacaccctcccaagactaaaccaggaagaagttgaattcctgaatagaccaataacaggctctgaaattgaggcaataattaatagcctagcaaccaagaaaaggaccagagggattcatagccgaattctactagaggtacaaagaggatctggtaccattccttctgaaactattccaaatgatagaaaagagggaatcctccgtaactcattttatgaggccagcatcatcctgataccaaaatctggcagagacacaacaaaaaaagaaaatttcaggtcattatcactgaggaacatcaatgcaaaatcctcaataaaagactggcaaaccgaatccagcagcacatcaaaaagcttatccaccatgatcaagttggcttcatccctgggatgcaaggcccgttcaacatatgcaaatcaataaatgtaatccatcacataaacagaaccagtgagaaaaaccacatgattatctcaatagatgcagaaaagtctttcgataaaattcaacatctcttcatgctaaaaattctcaataaactaggtattgatgagacatatctcaaaataataagacctatttgtgacaaacccacagccaatatcatactgaatgagcaaaagctggaagcattccccttgaaaaccagcacaaattattcataaactctttaaaaggatgctataacatttttaaaaatattataagcatattctaagttacaactgtgtactaggagggcaccacacatctttttttttttttttacagactttaaaaggaaaaatattgaaactaagaatttttgtttttgttttgaaaaattacaggatctcactctgtaacttaggccaagtgcagtggtgcaatcatagctcaccgcaagctccagctcccaggctcaagggatcctccctcctcagcttccccggtagctgggactacaggtgtccactgccatgcctggctaatttttttcttttttaaagtagactgggtcttgctatgttatgtaggctgaagaatattttcttttaacaatggtaaaatacccataacataaaatttaccatcttattcatttttaagtatataaactaaaaatattacaactttataaggtaaggattcaattcatacaagtcagtagacagttatatatttatctttatataccattgagaataaagccaccatgaaattgtttacatttgtttttcaggtcattacttctttttatgtggagcgtggaggaaatgctatgtccttcatgggaaaaggtgttacaaagagcacaattctttgcttgcttcacttatcccatgagatgatggcccaggctgggagcttggtgagcgcgttaaagctgtctatcttctgaacatttgcttgaaagggaatgtgctgtgtccaacacatttcaagcatataaacttgccacatgaaaatgtctcttttgacttttctttttaggtaacgtgaatgatttttgactagaatatttcttagaagttgtatattaacaaatctgaatcttatttgaaattgattcaaatgtgcatacactggaaaactacattttgtctacattatgggaaaaatagcttctgtcaaaaaattgttatgtttaactttttaaagagaaacaaatttttttgtttgccttttttggctgaataatggattaaaaccaagtctaaaatacattttcacgttgttttcattaaaaattcttgttttaaccttcctgcattttatttttagaaacttacctcaaatatttctgtttcccttttttccctctaggagtggatgtcactttggttcttgcctttgggtagtcatagtgaagaacatattcctactcaacaaggattggcttggttgattccattatgggttgatcgggacccagaggtgagtgtgaaggagaatcaagtgtattgtgtttagattaaaaaacaaatgacacggggccaggtgcggtggctcatgcctgtaatcccagcttgttgggaggctgaggtgggcagatcacgaggtcaggagattgagaccatcctggctaacacagtgaaaccccatctctactaaaaatataaaaaaattagctgggtgtggtggcaggcacctgtagtcccagctacttgggaggctgcagcaggagaatgctgtgaacttgggaggtgaagcttgcagtgagctgagattgtgccactgcactccagcctgggcaacagagcaagactccatctcaaaaaaaaaaaaaagacacaaaacatatatacatatacatagttatattatgggattattgtagtgactctaccttatgttttatttaagccctgttttagcttaggctgccataacaaaataccacagactgggtggcttagacaacagacacttcttttctcatagaagttttggaagctgaaagtccaagatcagagtgccggcatagtcaagttctggtgagggctcttcttctggcttgtagacggctgccttcttgctgtgtattcacgtggcctttccttggtccatgcatgtggggcaggggagggaggggtggtatagagacagatttgtctttttttttttattataatgttaccagtcttattgagataggaccactcccttatgatctctttaaaccttaattatctcctagaaaccctgtcttcaaatgtagtcacttgagcataaagacttcaacatatgagttttggagggacgcaattcagttcatagttttccatccctgagcccctgaacttcatgttcttcttccatgcaaaatgcttttattctccctcaacaacctcaaaagtcttaacttattcccaaatcaactgtaaagtctaaagtccaaaatctcatctaaatgtcatttaaaccacatctgggtaagtctccagatataaaccctcctgaaacagaattcttctgcaggtgtgaacctgtgaacccatacaagttatatgcttccaaaagatgatggtagaatagacattcccattccaaaagagagaaataggaaaaaaaggaagaagtgatgggtcccaagcaagtccaaagcctagcaaagcaaatttcattagatgttaatgctcaaggataatgttctttggcttgatggtgtgccttacaggcccaccagagtgacagcatctgtctagatggctctgtgggatgaccccacccctttggctgtcttcaagagccccgcccataaagctgtcttcaagggcagccatgttcctgaagcactgggcagggtcatcattctggcccacagaaatcagaggtctttgaaaccaaggaggaaaagccacccttgagtcctgtggtgggattagcagcctggggatctctgaatcattttttgggtcattcttttcattgaagaatacagtagtcctcccttatcagaggtttcattttccaaaagcaccctgaagatcagtagtagccaaaccctccctcacaatgcctacatcattcacctcacctcatctctttatgtaatcattgtatcatctcacatcaatacaagaaggctgagtgcaatacaataagatattttgagagagagaccacatttatgtattttgtattataacatattgttgtaattgttctagtttatttttagttattgttaatctcttactgtgcctaatttgtaaactttaccatagatatgtatgtgtaggagaaaacatagtagttatagggctcagcactatctgtggtttcaggcatctactgggggtcttggaatgtattccccatggataagggagggaccactgtagcacatatttgcttacagaatccaggaagtccaacagctttccttcattctctgcatctttctctgtcctctttagttcaaactggcaatgtctttgctgatataatcccatctctattcctggcttctgctgagatgtctgattaagtccatgaattgcacccgtgatctttttcttaaatgggtattcagccacaccctccatgttctctttagaacaagctttctcattttttttgcacagataggctgagaatttttcaaatcttgttcttgtttctttttgcttacccattcttaattccttctttaattcatctctctccctttgcattttgctataagcaatcaggaggaaccaagccaatttttcaacactttgcttagaaatcttctcagctaaatatccaatttcattgctcacaagttctgcctttcacaaaacactagaacatgaccacagcttaaccagttttcttgctactttataacaaggattgcctttcctcaaataaccttttttaaataacactttcctcatttttgtctgagatctcatgagaattacccatgtctacgtttctggcatccacctcaaaactcttctagcctgtaacccattacccagtgccaaagtcactttcatgtgtttaggcatttgtttcagcagcatccccactccttggtacaaaaatctgtattagtgtgctcaggcttccataacaaaataccattgtctgggtggcttaaaaacagaaatttatttcttacagttatagaggctgcaagtccaagatcagagtgtcaacatggttggtttctggtagggcactcttcctgatttacagagggccaccttctcactgtgtgctcatatgacctctccttggagcacgcacatggagaaagatttctctccttcctgaggccaccattcctagtgcagtagggtcccacccttataacctcatttaactgtaatcacctaatagctctgtctccaaatacaggttggggattagggcttcaacatacgagtcttgaggagacacagttcagtacacagcaccctcattttcaatcaaatttgttcgagtatagattgaaaatataaaagagaaaaggttatagtatctattaccttcagaagagtggaaaattattggagaagcttagcaattttgaaaaaaataaaaaggatctggaaattatagacatgcaacacttaagtgtcatataatgaaattaaattaaatgcaaaaaattgcatttgcattacaatacaaaattttgtattatttctttccagttttagccagtttacttttttcaagtaaaatatgctattacaataaaatcttatttatagaaatatttgaaatacattttttagtcacattgaacttggacttactacttgacaattttatgactgcatttttaaaaaattctatagctgtcattgaaactatatttttggattcgaattcagaaatttaccaaaacgtgtggcttgaacagcagtggttctacagcaagcatattataccacatcaatcttatttgggaacgtttttctcttgaataacttttgaggaaaatacgaaatgccttgtaaaatgataattgcctctttgtttagaagttttaagaaagttaaaatcatttatttggaagaaacaataaaaaattaagaaaggtagaacaaagaatagctaccttttttaagaatgaagaattgaaattgtgttcataaaatgtaagtgccctatgctttccttagaaaaaggcttgcaaactataatttttatgcatctttttatacccagttttactttgctttgaaatttgcttatatttaatttttcctatattactgctttcttgaatcatggaatggaggacactgtcttctataggtgtctcttataatttaggatcataaaaccaatggatttttttaaagtgtgatatttatgtaccagaaaaactaagaattcatgttaggaaaaaggcttatttgattcaacaactttctctttaatttgaacaggtgagattcacttcactgggattaggatcagcactgaccacccttgaaacgggctgtgtggccttagcaaacagttgtcagaacatttccggtgggctctggggaactgtggtgaacattcttctggaccagtcagaatgtagtatggtgcgccgggaggtatgtctgtcttttctcctttttttccttagaaattctttgtgatggtatccgtaagcgatacttgactgccgctcaacatggtggactgaccactgaccatgatctcttctgtctgtgaacacccaaacaaaatgacagtagaggatttaaaaggtattcatgcacaggaaaaactggagtccttccttccgataagataaaatcggaatatactatattttaatgtgaactttttttattatgcattgaaaggtagttcacaggaaaaattacttttatattatctcagcatttatgggtctctgatatttatgaagctttagtatagataagaggctgtcaaaataactctttgtagtatttatcatataacatgagagggaaaaataaaccctattttaattctttctgaatagcttgtggtttttttttattgctgcttttgttaaagtaatgattcatgtaaatggttttaaaacaataatcaaattgtacttagaggcttatgaaaaaaaacagcagctcctgggtccaccattagcagtcgccagttccaagctcaaaaggctagttttgttgctgtttgccttcatgtttttaagtagtgatgtttatatttatggctgcttcttgatttatcaactttaaagcttttccatcacttctagttatcatggttggaaatgtcagtttcttagaatcctcttgttaatcctgtcattctcccattatggttatttcatctttcattaagcagacaatcaatgctcctatttgtatgattatttaatttgatcatcttcaggatctagtcaagttggacatttgtggtttgtatttctagttagcaagtttttattgaaaggagtctgtataagagaagggagaaagcggggcagaggggtgcgtgtgtttgtgtgtgtgtgtgtgtgtaatctgaaaggggatagtagaaacctaaaattatatttcttaaatgctaccagaagaatttatgttatacaaatcattttttaataaagctgaattctgaaataggaaaagatatatttcctgatgaaataatttcatatgctgttaggtcattacctaacaaggtcattacctaagaaggtcatcacctaacaagaaatacagtttgacaattctcataatgacctctcagcatgtgcagttgaccagagatgtcttttgctattaattacaatatattggttatttcagagatgaccacaagatggcagtattgacctttttttttttttttttttttttttttttttttttttttacattttcaggcggcatttattcttcagaatctccttgtaattccaatgcctacagaaattataaaggattatacttggcaggtgggtgattttaaacaattatcaacctagtagatgtttcaaattaattggtgataaattttcagtataagtagtatatttcattattgatgaaactatatacaagacagcaagggcctcttaaaatagaacgtagaatttgttcttatgccgaccagacttaaaaattcttctctatagtgttcacaataatttaaagcaaataataatagttaacatatgtttactatgttttaggcacccttctagaaatgtaagacatagtaacttgtataattgtttgagttgtgaactgttactatccttattttctaagcttaggaacttttgcatagagagtttaaatagtttgtcctaaatcacacagctagtcagtggtacgcctttgctttgagtctaggcagtctcttacccactttgctgtattacttctctaatttagtaataataaacaaatttgtagatagttaaatatgtgttgatgttaacatctttttttccttttctaggttagtgcacagtgcgggttatagtgtatcttgctttgttttctgttgggttaactttctttttcatgttctgaatatcacatcagtaaatggttacctaacatttttatagcttacattaaaaaaattctagcttcatgggatatatgtacatgtttgttacataagtatattgcgtaatggtggtggggattggggttctcgtgtactcattacccaaatattgaacattgtacccagttaggtaatttataacctcagccgcctcccccactccctccttgggagtctcagtgtctgttatgtctgtctttatgtccatgtgtattcattggttagctcccacttatacgtgagaacacgcaatatttgattttctatttttgagttagttcacttagataatggcctccacctccatccatgttgctgcagttttaggtaatttggaagatacaaaagtacacttattggggatataagatgtgctgtttctgtccttttacctatccatatattttcaccttatagggatatatttatcatattgctacacctcactcctcaaaatcctgtataaatctaaggtttatttttaagttttaattagactatactcttagaggagttagtgaaacaagctgaaccgtagcaagggcaagtttccgcacatgacccgaagcatgaatccaggtggttgtcaaggcccaggtagcatttaactcttggaaggcttacctctccaaactttacaaacccagggtaaccctaccagtcattgtaaatcccaggcttgtaatttgctcgtaatttctttaacattgccttctgataatggctgcttatctactttccatgttgtaataaaaccaggagacaaaactggagggaatatgcaggattaatagttatattaatagtgtagtagttttggtacctgttatccggagactacattttaaaacatgttgtttttggctcaaatacaaataatctctactcccattgttaaactagtgacccatgtacatggatatacttggtgatgtactaccaatgaatttttaattattgaaataagtataaaggcagagtatattaaagttcctgggacattatgttgtaatacagaaccgtatgtagctgttcatatttttctcttagaaattaaatagtaaagttcctgtttgttgctggtggcatgcttactgcagtttattggttttgttattctccagtcttcatcatggaaatccttttctactaaaaagtggaaaatagtgatttaagttagcttttggagttttggccttgctaagttggccaaaataaaaaaagttggagagccactgctgtcccaaacaatagttgattacaacttttgctagtcttaggaaaaattagataaataaggacaatcttgtatgctttttaataaactcagattttcttcctctcttttcagtctttttttttttttggttatttttgtttgtgtaagtgtccttccttggcagtgaaaatagttaactcagtatatctgtcatccaattttaagaaagtttagtggggtctgaaattccaaagtagaaacagcttctgcaagaaggaaacaagatggttgtctctgggtgcagctagtggggcacatggtcctttgcaaccatgaaaaaggggccacatagccagtattttaaaattcaaacagtctttggtagaattatgaataataatcttattcaacaaaatgtttcatttacttattttagtgtccctttcatagtgttgtggaggatatagcatgaaacagcatgtttaggagctttgttaaaattttattttggttgaggtaaatatttgattttttttttttaacaaagagaattgcttctattgctttgcactttgttttcctgcctgcagtctaaattaatgcccgctagtgctcttgtttcataggctttctgaagcattctctttataattactactccttttcctctccttcctctgcacagtagcataaattcctacttcatgtcatgacatagaattgttgtacttgtgaatagtaataatatgcatatatgaattatgaataatattatagctgagtttcccttttattgttagatgccagaaagtagagcccttttatcaattgtgactttttctgtatgtacttaaaaaaaaaaaaagatggggtctcactgtgttgtccaggctggccttgagttcctgggctcaagtgatacgcttgcctcagcctcctgagtagctgggaccccaggcacatgctgccacacccagcttaccttctaagctttattcatggttgcactttttccatatctctggcttttttctttcttttattcctgatatgcatttactatcatgttacaatttacctttccttgtaatgggccttaaatcttttctcggacaagataggaagtaaataatttaaaacaatttatttttttaaagtattaaataattttaccaaccactgcaattcccattttaatcttccttttaaagacactaacatttaatgtcttaccactaaattaggttattttccatatttgcattatttcttaccatttaacttaatcttcctgtgtagaatgtttgtttctgacaggactacattttttatattttaaaaaatgtttctcccaacccctaccacagagaaagtaagtgctccatctgtcttgactgattcattaaaatgtgcaaaacatttgagttatccttttggtcttaatatcataagtaaatacagttagaaataaagccttaattttcatagcataagtccccttttatttttctgtggatgcagaagcatactggaagtggggtggtcaccaagaggaggagcagatgaagtatctcggcctgtcttcccttgacatctagcactcctaccaggggccttgataccaggcccctgctggatatgagaacccagttcctgctgtgtcagtctttggtgtgtcacagctcttttatattcaggacactaacttttcagagggatatttacaaacattggtcttgttcttgagtcaaactcagcctcattcaaagctacatcccagctgggtgtggtggctcatgcctgtaatcccaacacttggggaggctgaggtgagaggatcacttgagcccaggagtttgagactagcctgggcaacatagtgagaccccatctctaaaaaaaattttaaaaattggcctggaatggtggcatgcacctgtagtccctagctactcaggagactgaggcaggaggattgcttgagcccaggagtttgaggccacagtaagctatgattgtgtcactgtgctgcagcctgggtgacagaacaaaaccctgtctctaaaaacaaaaaccctgcatactacattctctgccaagaagagaaaacagagccaatattcagttgacacgaaactgtattgtggctcccaactgtccagtgtttttcagaccagtttcccacagtctgactaggagttaagactcctgaatgtggatggtttcataactgggtttagtttgaagactagtgtcagaaatccgtatccctgaaactttaacaaccaattttagagttgattataacaagaaatctattgattagagatggattattgatgtaattttctcagttcatttctgtaaacatttgttgagtgtctaaatattggagattcacagataatccaatttagtattcttgggcttatggcctacaggggatgacatgtacccaggaaacattgttataatcatgttatgtatgatgatggtagcttatgcataattttaataatatttcagttctttccacttgaaaatgatctcacatttaaatgtaaagggtaatttcatgcacttaaataacataatgggttgtcagtttgtgatttaaataaacttgttcatgctctagttgctttccatgtttgtgacaggactttgaattggtacacagactttttaaactttattttgaaaaaacttagatttataggaaatttgtagaaacaatacaatttttatgtactcttcacccagattccccaaatgttattttacacatttacttcagctctgtctagtgtcttctttctaaactattggagagttgtagacataatgcttcttttcctctgaacacttaagtgtggatttcctaaaaataaggatatcctcttacataatcacaataataattatcataattaggagattactcaaggattttcagttgtcccactgctgtttttaatagaaaaaaaagaaaaaaaaatccaatcctggatccaagatccagctcaggaatacacattgcatatacttgtcttacatatttgctttcgttcatctgaaatagtttcaaaattttaaatatttatgatcttaacatttttgaagaatgcaggctacttatttgttgtaatatacttcaattagatttgtccttttccccaggtttagatttgagttacgcatttttggcagaaaaaccatagaagtgatgggttctcagtgcaacatgtcaagagatattatatctctctttcccattgttggtgatactaactttgattacttagtaaagatagaatctgcctgttttgtcctttgtaaagttacagttttttcttttggaaggaggtgctctgagactgtaaatatctgtttctcatcaaactttctttcactagttttttgttttgttttgttttacttttttttcccccataggttattggggaacaggtggtgtttgattacatgagtaagttctttagtggtgatttgtgagattttggtgtacccatcacctcagcagtatacactgcacacagtttgtatcttttatccctcaccccttcccacccttttccctcaagtccccaaagtccgttgtgtcattcttaagcccttgcatcctcatagcatagctcccgcttatgagtgagaacatttgatgtttggttttccattcctgacttacttcacttagaataatagtctccaatctcatccagatcactgcgaataccattaattcattcctttttatggctgagtagtattccatagtgtgtgtgtgtgtgtgtgtgtgtgtgtgtgtgtgtgtgtgtgtgataccacacacaccagtttatccactcattggtggatgggcatttgaattggttctacatttttgcaattgcaaattgtgctgctataaacatgtgtgtgcaagtatcttttttgtataatgacttcttttcctctgggtagatacccagtagtgggattgctgaatcccactggtagttctacttttagttctttaagaaatctccacactgttttcctagttttaaattccattcatgattcttacctgaaacagttattacagaattgttgccaaatgatttcctaactccatcatttctttctatgtttattacatgctactgtaaggaagaacttttcattcttccttgcttatttagtgattcacttatttacaccagcatggattgaagattcttaagtttgtttaatgggctataatctgtttctatcattatttgtttcaatgttcaaatcattcttgctttggccaggggaaatttcttcataatggttcttgtgtctttatcaatatttgagccatttccttacttctggtacagcaaagtgttctagactgtccagctccatcctggaatcagatatttgctccaagggctctgatttcttttcatggagaatggtatttagaaaccaagatctgcgttctagatgtattcattgttcctggggtgtcattgcttctatgtcctgtgagtgaacaaagctagtaattgtctgtgtatatgttttaaatagtcagctcatttatagttatatattattttgatatttgatatgattaatatgtattatttttatcttttgtttgttatgaagcatcatgagtatttccagaagacaatgagtacttggtaaactgatatcattgtaatgatattcatattttacatgtagttttggatttctaatgtatttagggtcatttttacagtctttggattatagcatttttgttatatatgacaataattcatttttctccttgaaaatattatatcttcttaaatgttattcttactttgcttctagtaccttttcaattatagctaatgggtatattagcactgacactaggagtataatatgcattttaaaattagtattctgatttattgcattcttgataaagatgttttcaaattaattggagcttgatatgacataattaatttgcagttttctttgtaaatgtatttgtaatggcattctggtgatttgaagagctttcttactttccttctcagctctctctggcaattcagcagacgatctggcagccccagaactcacctgagggcaaggctagtcatgatacagaagtcttgagacagagcaattagacctgattgctctaatttccccactatgctagaagataaccccatcaattactgatggatgtatggagcagagcctagtgtgtgcatgaaagacttcattgttctggcccttgaaccattagttatctgtgaaagcctgagcctggccatcctttgtgcatatcctgggcttggctccattataaagctctcttaataagtgtagagaatggggattcaggcttaatgcttagttaaataaaaaataaaataatttttatgtaatatgtgcctatttcagattactcggttttcttttgagcagttcaagaatattttgaatgcactaattgaactttttagaagaaatttttttttcaagtaataaatacatatggttaaaaaaaagctaatagagcttatagtgaaattcactgtccctctccattcactgagacagttttacctctgattttaattcttcagggagttaccactgtatatctaaatagcatgtttgcaataatatatttattcatacactactttagtacctaaggatttagctcatgtacacaatttcctgcagataccacagtatctcatagtaccatagtggtattactgctcttatttctccactggtcacacttgctcttcctggttttgtcacccatgcatcatatcttttgaccccaacccattttgagatgagtaagacatggctgagattgtacctgtcctttcttcagtctttcctctgccgtttctaatacccatctttaatagttttatttttactttttgctttgtgagcgttgattatgtttacattctcatctgcagtctcaattttatctgtaggttgcttctaaaagttgaaaaccgtaactcactacagagacacttagtgggctgtgattacactttcttatctcggcttccaggaccaactcatctaatactcagaggaaaagttttctggtatttgtatgtatgtatacatgtatatgtgtgtgtgtatatatgtatatataaaaatataatttaaaaattgatttgggtgatttattttcccttgaggttcctgtttgttttttcttacattgtgggtccatatcatgtctcatgtctaaagtttttctaagctcttaatcatcctttctcttctgttagaatttcttttcctagtcataattctcaaaatgattgtagtggtaactagtgacaagtgcatgagagataaatatcacaagttcttgcatatttgaaaatgtctttaaattgcactggattgatagtgtggttagttaccatatgtttggtgaagattgttcctcccaagaattttgcttcactgtattctagcatccagtgctactgatgagaagttgaattttcatctgactctttttacttctttatggctgatgttttctttcattatcatctctttgtcctcaatgtttagaatttttttattatgtaccttttttccatttttcttgcttgacatttattaagctccttaatttgaagatttggatcttctatatatttttttggctctgacaaatcttttcatatttatttcttttaagatgaatttcctttttttgtgtgttatattttatctttccagaaattgtaagtcccttattaggcctcttgaatttattttctctgatttccttttgtatttctatatcttaaacctttttgcactattttctatgatattaaattttttgttcataagctaaattagcttcttcaatcttggtaggctaaataatttttaccatgatttataaacagaggaaaaatagaacagattctaaactttatttgatagatttagttataaatttgtgtctcttattatgactttcttacctatattttctaagtctgtgtttatattaataggaactagaaaagaatttttaatttattgaagggaaaatgtgattaaactaggttctttatcactgtgacaattttacatatttagagaataattgcaagagttctaataccatatttacatgtgtaacttctcacttctaaaatacttaaaaactaaagaaatgttagattttagaagacagtgggtttgtaactcttgtcttcctaacagttggtatggccatcagcctcagtaggccttgaacagaataaagaatcagcagatttaagatctctcaaagagctgtagatgtcatttttttctgtttttaagatttatacagtttacattctcttctctattttcattaaaggtttgtgaattttgggttgtggtaactgatagaggaagcattcatgtagacataattttgcaaaaatatgaaaaattgcataattttatataatctgtatggcaaaatatttttaagtggttctttgtatcattataaaatatattttgaaaactagtttttgtacaactttgattaatcacttttgatttattgaattttttagatggagtgaagctagtaaaccctctacaattcttgtcttatttgttaattccttccctatattattataatgaggactctaatttgtgatgttaagcagtttattgcaaatctcttgggtgtttggcgtgttttgtacgtttaagtatgttataacttgcttaaaagatagaatttcttgaagctgtgaatgttaagattgactgtgattttgggtgaatacttcattctatataataaaataaggtaatgtattaaagggcgccagtacctgtaacatataccttggttaataaacaggagccacataaccccattcactttgtattactctctattttacctgattcttctagacctctgcatttaaaataacgacagtgaccaccatgtgctggctgttcattacagtagtcttatttcttatataaattgctctgtttaggacgagtaagctcacagtgttggtagatttattacaacacagcagtaacaacttcatagtcataaaagacattgaatattgaagaggtttaattataatgatgtatataaatgtccttaaaaagaagtgttaatagaaataaccttgttagtgtaatcgtgcctttaacttgtgaattcctttgtcttcctgaagagtaagttaaaatatccatcttcttttggtgatggggagggtgagagaacagacacacatacaaatcttatggttaaaggtcaacttgcaatatgttttgaacgtatctttcctgttggctcttagatttctgtttgctatcttttatttttctctctcttatggcctgttttgaaatcttaactttattatcatttcccagaaaatagaaatatttataaactaatggtaggattatttgcaaacttcaaaccaatcctcattgcttgctttttgctattagatactccaggaaaagtagtaagtcacaatgcaaaaaattgtttgggaaaaatgcaaagagaaaaattgtgtaatagcagattcttttcagcctcctggtggcagttcatgtgtgtgtatgtatacatgtgtgtgttttttttccttgtcaggattaattcagtgggaagtaatgtgacagattttgccatatggatattgatggaccttttcattttacctggcttagtgataggtataaaaaataattctgaacataatatatggaccaccttatttcatatattttaacacctattattttactattatatgtaggttgaaaaatactgcttttattgtgtttttggtgcaagtatatgatttcttggttaaagctgatcattccatagaaacattttaaatgaaatggcccctcaagagaaagatcagctttgtcccttcacgggggtgtttaggcagcaaagacctagagtattatggaataatttgtcctaggtcaggctgctataactgtgtaaggacaaaagcagagtggaaggagatgggagcatctgggacccatttgtttcctcgagaggagacaatggatctttttaaggaaattgttggataaatcagtgtctcctccttctttccctctcttcctacagggtccctgtgttcatgatgaggactctggcctatcgctcattggaaaacctgcccttcaggctcttttatatcactgccatttttatgaacatttgaatcagatggtaaagcattgttacctaggacggtgtatgtttgatttgaatttttctgcttttgatagaaattcagaaagcaatgatttaaatggtaagtacgatatctttgtatttttatttttgtaatatgtaacttgtaaaaactgttaaaaatacatatatttgttttaaaaatttgaaaaatgaaagtatacagggaaaacattcatttccagttctaccacccagagagatgtattttcttcccgtcttctttctctgtatagcctttgtttgttttatgtaattatgttcatatcttgtgtacatttttgtatttccttctttcactaaatattctgcaagcatttttctatgttataaattcttcatggaaattatttttgacatcttattaatactttataagttatgcccatcagtacagttttatagtttctttctctgttaacgtctcaaacttttttggaactttcacttctaggcaatgtacagtttttttatccttcttgtgaatgagactttttcccactatattttctaattcattttgctcatgtatcaaaaagttatttattttagtatgttacttatttgtcacaatattttcctgaaacctttttattccttttgtttgtaggttcttgtagatttgctaagtataagatctgagcacataaaaataattatatcttgtaataaatagtaatttaataatataaatagcttttatttttaaattcatttttataataattttttagaatcttgccatagtttcaaacttacagaaaagcttcaggaatagtacaaaagaattctcaaatgttaacattttacagtatttacatcttgccacatgtgtgtgtatgtgtgtataaataaacggatatgtatgatctatatatactctttttgagccatttaagagtaagttgaagacatgaagttcctttatccccgaattattaagtgtgaatgtgtgattcacttttctgtttacttcttggaagaatcaagaaaatgagatttgatgaagttttgaacattttaaatatccctcttagaaaagtgactcacttaattgtttagatttctctggatcagttacttagagcatggcccttaaactaacagcattggcatcttctgtgaacttgttagaagtgaacactcagggcttccactctgacctggggtattggagcctctggggctggggctgaagcagctgctttagcaagctctcagtgattcttatgcacattaaaaaaaaactctccttagatttttttttttttaaatagtggtctatctcagaagccagatccatataagttttttcctttctttagttttgaattggtttcctgtaatgcgtacccttttaattaattgttacagttcctaggagggtgtccatgttaacaattttctcgttgttgcaggtttagatgactcattcaagttttggagggctccatctaggacaagtcaggatcgagatccaagttctctctccacctcagaaacaacggtacttgcaaagaatgcataagtcctttattttgaatctctgaaaaaatttgagtttgcctagtgggagagttaagaatacaaagtgtaaggttataacagctatgatttattcgaagtgctttctgcagaattttgctaaattattgtattcaagctgcacatcagtcatacattatagatacttatcttgcttttctgtgtgcgcaagccactctgaagtaaagtaactttgtgatcattagtgctataggtagcagaactggagtttgaaccagggtgtgtcttgctacggtatagctacactgaatatccctttagttgagaattttcaacctctctttcctaccttttttgatagtacgaaagtgtgaaaatatgtttttcgttagtattagaagagaacaaatcctacatgttaaaaatggttgattaccctgaaattgtgcttaagggcagggcaatatgaagaacattcaaatgattctagtgtggtgctgacagctttaaacacacttctaaatacttgcatcacatagaagtttatctggaatacctgaaatttatatatgcctgtttgcatgccttctttccttcccctttcattcatgcattagttgctttttttgcagaaaagtttgaaacactgagtatttataaggaatgattgatactaggtttcagttatttacaaacatacagaatcatttattctcaactgggaaatgttacttttaattttaaagtgtttttgaaataattagtgtattatacaacatatcaggaagggaaagatttgatacacctgtttccaggaacaaaaataatatgagaataataattatacagacattataatgtaaagattatgtttaatctatctcctagtttctcaaaagactgatactttttgctacagttttaagtctttttttccctagattcaagagaagtatttgtgtttagtgctacattggacctttgtatggaaaagtaagataattacccgagttccactagatgtcatgctttcctttccaaggtggagatagtgtgtacctttgtctcaacaagagcagtaatatgataaatgccaaactgaattgtcttaattggttatttagttcacagaaggacagcatgaaagtgtgcttaaaagtaaattttgtttgttagcctatttgtcaaaagggctatagactagccttgaaatctttgtacatatttcagtttttttgcttttagtaggtactcagtaaataataattgctctaattaactttgagttatcttagctattttgtggtgagcactgaagtcatatttatcctatacaagaaaacctaaatacaaaaagcaaaagcatatcaaccttttgaatttctctattttgtaataacatttaatcttacaggttagaatactagattttctgagaaaatttggaaatatgttattaattgtagtcattattaaagaaagaagcaccccaattaaagtgaaggtctttaacttgtttgtgtttgaatgtaacacagacttttagaaatatataccaatggaatcttttcagtttttttaaaagaattttgtaatatgtgtaaaatttatttcttattattttctctaaaggctagtgtattctgttagaatttttacagaatttactttttactttctttttcgggaggtttccaaacaacttttagaatgggtgacttttagttacaaaaatagtcttcgtaccctaattctactagttatattttctttaccatacccaagatgatgtgtatctttgtcccaacaggagaaaaatctggagagtgttttcattctgccagtgttactttaaaccaaagctgtcagtacttcgaccaaggcatactttcttatgtataaaaaaatgttgaagttacaaattgaggtataagttgagtggatgtaaatcttattaatcagcttatctgcttatttatatctttgttttgtttatctcagaattgagaaaaaatgcaatcctttattggttagttggctggtttttccattttatctttccaaggaaagcatcatcttttgatttgggtcatgtcatccagcatgctctcctgggttactatccattttgtgctgttaatgccaagttagggactttcatgctgttacctaatgtgtattagttccgttgtttggcaagcttcgtaaggattgttgggtcctgtatgtttgataaactgcagatagagtaagcagagtgtcattgttagctttggggcatcgcccttgtaaatgcttcctcaggagtggcctctatcgaactcaatattctcctcctctggggtaggaggatgcagccattaggtggtgtttttcttctcgaaatcacgtttatatccaagatggatagctgtttgtgcctcttacacacctgtgtgcagcaacagctttatgaccaaaatttggtctcttctgttgttcctgagcagaactatgtctgtatttttttaaatttatcaattgtcaaaataaaatatgtgggaaatataattcctttctttttgagcctttctttgtgaaatatgtgatctttcaaacttttttctggaacacagatttaaagaaaactgattttagtttttctaaacatttaaagagaatttttacacttcatagtcttaaaacaactgaaaagcattgttactattttgcaaaagaggaaattagggcatggagtgaggtcccactccatggagtgcatgcttgttcaagttcctagcatggtaactggtagaccattcttttgagtccagaagtatgtttgcttcctccttcactctaaggccagatgtgattgatcccataaaagatggtgtagtcaagggacagtgaggtttctttagagggaaagatgaaatgaaaagtggttttgtgtaggaagtggccactgaaatgggctttacaatattatccccttctcttttatatgcatacaaacatttgcaagggactgaaaagattcaaatattccttaggattcagtgaccacttaacaaatgacaaaagtctacttgagaacataaagcatacttagactttctaactaaatatgaagttgtgttgtactgaaggcattaacattcagaaaatgcaagaggttgtttggagtagaatgtgggacggaaagctaaagtttgatgacctgactaatcagataggagttagttaagaaagctgaatcagcttttggatttgaagaggtaagatataagagctataaagataaagatgtaaggatatttcagcagcatggaatggcatgaaacattacaactgatatgagagaaataacgtattgacactcatttgatggtagttaaaattgttttatagaaggaagagtagacagaggatagtttaagcagggatggatccaagaggctttctaaaagaaaaatagttttgacataggcatcactgataggacatacaaatacctccagcatggtgaccccaggaaaacttgaggaggtggtagtttgtgtgatgatggagagagaaagaaaatgttatactctgtttaaataaatttcagctacctgtggattatccagagtctaacaacctcttatatttagttaggaggaaaatacaagtgagacaagctcttggaaatttgtgctcttagattacacacaggatggcacaggaactgtgactgtgttgtggtgatgatctgtctctttaagtggtcctttggttagacatgcaagaatcgtctatcatcttctgctcattccttcagaggacttttctgagctttcttttttttacatatattgtacataatccatttgaattatgaatctattagttgaaataatttaaacttcttgttataatttggttagaattaatgattacaaattgagaagcatgccaaagctttcctgctcctgggcatatagagaaaggtattatttattaaaatgaacacatgaagcttagaatctcttagaaacccttcatatcttatatttttccatgttttcaaaatgtggctagacttgtactttatttttttcacactacaatccttattttctccctttgtacctttttaaaaacaattaaataaacttttttggcaccagtactgcttttgagggaagttgatggaactattacaagatcattttggcaaatacaatattcaagttctgaattaactttcaaaaaaagttaaagtgtctagtgaaatcacttgcttctgtaaggcagatacaaagaaaatcatttttgtacattgatgcatttttgcttatatgacagaaattgttttttacattccagttctacttggatatggcaaatgactctgctattttcagtgatttcaaagggactttcttaattttagctgcttattttacactgaagcataatttagaaaccttctttagttaccaaatctgcttacaaacacactgaagaacaatttttttcagtttttataagcaagatttgagtccattttatttttttattttcccctagttttgagctaaaatgacaaataaaattgtatatatttgagatatacagtgagattacttgacatatgtatatgtgatgaaatgattaccacagtcaaattagttaacacatctgtcacctaagagtcaaccttttttttttgtggtgagaacacttaagaactactctctttcaagtagactgtgcagtgttattaaccatattaaccatattcaccatgctacacattagaccatattaaccatattcaccatgctacacattagatccccagaacatactcatcttatctgaaagtttgcactctttgaccaaacatctccccttttccccagctcctatcccctagcaacatccattacactaatctgagtctgttttaggacagtacctttaagtagcatcagcctgctctaaaaagcttgtattgtcttttgtaatatctgtaaagtaataaggctagaaatatattcaaattcagatttttttgtcttaccgagggattataaattgaagatctcaggatatgtcatgtggcagatgtgaaagcgagggaaaagtctagattgtgattttgcacttagaccattctaatgaattgagcaagtgatagatacaagaattagactctcgctgttgtaagaggacaaccctagttatcctacttactgtgaggtacagagcagagcagcgagaagcttgacaggaacggatgacttcagcagactaagtttgctcttaaactaagccaattcctcctccttcacctgggatggggcagctgaagttagtctagctgaagttccgcggggacacagggggatcagggagaaagaagcaagcctctcctcgcaaacaaggccagccagctttctcaagaggtacgtctgaggacttcctctgattctaacgaatttatgctgtcatgaatgcagttctggactgagaatcctagtctcaactcagacaaatcccttaacttgtggtccttttctctaaatgaggacgtggactaggtcaggctttttgtacctatagcttcgtaggctcatactgcaccttccagtagctaatacttaatgccaaaattgtctagttattacttggattttaaggtgaaaagtaacatgtttacatatcgatgtactttatcaaatgtaaccaaatactatcgattggagattatatctaaacaagcaaagatttgagcatagaactgggacaatttgctttaatacttttttgcttttagttattaaaatagcaatatattagtttagcacacttaaaaaatagaggctagtagaaatataaatcatccataatcaattttaaagcaccatataaagcaatcattgtgtttccccaaccacatggggtaagttataatacaataaggtactttctaaaagcatcttttctaaacttgtgtatcccttctgtggactatactaaggaaaatcacatctttattaatgcctgacctttgtcatgaatcacaactttgctttcttctaatgagccaggtatttagtgggcccttataagctttcttttcccacaccgatcgttgaaaccgcaaaccaggtacctattctatttatatcagtaataaggccttcttgagtctttatcagttgaaagaatgttcagtgaaatgataaaggatttcagcatcattatccccttaacttttcttatacaaccaaaagagttgtggcaggagccagatatattagcttgtgcatagtttgtgatatcagtcttggcataggattattttcttcacagaactataaatgttgtcttgatatctgttgacaggaacattttttcacatatctctcattgccaaattgtaggcaaatatatttttaaaaataaacaagcttgctgggcgcggtggctcacgcctgtaatcccagcactttgggaggcagaggcgggcggatcacgaggtcaggagatcgagaccatcctggctaacacagtgaaaccctgcctctactaaaaatacaaaaaattagccgggcgtggtggcgggcgcctgtagtcccagctactcgggaggctgaggcaggagaatggcgtgaacccgggaggcggagcttgcagtgagccgagatcgtgccactgcactccagcctgggcaacagagtgagactccgtctcaaaaaaaaaaaaaataaacaagctttaggttatttttacttagtatctggatctaatactatataaaataaggcatttgatgtttgtttatgattgacttatttagactgaacttttttccagatttactttttagattatgtgcttagcctacattttttagctgcagctttctcacttatttcttggcatcatgactgttatacttacttaatgtggtgaaagatggttaagggctcaagttaaaagggggatttaaaaaactgtatattccatttttagtaatttcttcaaatttatattctctttactattagaaactgcaaatgaaaataaccttagtttttgctttcatttcatcatggtaattctaaggtactctaagtgttaagatatatacacaatcaatgtacaaatactgtgagctatataggatctgagtctggaatgatggtttataacttctatggatagctaatgttgtgttgcatgtactgatatggaggctacccaggtatgggcacttcatgttacttcacagaagagaaattgatggtaaggaaaagagttatctgacctcaccacataagtgtttttcaactaagaggtgcttagttgaacacctcttagcgcaaacacatcactttgcgctttttcagtcttagaaggtcggtctgctcattataaacctgtaggtgaaattgtacttgctttccacggattttgttatatttaatgttgtattctgaagcaatctcagcaaactggcacaattttttagtgttcttccttgataggaggtgaggtagagaaaaatcttttaatacttctaattttttaggcactattaaaatttatatgtgccatttggaacattaaaaatatctttattgtcaatcaagaaatgcaaaatatcacaataaattatagttaaggtggtatattttagcctttctaacatttgggcaatgagggaattggccttatgggaaccttaaactcctaaatgggcctgaagtcaatactgctcctttgagttactgatttatgtaaatgataacaattcctttaagaagtggaaatgccatttaaaaaaactgctgtaactcccaagatatggaatcttttctagttatcctaactagtataattttgtcttaaacctccttgtttaaggatatcttgtgtgtatgttgcctgtgtttcattttccgtactgtaacattaataagtaaaataatttactgattcataggtggcaccttcattggggagtactgaatttcagccacttgtgcagtcaacaacacttctacctgaagcctcccatgaccagtttgtggctcaaggtatccttttagtgaagacattctaccttcaaaaagaaaaatgacaagttggtccagacagatattttgaaagtaaatgtctaaagaacaaaattttaatgaaataagttgtagaccattatgaaatacatttagaaccaatatatcagaaattaataaaataaatgctcttaactaataaatggaatttggctcttaaataaatagtccaattcctgtgtggctccttattaggcgctcgtaggtatttgacatttgaatttgggaactgatgggtataacttaactttattttttcccttcttttgagaaaacactttgctacaagtaatccacttgaaagtaaagcgattctggttttaagtattttctaaggctatgcttccatttaaaggcacataaaatgtattgagtctttattttattagaaatgcacaatatacaacttgggacttatttttattaatggcaatatataaattttgctccttgtgctgggaactgcttccaaccctgctgtgcttcaaatttgcaactttgctttttttttttttttttaaattctagagagtatataagccttattcagtagcattaaatttttgacttgaaaggactatactatctaaaaagaaagtaattttaaacactggcatacatataagtatatgcagaaaaaatactttctgaaacatttagaaaaacttgctgaattaaaactttgaactttcattacaatatttgttccaataatttcctaaacagtgttccatattggtttttagtaattcatgttcactatatataaaattatttaactgtagaaaatactcatttgatcttcttaagaacaaaaggagcaaactcagattatttaaatggctcaggacatagggcatgaaatgaaattcgatcatgaatttcatgaacatttatctctaaaagcatgttgccttactctgatttttaacatctttattgagatataattcacataccatataattcacttgtttaaagtgtatactttattggttttaagtatattcagagttgtgcaaccgtcaccacgatcaattttaggatatttccatcatcttgcaaaaaaaccctatacccattagcagtcactccctgtctcccccattcttggcactctacggaatcactaatctactttccttctttatagatttgcccgttttggacattttgtatgaatggaatcatataacatggtcttgtgtgactggcttctttcacttagtgtgctgttttcaaggttcatccatgttctagcatgtatcagaacttcatttatttattgacaaataatattccactgtatgaatatattacagttacccattcatcacgtgatataggcatttgtgtggatatacaggctttctgttttttgtttggattacctttgattttaaatttattttattttcaagtattaacgctttttttttttttttttttttttggaggcagtctcactctgttgcccaggctggagtgcagtggcgcaatcttggctcagtgcagcctctgcctcctgggttcaggagattcttctgcctcagcctcctgagtagctgggattacagaggtgtgccggtacacctgcctaatttttgtatttttagtagagcttgggtttcatcatgttgcccaggctggtctctaacccctgacctcagatgatccacctgccttggcctcccaaagtgctgggattacagacatgagccaccatgcccgtccacaaatagtatgctttcaatgtatatttatgcaattttactctttgccaatcatttcagcacatatatatgaccaaaaaaaaaaaaaaaagcatataaaagaaagaatacccacagaaaggggaggcatgaacagaggatgaatcctcacaattttttggtgatatatgacactatcaggtatattccttttttttcaaaacttggaaataagagatcagggtgtcaaatgtcctccttagttttacaaaataaattagcaagaaaattgaaaaaatatgtatcaatttatattctgaactagctctctttacagaaaaattcaaaaaaggtttctatatatgcttgctctagaagtgctgaagatatgtaatacatattttatgaatactgaaagatttcccttgaaattgtttggacaattttcattagaattatctcaatttaattttttccatttttatttccaaagatttatcattattttttaagagacagggtctagctctgtcacccaggctggagtgcagtggcatggtcatagctcattgtagtctcgaacacctggactcaagtaatcctcctgtctcagtttcccaagtggctgggattacaggcgtaatatttgaggggaaaagaacacaaactctcatgtaaaaatgagcagaaaacatgaaaagataattcacaaaggacctaaaagtagcctttatctttggaaaaatattatacaaattaatactacccgaagatacttttttatttattaaattgccaacaattaagtattggcagtacattcttttggcgaggctgtggaaaataagcactttcatacattgttagagaaaatgcaaattagtataattttggaagggaatttggcaatagataacaaaactatgtatttacctttgattaaacaattccacttctaggaattctcttttatttatctccagcaatataaaaatacatatgtacttgataatttagcaagcattgtttgtaattataaaacatggaaacaacacaaatgcctgtaagtagaaggatagtttttgatagatatataacaatatatagataatgataaacatataacaaaattacttataaataaaatttatttttaaaataacaatggagaactacagctattagaaagagggggctgggcacagcagctcacaccaataatcctagaacttttggaggctgaggtgggagatacttttcacgatagtgagactgtatctctacaaaatataaaataaattagccaggcatggtggcacacacctgtggtctcagctactcaggaggctgaggtgggaggagcacttgagcccaggctttgaggcttcagtgagccatgattgcaccagactccagcctgggcaacagtgagaccatttctccaaaaacgaaaaaaaaaaaaaaaaaaagaggggaggatatcttcaaacagatatggaccaaattttaggaaatattgtcaagtgaagaaagaagcacaatgataaagagtatttatagtttatgatatttacagttttctacttttgcatatgaaagaaggggaaatttaaaatacgtgtatctatttgtgtagaaagaaaacaggaaggaacagctggaaatgaatgagattaattatgagaatgggtgggagttagttaggaaataagagaggatgggaacagtgtagaagagattgaggggtgggatagtgacccttctctgcatgtatcttcttgtataggttgacttttataaccatgtatgttttacttgctgaaaaaaataaaatcaacaaaaatgggaaacaataacatggaatacaaaccaattaatccagctacatttcacatgaatagcattgaagtgagagaggaagtaaccccagtaactctcagacatatttttaggactttagtcctcagactattggcaaaatgaactgtaaccaagcattgaactctagttactagttttattttttgcagtattattagttagaaattctgaaactacttattgtgttcataaggcaaggcaaataagtaaatatattgtagacaatgaaagccagaatttttactttcacataacggaaattacaaatatggaagggaaggaagatgtttaatgttggattatatttggagtgttggattatatttggagctttcagtatgaatcaattattttgttttttaagagatgaggtctcattctgtcatccaggctggaggacagtgctgtgatcatagttcactgcagttgccacctcctgggctcaagcgatcctcccacctcatcccgagtagccaggattaaaggaatgtgccgccatgcctggttcatttttaaatctttttgtagagataggtttctgtatgttgctcaggctgatcttgaactccttgcctaaagtgatcctcctaccccagcctcacaaaattctggaattacaggcaaattaatgatttttaattcgtagataaaatatgtttatgtgcccaggggtatgtatgtgcatgcatacgtatatacacacacgttttctagcttagaaacaatgacactctaaatagcaatgtatacatttagtgcccaaatcttgctttccaaactccattctccactttagggaatcgacactttggaacaaatatccaattttagagcttggacgaggaaagaacaagatgaacctggaacatcttgctgtgccagaaagtaagggaatgctcaaaggttaatggaggtgttcactaatgtagggtgcaggtaccttattactgttctaaagtctaaaagtattttggagaaaagggagctctcatacagtgttgttgggaaccactgtggagaacagtatgcaggttcctcaaaaactaaaaatagaacctaccctctgatccagcaatccagctgctgagtatatatctaaaagaaaaaaaaagtatatcgacgagatagctgcactcccatgttgattgcaacgccattcgtgatagccaagatagggaatcagtctaagttccgtcagcaaatgaatggataaagaaaatgaaccatatatgtacacaatgaaatattactcagagaaaagaatgaagtcctgtcatttgcagcaacatggatggaactggaggccattgtgttaaatgaaataagccaggcacagaaagacaaatattgcaactcatatttgggaactaaaaaaaaaaaaagttgaactcatgaaaatagagagtagaatgagggttaccagaggctaaagagtggagagccagagataaagaagggatggttagtgggtacaaaatacagttaggaggaataagatctagtgttcagtagcacaacagggtaactatagttaacaataatttattgtatagttcaaaataactaaaagaatggagttggaatgttcccaacacaaagaaatggtaaatgtttgaggtgatggatgtcccagttaccttgatttgagcattgcacatagtatgcctgtatcaaaatatcatgtgtaccccataaatatgtacaatgattatatatccataattaaaaatttaaaaataataaaaatagtaagattttactctgaagaaaacctaaagattatttgaatttggacacacctttggcccctcgagtttcagaaaaaggattgtaaatcatctttttgttctcagtgtctgaatacgtggggcatgaagtcatgttctgccctttctgacctgtctcttctgcatacgacaatgtccgtgtgtacacatctacacatctacatccacacatggtggaaggtggaggtcaggagtagtaggggtagcctgacccctaacctcaaggttaagatgagccaagaagctaaggcaattccccaactatacattatcattttcaggaactttcctatgattataagaacttttgagtattgtacatagctgtaaggtaaataataattcttatgtttattttcaataataggtcaccaggaaagtacatcaccacggccacctcatgattcatctctttctgctcccctgcccaaactgtgtgtttttgttactccatctcttctttcagcaatgtgcagcctcttggacaacctcttgacgattgctcccagagacactgcaaaggcttttcgacaagctcatctcatagaacttctctgtaggtaagagataaatactcctagagaggcatgttagttgagataaatttacacaaactgtattcatgacttgatacaagatttcttgtgacctggaaatacagctttattcttttttaggctcattgaactctaggattttgcttttgccagaattgtcttggtggtttttattttacatctattaaagcacttgtattagtttgttatcttgactattaaggccaaagaaaaactcctgctttctaaaattcatggattctaaaccttatttatcctccagcacacttaaggaatatggtgctatcccctgttcttaatggatgtgagggactttgggaattcatctttttagtggtcatatcagaataatgtccctgggttgaaaaattattggttaaattcatttggagttattttgttaagggaaattaaacttttcatcaaaaagtattctgataaaatttagggaaattaaattcaaagaaaaattatttgaatttttattacttatttgatattaatcagtctgtaacataatttttctgaatttctaggaaggtatagtagaaaaggactagatattgaattcaggttgacctaaggtctaattatagttcattcactcagtagcttgcagccttgggaaattactccctactgtgtcattaacacctatttaatggggttagtgtgagaattaaaagtgatggtatctaggatacccccttaagtattacttctcttttcttctggtgttcagtttattctagccaaccatacccacctccttttgaccacatgtttatttgcatttctctgtctctctgtccctttacctttgaacatacaccatctgaaatgtcttgcatcttcttgccaaatcatagtgtcttctctttctttctgggatattaagaaaactctagaaaatataaactctaaaagaagtattccttgtttcacctcattcaattgtaattattcctttaacatgtatgatacgcaatggagtatgagtttgttctggctttaatatttattgatcatttttttactgtacctactcggattggaaaagtaactgctagtcagttggctttccttcctggatgctcctgcctgaagatgaccaaaatagagctctagggataggatcttctttgcttcttacgagtcagctaagagtctgatgtggcattgaggccacaggggcattaaaagaccttttatggcaaaggcttatcatatttccgtacctgtttttcatttttgactttaaaaaaatcctacttgttttactttatttttatttttttatttttatttattttgagacggagtttcactcttattgcccaggctggaatgcagtggcgcgatctcggctcactgcaacctccgcctcctgggttcaagcgattctcctgtctcaacctcctgagtagctgggattacaggcatctgccactacacccagctaatttttggtacctttagtagagacggggtttcaccatgttcaccaggctggtcttgaactcctgaccccaggtgatccacccaccttggcctcccaaagtgctgggattacaggcgtgagccaccgcacccggcctgttttactttattttgttttttactttctaaatatgaacagtgttcttgctattttagccagtatttttgctattttattaggaaaataaccaccaagtttcctgttactcatgggctgtattatattttattctgcttttaattaggtttccttagatattttcttcacagctctttgcttctcacttttctctgacaagatattttcctgtttgaaggtaacccaggatacaatttgaaattctttgagatatctttttataaacattttctttgcttataaagatcctttctcttgaattgtattcgagttacctttaaacttcaaattctgatttcttaatctttaataaaaagtatactaatcttctgaaggattttctttttctgatcgtcacagcattgcagatgctaccctcatacagacatgtgtccaggaactcagagccctgctgccttcatcacctccagctgaacacactcaggctcaggtaagcatctcaagtctgtttgtgggtttgtttacgttaggtgtcaaaaataaaaatcttgctgaggagatactagtcataggaaaaggatgaaaacctctcaaaatatacatggtatgatgagattattcgaaatacgttacttgaaattttaatatgggacatgtctggatgttagaaaagagaggtggggtttgaagacctagattctattcttgactccatcattaaccagctttaaatgtatgatcaagtgtctggatatcttggagcaccactttaataataaagagggacattggtatagttcacttcctgcttctgtgattttaggctatctctgttatttacaccaaagttaaagttgttaaaatatttggtggctaagttatgtgtattttcaaaacccaatttgataaaaatgatttattcttgttccttcacagatatttagttttaaattcttgcctatagctagaatctatttataaaacatgcttaacaattattcatgtagctgttgctaacagaaattttatttcaaaatcaaattttaagaagggctacaagatttatttaggaggtgatgaattaaaggtgaagtagaccaatatctcttgctttgagatgtgttctttgagctgaataagacagaccccattacaaagtttgggaatgctacacgcatggtctttgaagctgttgtcctggtgcagtgttttcacctgagcatgcctattgcataatgactgtctcctccatttttctgctctccatccagcaaatctttgttgagtacttgctgtgtgcctgaatcttctccaagtgaataaaacaaagacccttccctcaagttgggagaatagataattagaaaatccatatatgcctgaagatgatagacatctcagaagaaaaactaaagcaggggacaggaagtgatgtcagagttggaagggtagggctattccacttaggatgattaggcagtgtcgtgggacccaaagttagtgaagaagctagtcctatggtcattgcaagacccctgaggttggggtatgcttggcctatccaagaaacagcaaggagggtggagtcgctggagcagaatctatgagggcaagatgaggccagaggggcacagtcagctccatgaagtcaggaccttgctggctgttatgttccattgtgttctgagtgtctggcatagggcttgtctcatgacaggtgctcacttgatacttgtgggatgaatgaataatagcagtagcaaacatttatgggcatttgtttttgttaattcatgtaatcttcacaagaatcatgaagttatcattaatgtcattttataaaggaaatgcctgaggcccagagagatgagtgacttgtccaaggtctctgacatagattccaacctatgcaggtcagttccagggcccacattcttaaccactgcaccagctggccttatgtagattaaatgcttctgggctcttggtatttatataagatcattcactcatttcagaaaattcttgagcctctgctttaccagattctgttctaggtgctagtgatatatccttgaacaaagcagatgagcatctctcctcacgtagagtctgtgccataaatgcaggagacagacagtgaacaagtaaataaaatgcattgtatcagatagtcacaaatggtatggaaaaaagcaattgaggatgggtaaaagggtgtgtcagaaaggggaggggcctcctgaaggtgacacttaagcagaaagctggggaggtgagggagcaggctgcgagtgcctgcggcagatggggtggccagagccctgctggtggggtgatactctgctaaaggtatgatggattaaagtctgtggtcagttggttggtatttttttttaagagggccatacatagaaaaagagttactttatcaactactcttaagatatgaatattttatttaatcttgaatgtgatcatatacaaaagaatctttagcaattcagcgttttctctataacacttcttcttgcctcacctggcatggtttatctatttatggtaatatttcatacatccagaggtcagacttgctataatttcagtagtgtagagtatgaatgtaatatgaagtctcaagacttcacggcagtaaacaaattaaatttcacaaactgaagagtttgtgaagcctggagccacctacacttttatataaagtaagttggcagattagataaagggaggacgtattcatcaggagaagtagggcagaactatttgtaaatagtctgagaccattgacctcagagacacatactccacaaatttacaacaggctctcgactcttcattacactcttacaaccccagaataaggtgagaggaaaaaaagtgtgtgtgtgtgtgtgtatgtgtgtgtgtgtacagagagagagaatgactgatttcagaatatctttataaaattcacttatatgtaactggctcattgcttgagggtagtggacaaatgagacatcacagctcattctttaattgttacatattcagaggattatttttctgaaaagtacttttgccagttaatacttaacaatattagcatcaggcaaattccagagatggttttgttggtaatattgaagatgatttaattttttcttttataattaataatagtaattttatgctgagggcaaaaatagaacatatttgcattttatttgtagcaataactaggctagcttccccccacccctgcttatgcactttgaagggtgtttttgtaatctttctttctttacaaaattatagactttatggctttgttatacacttttccacttcttccataatattgatttcataatttgactacttgaaaaatatgggacttttttttttcttttgaaacagggttttactctgtcacccaggctggagttcagtggtgtgatcacagctcactatagcctctaccttctgggcttaagtggtcctcccatctcagcctcccaagtagctgggactgcaggcccggctaatttttatattttttgtggaaacaggatctcaccgtattgcccaggctggtctcaaactcctgggctcaagccatctgcccaccttggcctctcaaaggactggcattacaggtgtgttagctaccacacctggccaagactttacttctttaaatggaattcaaaacttgactttgaaaacattgctttgtttggtgtatagttgacagtattaatatggctgttaatgacatgcttatgagaaaaataatgctttgtctgctatgtgttaatttcagatcttgaaaaattatggttaatattttattttttattgtgttacaaaagtaaaatgctgtatcactgagatgggctttttatatggcatgtttgatttgaccctgtctccttttcaaacaggtttcctttctcctggaatacctatcctctttgtccaggcttctgcagtcatgtttattggtggagcctgaccttgtgattcaggatgagcttgtgaaacctcttatcaccaatatcattggaattctcaccatatgtaccaaagatgtattaggtaagcttaattgttttagtttagaatgtaagtgaataatactgaggaaaaaaaacttactctgtttcagatattcacttgaaggttactttttgagtttctttttgctagtattttggaaggctttgataatgtgttttatagtttggatgccttttaatggtaccaattaagacaagtgtgtagtataataaaggactacccttgagttttcagtttaaatgagggcaaagctctctgtgtgatgttagaaagtacagtgagttctgggtattaactattcttataaactatggctaaggccaaaagcttaataaaacattcccaataacaagtataagccaatctagaatatatcacaaatttcctaaggtcctaaattattgaaatgtatatatattttgtgatctaatgttatctccaggggaaaatattctatgatgaaaagttgaatgtaatgcttagtggagaaaattaaagcaaagtaggatctttgtcaaaatctaatataattgttttgaaaatgaaaacaatcatttataatgaagtaattgaccatttggtaattctctttgcctttcagttttatttgaactatggatttacttggttttaggtctggaaaatgaagtgtgttatgatacccagcaaagccagttctcagcatctcatcagtgttaaaatgatctcgatgttaaaggaatagtaattccttagaaattcaacaagtggcagtgataccctaactaagcttattaggttagactggacaagctcaacaaggtgatatcacccccagtctctaaggagtgaacattgattctggggagaagagggtgaggcaaaaacatcttagaaattaaaatagtttgtaggcttccaaagctcaactctacctgagacaatcttattactatttctcttcctggtttttcttgagaattccttgagaagcattgacgttgagttcatggaagatacacaagatgtatgcaagactagtgccacaaaactgtggtgaatagatgacagcagctggaggacctttggttgattgtttgatcccaaggtcatatagcaaaaggtggtctgtgtatcttggctgctattggctgccttgtgaatgctttttattgatcctcttgcttttctgtatgatttgagctttgaaaattaattgaaagtagtatatatttaattacataaaagttgtttaacccatcattaattatatcaagcgctgaaaggaaaaaatgtcaatatctgaatgtatatctattagctggttaaattaaaaattgttttctcatatctagcaaaaagttttaaaagttcactaagaatatttttaaagaagtttttaaaatttttttctgaaaaaaataagttttaaatgattttataagaatttattatattgctgttgtttttatatgaattgctaatttatgtatgtaaattgacacattgtgatgatatatatatataagtaaataaattacatgaaaagttattcagcaagtataggtgcaaagctaaatttggtattaataggtctttaatttttaatttaattttcagcttaaatgttttattcggctcttcttaagcctgtattgaataaaaacagtaagctctatacttagcctttttatgtacaaagtacagatatacatatagtacataaagagatatacagtatatgtgtggaattaaaatcttgtggggatggcaatgaggaaacattttctgaaataaactctttagagagccactaatgacaaaagggttgagaaacaccaaggattgccctggggaaggtgcagttttcaagtatctcataggtgctgaagtacacctagatggatctcctcggggttaacgtcctataaagtttacattatagtggaattagataaaagatgacagatccccctgaaggcatggtcagagagagtcctcagcgactgctctccagcttccatttacctgagtggagagaagggaaaatgggtcctcatcctagaattgctacatccttagccataggaaaagctgcagaatcttcttttgcgtcatacttttctttgtgggatgatacttttcttggttcttcaaagaaattctttcttttctaccttgaccttggcacactgtgctttcctttcacccctgcccaaagctgctggaggggataaaggaaataggggaaaacttactctgacaaaagtagcacaaacaatgacatatttttataatgtgccaatatgtagttctgcagtcatggcttaatatttagtttgtcacaccttctgattgttcttgagtatgctttaataagaggagagtttgtgagtgtggctttatatgcaggagggtggaggggagatatcttaagaagcaatggaaaagaagttaattgaaataaattttggataatgctgaattagatttgtcttcatttgataagtgcacacccctcattttaagtgtaatgaagcgtctgtggtaagttttatatcttgaaaggttcttttccttctttgtgttaataacttgaagtgttttgattaattttatagataaagagttaatatcagctttttatcacacatggacacatttatttaatcttctggccatgctcctgaggaaagctggtgccatcacactcccgtttgttaccgtggccctggccaagcactggacagcggcgattggtaagaagatacttgcataatcttgggggctttctgctaataaaacgagataatgattctgcctgtttaggtatgtaaattcactaaagttaagtaattatagcatggcatataaaagaggtatcagggtgcttgctttgaaaaatttgcagtgttcttgagccccccaaaaatgcatttttgaaaaattgaaacacattttgagataacataaaagcgagttaggaaagcctgtggttttattattttttaagctttttaaagatgtcatccctgaagctctgttttattgagaacattatattggccactgttggtttttttaaattttactttaagttctgggatacatgtgcagaacgtgcaggttttttacataggaatacatgtgccatggtggtttgctgcacctatcaaccgatcatctaggttttaagccccacatgcattaggtatttgtcctaatgctctccctccccttgcttctcatcccccgacacggtgtgtgatgttccctaccctgtgtccatgtgttctcattgttcatctctcacttgtgaatgagaacacacagtgtttggttttctgttcctgtgttagtttgctgagaatgatggcttccagcttcatccgtgtacctgaaaggacatgaactcattctttttttatggctgcataatgttccatggtgtatatgtgctgcattttctttatccactgtgtcattgatgggcattgggttggttccaagtctttgctattgtgaacagtgccacagtaaacatatgtgtgcatttgtctttacagtaggatgatttataaaactttaggtatatacccagtaatgggattgttgggtcaaatggtatttctggttctagatgcttgaggaattgccacactgtcttccacaatggttaaactaacttatactcccaccagcagtgtaaaagtgttcccattttctccacatcctcgccagcatctgttgtttcctgacttttgaataatcaccattctaactggcctgagatggtatctcattgtggttttgatttgcatttctctaatgaccagtgatgatgggttttttttcatgtttgtcggccgcataaatgtcatcttttgagaagtgtctgttcgtatccttcgcccactttttgatgcggttgtttgtttttttcttgtaaatttgtttaagttccttgtagattctggatgttagacctttgtcagatggatagattacaaaaattttctcccattgtgtaggttgcctgttcactctgatgatagtttgttttgctatgcagacgctctttagtttagatcccatttgtcagttgtaagcctgtggttttataaaggtacatatgatatgattataaaacaatgagataaattttactgtgttggtatagaaaccagtatcctttctgacatatgtacattgtatgtggatacatcttcatatataaaatctggtatacatgataacatggaaagttaggatacaaataactttctcatcacatcagaattttcttatagtacagaaatgccaagagtatagtataattatttttatgtttttcatgatagttgcccactaaaataaacatgattattttaaaataactaatctttaatttttcatgaagcctcctaaattttagcatagaaaaaagctgttttttaacataaatattcataactgacatttatgtaacctttttaaacaacctacttaaatgtactcaaaattgagttattttaagcttccaaagtacctgctaattcaactgaccgattttttttaacatttattttatcatttgatcattcagtaaacttaaatgcatgatacaatttttaaccaaagcgatagtaagaattatggcaaatgcatgtttaacaaggaacagaattgttaattttctggatgtaggagttctgagtctaccatggagtacagtgtccacgtaggatatcattattttgtttaaaatataataattgaaagagattgactgattaagacattgggattttcttcttgtatttattgggggaaaattagtttatcacctgaatcaccaataatatcaatagaaagcatgatgctacccacattagataaatctggcctgcagcttgttttggtaaataaagttttattggaacatagccacactcacttacatattgcatatggctgctttcatgctacaaaagttgaggtgaatagttgtgaaaaagccagttacctgcagagtataaaatacttactacttggacctttacagaaaaagtttgctgacctctgacttaaacttatttatctaacactatttctttagtgataaaataaatacatattaaattcaaaaccttccttcaaaatatgtgtacagttttatgtaataatagtactaatcaaaagtaacttactgcataaatggttttcataatagtaatgttaatgaaaacattaataacaattatcattttttttgccatggttttatttttgtttatttttatttttttaaatcaattgccatctcatatgcccatatacatttaaaacatgtcgtggtcactccgtaacttgtgttatctataagagtcttttctcgaacttgactaatatttggacatcatttaaatgaacataattctcatgaaaccctactgctgactactttatttttcttatgtaactttaatttgtacaagccaaaatctaagtaaaaatttttatggttataattatcacacaagcataaatctaaaatataaaatcaaacaaaattataaatccaatttttcaagtttataaaatgtaaaacaacacatgtaattttgattaaacaaaatcagttctcacaacaggaaattaataatgactgtttcagtgtaaattcctttcagtttggtctgttctttccactctgtattaagtttgtgaatcagttcatgaccactcatgtgctgtctgaactgctatgaaatatttgtttgtacattgtgccaacactgcatactaagtcttgcttttaagttctggttggcaccagctcctttaacagttgcaacacaatcacacaagttggtaatctagatgatccagagtatagttactttaaaatcaacttgatttcctttttgttgaattttgaagaaattttcaaacattcacatctgaaattattcctttagatatgttctgcacatgtgcaggcttgtctgccacgtgtcctgccctgtatactgccagcttgcaattcctttctgttctcttgaccgaagaagcaaaagggcatctccaggctaagagcaaaacacatttatgctgtagtccaacagtggcttcacttcttgatgactctcaggaaaatcagaaatctctagaacaacttagtgatgtaatccttcaggtacgtcatttcttggtttttcaaaaactttatttagcgtttaaataaattgactttcagtcatggtcttgttaaaaactgtctcagtcatttaaattaagaaatagtaatgcttattatgactgtttaaatgatacaaaagtttataaagttaaattaactatctcctccttagccccacccgcttatgttgaccagtttcttcagtgaatatgatgtaaagatttgaagtgaaatattactaatctaaatctaacagttgatcaaaacagtgtttcatatcatgaccaaaatggatatatttcagaaatgcagttatggttcaaaatttattgtaattttaaagatatatctacgtctctgaaaatatattctaagtgacatttgatttctagaaatggaccacagatttttggggttggttacatgtataggtaagtggacttgtctggcacatttggaagaaaatgccccctttccaagccctgttgcctgttttatcttataaaattatgtttacagtctaaaatgtgaatcaagaattttgttaatcagaaaacattctaaaatcactaaagtattattttataagtagatgagtaattttttaaaaactgtgtgtttactaagttaaagttgtacattgttttttacaaataggaatatttttagatttttcagtatttagaattattctttttaatcatgtggttttatgatttttgtcttctcactgaaaggcagaaaagtagtagaattgttgattgaagaatttgcttcagcttcccaatcagccagccacgtttggcaaagatagaagattgtctgtgtgctggtttgttataattcctttgttgcttagaagattgttcctgtgctgatttgttatagtccctttgttgcttagaatttggagatttttacccacttctttgcctgtgagagtcatgatcatgcagatatttctggtatgactgcttgtgcattttgggcacaaggcttgatgatgttgagatgcagaaaggattgccagtaagaagaaaatgcttcctggttcacccaggagctgtcctgtggagagtgtcacagggtcctcaggggactttgtctcccttgtgctacaaaatctggttacctttccagcatagataagaagcctgttaaggcatcccccattttctcatccatctccagcagcgccttcagaagcctggatagagctctaggggagaagcgttcctcaaagcatttctctaaaagcctcttattcttgggaggccatagctttcctgtacctactacctcactgtcagttcactcaaattttcttagttgaaaacaaaaactggacgttgtcccagttttctcattccccatcagaacaacagactttatttcccaatgattaactgagtctccagttttgcactttaaagaatgttgtaaggaggaaaattcaaaccttttcaaaagtctcccaaccacaacccctatgtaatttaattataaatttcccaactttggctttggttggagcacggtactgcttggggaaaggcttttgctcttgctgacacacttggctcgtcagagaatttcagtgacttcactcagaggactgagtgcagtgagggcagtgtgctgggccctgccctccctgctgaggccaaaatggcaataggtgtgggagcctggctctgcatggatgactgtgggtgtcctgcaaccaatcctcctggacctgggaaatttaaagacttccagccaggcaaagccagggctattttatttcccaactctttaatgttgtttgtggtgctgtgtttgaagggtctctgatgagactcatgatgcatatggatccatgtagggtaatgaatcagtttataatagtatacgcaggaaaaaaaaaatctgtgctagaggaatttgtgaaatttaccttgcccttatttttacctaatactttgtaatattattcattataaaagcttttgtttataatttttttgttacctttttggacaaagaaaatgagatagcctacagtcacagaatatctcaatgattttcctaatgactagctaattttcctctttatttctctaaattacaaatcacgtattttgtgagggtatggatacattaaccaattatttaaaccatgtttcctaataaatcatactctttgtgttcgtgtaagcagtagaatttggatacatgacatctgttagaaaggcacaggcaagtttaagacaaagaaagtgaagagaggaagtatactcctggcacactcatgacaaaatgtgtacctaatgtaagttgggacagttaatgggcctattaaattacaaacactgttttctttgccttatagaaataggatatgtgaattaaaatattattagaatacattcaacagcaacacgttttgataagtaataaatgtagcttactatatgtccatggaggctgtggtttgggccaggtgctgtatgaagcaaagtaaattacagtctttaaattatctgaagaaattatattctaaaattgatgtctttcaaaggtctaagttttctgtaaaatcatactcaaaaaacatttgatatgggaccttaggcaaatcacttaacttcttgggattcagttcttcaagtgcaaaatgataggcttttattacattattactaagtttcagctgcctctaaaatctccatcctcctaacaaatcactgtattggaacttcagttaaatgtctggtcagagttatcttttaaatggtgctttatagcagtatcccataggggatacatgttgaaagtattcatacttacatcttaagtcatgtgtaagtgtttttttctaagtccattttgaggtggtttcagactttgagcattttctaagaaatattcagctgtcttttgtccataaaatactgaacacatttgacttagcagagattttaccttccctagtttatgaagatacagtagtctcctcttatctgtagttttgccttttatagcttcagttactcatggttgactgtagtccagaaatattaaatggaaaattccagaaatacacaatacttaacgtcttaaattgcatgccattctgagtagtatgatgaaatatgctctgtctcccctcaggacgtgaatcatgctatgtctagcttacccatgctgcatatgatacgtgcccattcatcacttagtatagcaatcttggttatcagactgatgaatcacaagacgaagaaggatgagtgcattgtagtaagatattttagagagagagacagagaggccacaatcacataatttttattatactattctgttattattattgttagtctcctacctgcctaatttataattaaactttattgtagttacatatttataggaataaaacttagaatatatggagttgggtactattcatggttttaggtatccactgggggtgttggaatggatccctcaaggataaaggggcctactgtgctcaatatgttttatttgcaaatacatatagataacaagatcaataaaaatctctctatatgtagtagattttgtctataattgatatattaatcagttgagataatgaattaattttgctccttatatttgatctgatatctaaaagtagtaatgcaaatgaggaactcttgtgccttattttagatgtattttgtgctcacatttagtgaatggtaaaattcaagggtaaatctgttgaaaggaaggcttatatatttaagatcccattgtgttgatgaatgttcactgtaattaaaaagcctattttttacattaagtaccttttggaaagaaagcaagaaagtcttgacctagaataccctacatcacttaaatgtacagaagggattaatctagaaagagcatgacatttaaatgaattttggttgatgaaaagacattatgtcttgctctgtatatcgtcttgatttctttttctctttttgtgtatttgctagttatctgttgcttgagtttattctcagccttgctgcctccaggctcctcacacttccagtcgtgtccacttgctctttgcagtgatgctcagactgcttttcagtctgcagtaagtactgtatggaaactgatagaaagtcagttcttcactccagcctttccttcagtatatgttggaaagtatatgaatttaccatagattaattctgtttgtttcctttttgtctgtttggttttggtttggggctttgatttcagttttaccatgtacacattttagagaaccaaacagttgtatctgtaagtttttactaaaagtaggagatttctgccttcattcctcatattctcagaggtgaccacttatacctcatttagctactttttatagcttctctttcatgtctctaaataacatgcttatatttttttgtcttgattattcagttttaaatattatctgttgaattcctactatggaaaatgagactttagcttttttttcatgcctcacccacctaccctgccaaaatgggttcccttctcattctcctaatattgatataccataatgccaattagagaataggcagcgtgaatggtattaaatttatgacagtgttatacacagttgaaccgtgttgcagagtgtttaactttcttttcttgcacagcttttgtttgccttagaggtaattattgtattattttaaaacgtgctgactttcctgttatcacttacaagctccatgctctttgccagaattaaacatcctctcagtgtgttcagaattgtcagaacttcatcgcttcatcttttggaagaaatctcttcccaattccttctaacctacttggtgcctgttttcatcctgggatatccattcaccagtttctgggaattcctttacctctgtgctaggtgcagtttcctgtcatcctgggatatccattcacctggttccaggaattcctttacctctgtgctatgtgcagtctcctgcatcctgcatgctgtctcccatctcctgtggccttctctcctggttaatgctcttcatttttgcgtagcgtctcttctcccttagctttcagagaaaaggtactgaggaggtcttttgagatctaaatgactgaaagtcttttatcgcccttacatataatttatagttaggctagtgagaattctggattggaaatcatttacttcagaatttagaagccatagtctgttctttttaattccaaatgttactatagagaattctgaagccttggctgggcgcggtgctcatgcctgtaatcccagcacgttgggaggctgaggcgggcggatcacgaggtcaggagatcgacaccatcctggctaacacagtgaaaccccatctctactaaaaacacaaaaaaattagccagacatggcggcgggcacctgtagtcccagctactcgggaggctgaggcaggagaatggtgtgaacccgggacggggagcttgcagtgagcagagatcacgccactgcactctatcctgggcgacagagcgagactccgtctcaaaaaaaaaaaaaaaaaaaaaaaaaaagaaaattccaaagcccttagaattcctggtttttctcttcctggaagtttttagaatctttattttttctcgtattctaaaatgtttagatgaagcatccaggtgtggatctgttttagccattgtactgggctctcttggggattctttccatctataaactcatgctttctaaattacttcagagacattccctgtactttgtatgctctgtacatttggaactcctgtgaagtttttttttttcgctatgtaatctctctttgctgtcttttcctctatttattttagtctctcttttctatttggcagcttttcttggtgtctggtaatcttgattatgtgctgtatttaagactgggaaactcaaagcagattgacatccctgagcatatgagtgcaacttgtcaattgctgtccaaggggaccaatgggggttattttgtaggcttgtcttctggggcttatcagattccctggagaatggtcttctgatctctttcctggaggtgaaaacccaactgccaaatgttatgtagccaagtaggagacgacagctgaggtctcagaatttagtttgcacaatttcacttaatccttcaaaggttttagtagaatacccttgcccacaaattttcctgtctctgccagttcagaatcctaatttatcctctccagagactaagcatccgggattttgcaagggctgggaggaagagtggcttagttacatagaaactggtggctggcgggcaggatctgggcatgtaactgcattttagagacttgaagcaatccttcatcctcacgtccagggatgcctggtgctaaatttcttcagccttgggcacttcagtggatagattggggtagttttcagctttccccactcaccacttagaattcaagtttcccaagcctaatacacttgcctctcatccatctgctttctcgttttcaggcttgtgtgtgtgtgtgtgtgtgtgcaatcccatttttgtcattttaatgggatttcaggagggaataaaagacatatctgtgcacacaactatttccttaggagtcttaactccgacccaaccctgctcccaattgctagtgagcaattttttatttttattttattttttatttttatttatttatttatttttgagacagagtctcactctgtcacccaggctggagtgcagcgtggcccgatctcagctcactgcaacctctgcctcccaagttcaagtgattctcctgcctcaagcctcccaagaagctgggattacaggcgcttgccaccgtgcccagctaatttttatatttttcgcatgtttgttggccaaactggtctcgaactcctgacctcaggtgttccgtccaccttggcctcccgaagggctgggattacaaggcgtgagccaccacacctggccccattatcatttgtttcaagaaatttttcaattttcttcttaattttttcattaacccactggacattcaggagcatattgtttaattttcatatgtttgtatagtttccaaaattcctcttgttattgatttccagttttattctactctggtcatagaagatgcttgatattatttcaatttcttgaatgttttaagacttgttttgtgaacctaacatatggaatatcctacagaatgatccatatgctgaggagaagaatgtgtattctgcagccattagatgaaatgttcggtaaatatctattaggtccgtttggtctttagtgcagattaaatccagtgtttctttggtgattttctttctggaagatctgtctgttcaatgctgaaagtagggtgttgaagtctccagccattatcgtcttgagatctcgctctctctttagttctaatatttgctttatgtatctcagtgctccagtgatgggtacatatatactcacaatcattgtatcctcttgctgcattgactgcattatcattatataatgatcttctttgtctgtccttacagtttttgttttgacatctattttgtctaagtatagctactcccaattttttttttgttttcattggcatggaatgtctttttccatccctttattttcagtctgtatatatttttattggtgaaatatgtttcttgtaggcaacagataagtgggcattgttttttcatcccttcagccactgtgtgtgtttttattgtagagtttagtccatagtccatttacattgaatgttgttattgacaagtagggactgccttctgccgttttgttatttgttttctaattgttttgtgatctcattctttaattccttctgtctttcttttagtgaagatgattttctttggtggtatgttaatttcttcttagtttttgtgtctccatttgtatcctttttggtaaaaggttaccatgatgaggcttgcaaataccttcttatagcccattattttaaactaatgacagcttagtactgatggcatgaacaagcacacatgcaaaagaaaactaataaaaactctacactttaactttatctcccctgctttttaacttttagttgtttctctttatgtcttattgtactgtctttgtcttaaaaagttgctgtagttattattttcgattggttcataatttagactctctacttaagataagagtagtttacacaacaccattacagtgttacaatagtctctgtttttctgcgtgcttactattaccagtgagttttgtaacatcagatgatttcttcttgctcacgaacatccttttatttcagattgaagaactcactttactatttcttgtaggacaggtctagtgttgttgaaatccttcagcttttgtttgtctaaggtttttatttctcttcatacttgaaggatagtttcatcgtatgtactattctagggtaaagtttttttgttgtttttctttttttttttccctgcagcacttgaaatatgtcatgccactctctcgtgacctgtaacatttccagatatattggaggtccattgtatgttgtttcttttctcttgctgcttttaggatcttttctttatccttgacctttaggagtttgattatgaaatatcttaaatgtcttctttgggttaaatctgcttggtggtctctaaccttcttgtacttgaatattgatctttctctaagttttgtaagttctctgatattatccctttgaataaactttctaccactatctctttgtcttaaatttgccctttcgaggctattttttaggttttataggcatgcttcattcttctttattctcatttttcttttatctccttcccctgactctgtgttttcaaatagcttgccttcaagtttactaattctttcttttacttggtcagctctactaatatgagactgatgtatttgtcagtatgccaattgaatttttaaactccagaatttctgtttcattcttcttaattatttaaatctctctgttaaatttatctgataaaattctgaattccttctcttattttgaatttcttttgagctcccctaccacagcaattttgaattctctgtttgaaagttcacatatctcttgtttctccacgcttggtctctgatgccttattttagttcatttggtggggtcattttttcctggatgatcttgatgcttttagatgttcgtcaatatctggacattgaagagttaggtatttgttttagtctttgcagtctgggcttgtttgtgtgtgtcctccttgaggaggcttcccaggcattccaagggaattggaccttaagcccaataacacttcgtttcttgcagacttgtagaggtactgccttggtggtcttggataagatctggaagaattctccagattaccaggcaaagactcttgttcttttaccttactttctcccaaacaaacagagtctctctctatatactgagcagcctggaactggggatgtggtgatattagcatccctgtggctaccaccactggaactgcactggattagtcctgatgtcaacacaacactgggtttctctcaagcccactgcagtcgctacctgcttacctgtgttcactcaaggccctaggacttcataatcagtaggtgacaaagccagccaggtttctgtccttcccttcagagcagtaagttcccccagaccctgagcaggtccagagatgctatctgtgagccagggattagagtcaaaaaccttagaattttacctgatgttctattctaatgtgactaacctggcactcaaaccacaatactgggtcctttctgctcttctctcccctttccacaggaaaaggagactctccttttggccaccaataccacggtcccatgggagttctaccacgctgctgccaatgttcacttagagcccaagggcacttctgtcattctgtgacgaatgttgccagacctggggctcacccttcaggacaatcagttcccctctggcccagagatggtccagaaatactgtccaagaggctcggcctggattcagggagcccaagagcctacttgttgctctacccactgtggctgagctgatacctaagatgcaagacaaagtcccctttactttcccctctgcttttctcaaacaaaaggagtcttttgttgtagccaccacagctgcgaatgtgctgggtcatacctaaagtcagcacgtcccagagcccaaggcctgtggtgtactatctggatattgctgctggttattcagggcctgagggctctttagtcagcaagtaatgaatcctgccaggactggtttcttcccttcaaggcagtgggttcccttggcccacattttgtctattttgtcatccaggaatgggcctggaatggaggtctcacaactctgcccagtgccctgttctattgtgactgagctggtatctaagatgcaagacaaagtcttgtttactctcttcctcaagtagaaggaaggagtcacttttgttgctgcgagccgcactgcctgggattgagggagaaatggtgtaaggcctcccttagctgccctggctgttgtctccctgtgtcacatgccaccatagtccagtggctctaagcccagcctaatactaggagttgcctaggaattgcaggccttgtgtccaagactgcctttcaagtttacctaggaccccagagcactggctttacggtggcaaggcttgccaagaaactccacttctgactgctggtttgggcagttgatctaaatgatctctccatgcatgggtgttggctgagcccagcacagctttgctctccactgtgacagagcagcactgaattcagtgtgaagtcccccagtcgctgctctctccctcctccaagtgtgcaagttagctcgccataccaggcagctgctgctgatagataggggaggggtggtgattcaagactatatctccgacacttttcagttcctcttttagccgtacacattaaaaccaggtactgtgattgctcacctgatttttggttctcgtgacggtgcttttctgtgtgcatatagttgttaaaatttggtgttcctgttgggggaggacagacagtataggcttctattctgccaccttgctgcactcacccagccgattcttttttaactgttaggttcggggtacatgtgtaggtttgttatataggtaaacttgtatcatgggggtttggtgtatagattatttcatcacccaggtactaagcctggtacccaatagttattttttctgatcctctccctcctgctacccttcacccactggtaggccccattgtctattgttcccctctttgtgtcccggtgctctcatcatttagctcctacttataagtgagaacaagcagtatttggttttctgttcctgcattgtttcctaaggatcatggcctcgagctccaaccatgttcatgcagaggacatgatctcactcttttttatggctgcatagtattccatggtgtatatgtgccacattttctttatccagttttccattgatgggcatttaagttgattccatgtctttaccattgcagatagtgctgcagtgaacatttgtattcatgtgtctttatgatagaatgatttatattcctttgggtgtataccctgtaatgagattatagggttgaattgcagtcctttttttagcttgttgaggaatcaccacactgccttcccaatggttgaactaatttgcactcccactgtgtataagcattcccttttctccacaacctcatcagcgtgtgttattttttgacttcttagtagccattctgactggtgtgagatggtatcttactgtggctttgatttgcatttctctaatgatcagtgatgttgagctttttttcatgtgcttgttggcaatgtgtatgtcttcttttgagaagtgtctgtttgtgtcctttgcccacttcttaatggggttgtttttttcttgtaaatttaagttccttgtagttgctggatattagacctttgtctgatgcatagtttgcagatattttctcccattctgtaggttgtctgtttactctgttgatagtttcttttgctgtgcagacacgctttagtttaattagatttcatttgtcaatttttgcttttgttgcagttgcttttcacattttcatcatgaaatctctgccactttctgtgtccagaatggtattgcctaggttgtcttccagcgttttaatagttttggggtttatatttaagtctttaatccatcttcagtttatttctgtatatatgtaaggaaggggtccagtttcaatgtatgtatataattagtcagttatcccagcaccatttatcgaacagggagttctttccccattgtttgtttttgtcaggtttgtctaaggtcagatggttctaggtgtacacccttatttctaggctctgtattctgttccatcggtctatgtgtttattttttataccattaccatgctttggttactgtagccctgtagtatagtttgaagtcaagtagcttgatgcctccagcttttttctttttgcttagaattgccttggcgatttgggctcttttttggttccatatgaattttaaaagttttttctagttctatgaagaatgtgattggtggttcgatagggatagtattgaatctacaaattgctttgggcagtatggccattttagcaatgttgattcttcctagccatgttcatggaatgtttttccattcattcgtgtcaccactgatttctttcagcagtgttttgtatttctccttgtagagatctttcacctccctggttagctgtattcctaggtattgcattttgttttattttattttgttttgttttggtggcagttgtgaatgggattgcattcctgatttgcctctcggcttgattgttggtatataggaatgttagtgacttttgcacattgattttgtatcctgagactttgctaaaattgtttatcagcttaaggagcttttgggctgagacgatggggttttctagatataggatcatgtcatctgcaaacagggataatttgacttcctctcttcctatttggatgccctttatttccttctcttgcctgattgccctggccagaacttccagtaccgtgttgaataggaatggtgaaagagggcatccttgtcttgtgccagttttcaaggggattgcttctagcttttgcccattcagtatgatgtagacagcaggtttgtcatagatggctctcgttattttaatatatgttacttcaatacctaatttgttaggagtttttaatatgaaaagatgttgaattttactgaaagcctctgttgagataatcgtgttatttttgtttctagttctgtttatgtgatgaatcatgtttatttgtttgcacgtatgttgaaccaaccttgcatcctagggataaagccttcttgttcgtagtggattagctttttgatgtgctgctggattcagtttgctagtatgttgttgagggtttttgcattgctgttcatcaaggatattgacccttttttttgttgttgtgtctctgccagttttgggtcaggatgatgctagcctcatagaatgaattgaggaggagttcctacttctcatttttttggggaacagtgtctgtaagaatggtatcagctcttctttatagatctggtagaatttggctgtcaatccatctgatccatggcttttatggtgtgcaggctatttatttctgattccattttagagctcattgttggtctgttcagggattcagtttcttcctggttcagtcttgggaggatatatgtggccaggaattcatccacttctagatttttagtttgtgtgcatagaagtgtttataatcgtctctgatgtttatttctctggggtcagtggtaatatcccctttgtcatttctcattatgtttatttggatcttttctcgtttcttcattaatctagcctagtggtccatatattttattatttttttcaaaaaactggctcctcacttcattggtcttttgaatggtttttcatgtctcagtctcctttagctctgattctgattatttcttgtgttctactagctttggggttggtttgctctttcttctctagttcttttagttgtgatgttaggtgcaaacttgagatcttcctaacttttcaatatgggcatttagcgctcaaaattttcctgttaacactgccttagctgtgtcccagagattctggtatgttatcattgttctcattagtttcaaagaacttactgatttctgccttaatttcattatttgcccaaaagttattcaggagcaggatgcttaatttcaatgtaaatgaatggttttgtgcaattttctttgtattgaattctgtttttattgtgctgtggtctgagagtgtggatggtatatgtattagaccattcttacattgctgtaaagaaatacctgacacggagtaatttataaagaaaagaggtttaattggctcatggttccacaggctgtaaggaagcatagtgctggcatctactcagcttctgggaaggcctcaggaaactttcaattatggcagaagggggagcgaggcatctcacatggtgggagcaggaggaagagagaggggcaagatgccacacacttttaaacaaccagatctcacgagaactctgttacaggaacagaaccaaagggacggtgctaaaccattcatgaaggatctaccccaatgatccagttcccaacattggggactacagttgaacatgagatttgggtggggacacagatccaaaccatatcagtacaattttgatttttttgaatttgcggaaatttgttttgtgtctgattgtgtggttgattttagagtatgtgccatgtggcaatgagaagaatgtatactctgttgtattctggtggggagttctgtagatgtctatcagatccatttggtccagtgttgagttcaggtcttgaatatctttgttaattttttgcctggattatctgtctaatactgtcaatggggtgttgaagtctcccacgttaccctatgggagtctaaatctctttgaagatctcttaagaacttgctttatgaatctggatgtttctgtgtttagtgcatatatatttaggatagctaggttgccttgttgaattgagtcctttactatttgtaatgcccttctttgtcttttttatctttgttggtttaaagtctattttgtctgaaattagaattgcaatccctgcttttttctgtttttcattgcttggtagcctttttccatccctttattttgagcctatgtgtgtcattgcatgagatgggtgagtgcctgcaggcaaggcggcatgaaggaggctgcagtgggggaagaatgctggtgcgtgtccactggggtcactctgctagagcactctgctagtcaggcagtctgccagtgcaggagctaccgtatgggcccgtacctgggagcttcactccaagcaggtgtggctaggctcgggctctgggagaagccagcagaccaaagggtggaccagattggccccatctcatgggcaagaccaccctgcagagttgaggtcccacagttcccctagggataaagtctcctatgggagcaagtctagcctaaggggatgggcatccttggccatgctccgctatagacactcccataccaaactctctgggctctgccccagctggagttctgcttccactgcttccctaagcagctttccctgacaactcaaatgtccatggtggtccaggggttccttcctaccaggattccagcggcctgtggggagagcgaattttgttccttgccttttcaacttccccctctgcaggagttgttgggggccaggaacaagttgtggtgcttggtagccccgagcagggtccccagcttcctcccccttcagccccagctctgtgttttccctccatctgctctcgatgccctccctctgaagatctgctaggagtgtgccagtcttcctggtgtcccagtccctcagtgggagatgttcctcctggctgtatctagttggccatcttggagcagaaatttctagttttgatttttaataaaaatgtatggaatctgttattgtgtctgcttttgtacatattagaaatttttaagtgaaaatttttctagctcataaatttaaatgtataaaggaaatatacagaaatagtagtttcggaattacaaatgattttccatttctctgaaagtcaaaaaagttacacactattttttgagaaaatgttatatgacaggtgcatgttaccatagaaacgaaagatggaaagaaccaaatcacctgagatataggggtagtttagatagaaatggagagaggggaatgtgtccccagaaggagaaaggaggaaattgatgacagttctcctgttcagcagttttacaaggacccattttaataaggtacacacatatatatacaatatgcgctggtgaatttgagtaagtatatgagcttgctacgtgaaagctaaataaagcttttttctgtagatgatgagtctttaagaatgattgttgttcttttccatattataagcaacttatacagtcttatccacgcagaacattctcaaatattaatgatttatcaaaatccagtgaatttcacatgatagttgaaacctagcaatatcttttaagtagaaaatgttctttattcacaacagttttgctccagattaaatatttcttcaaggcagtttgatttatattctctgcagtgctatgaagggaaatcctccaaagatatcctgaaaagagtagctgcaaatgcattgatgtcactgctggctgtcagtagaagagcacagaaacatgctttgaaaggtgagccacatgacacatcagctgttttgatggcattatcaattcatatgttttgttgcttgttcaagttaattttctttggactcaaaatgtaaaaaacgtatagtataatctcagtgtcactaaaaataattttttttcccatacagaagcagtaaatatgcattacttttcaaataaaaagattagacatagtttgtttttgtttgtttaatatgtgatggttcttgctctaaagaacctatatgtaaatattagggaagctaaaaggtaacacattgagtttcattataattaaatattactatccagaagcactcactgcatacctgaacaaaacccacatagttttgatggtaaaaacagcaacagatgattccatattttcgtataaatttccctcttgagtgttgtaatttctcatttgggaatcggagaatgtagatctgagaattaaaagagaataatggcaacatcaagtccattaatatcaattgtgatttgcgactacaacaaatgatgtattcctcaagttgtaaattggatttgggtagtatcttactaaaaactgaaaacaagtggacttcagcattttagttctcttacttatcccccctctgattcattaatctctgactgaaaattctaaaatgaagtgggtcagaaatagaaaatgttacctttttgagaatctgattggtatatgtggttataacttacttggaaatagaatatccttttgactactgcagattttgtctttcagccaatcttatagacaattgcatggagcagatgaaacacataaatgcacaactgaacctagattctctgaggcctgggaaagcagcattgaaaaaaaaggtaacattctgggataaatgaatggctatatatagagaccattctccagtcctcttgtgcctagaaatgagcacgagcttgaaatgagtgtctcatttagaagaaaggtacagatggataaattaatgagacttctacattagcagattgttggctttttttggtcttaattcttacttgaagatctttagacaacatctgtctattatgtactgttgttattataaacattggaaatatccacatatacatgatactatgccagataaattttttatactacaaaaagaaaatctttatctcaaaacaagcataggttaactaggaatgagatctgtaacaactataatttattaagagttttctatatgtcagccactattgaaacatttcatatttattatctcatgaacaaacactcattacagcatagtcacacaactggtaattgatggagctaatatttgccccaaatctgggtggttgcagagctggtattcctcatctctgtttatctcctcctgtgccttctgaatatctcctctagcattgaatctgctggactcatgtttaaactgcatgctcaggtaaactgaaaataacatagttatataataactactgtggttaacaagatctgccacccacttattcaacaaatgaaagtgtgtgaatagtataaatatataaatatacatatatgtgtgtaggtaaggccgttatagcagcactctatgtaataactagtttctactgcatttaagaaaccaagacaaagtcttatttaataatgtaattgatgcaggagattgattgtatgtttatcagttctttttttttttttttttgcctcttttcctccctagccaaaggcccttcatcattgagaaagtcagccaacacctgatattattgaaaatctctcagtatctgcctcactttattgagatgaaacatggaggctatcatatatccgagttcctccatgcttgatagaacagaaatagctttttcatggtgaatgtgcttcttgagatatggtcatctttcagagatcgttagcctgtcagttccctcaaagttacagtggttgggcatgattagagcacacctgcattgtcccgtgacccaaaggggagggaattactatacacaaaaagtgaagtatgctgttgcattcacagttttcaactgctttttgtttaaataggaggatggtgttattaaagagttaagcattgccatgcagctcctaagaaactgtctttatcaaaatgaggaatgtaaagtaagtagaactacttttcaaaattttaataggagtactggtattaagcagtttaatttttatgtgagataatgtagtaggaaaaatggaaagctctgacttttaaatttttagacacacagttgattggtccttaaactcagtgttaattgtcagaaatgtgtgtatctaatcattattcatcgacactgattacatttcttcgcaaacttcagcctcattctgtactcttaggtattttaaatgttttacatatggaatgaatggctggatgtgttttataaggtagattctttcaaaacgggttgtcaaaacaactcttcaaggaaataagtgaagctatctgtatctataaggaaagaaaatgaagagtttcctgcttcaaaggagaagatagttagagctgctacctagtgtggccacatccaccgagaggaagtttcttctagctctgctgactccctgtgaccatttacatggcccttctgtctaaaaatcactgagatgttttgcttcgtctgtaagcactgatgatgttttaaaccattgtatcagtactactatagaggatataatcttgtgaacactctgatttgctttgtctatagttttacaacacttttgaaatactagattgatgctttaatgcagaaatactagattattctttataaaagctggccacgaaaataaaaattttaaaaaatactaaattaaagctttaatatagaaagcaaagataaattatggaagcttttattgccttataaatttttacctgttttgctcttacttgtggtaagagcacaactggaaaaaccataccacatctggaaaatggacatgttgaacacacttactccttaagcgatgttaaaaagccagatacatgactcacaatttatatttcaaagtagtttgatggaaattaagtatttatttatacaatttattaaaattccctatatatgaatttatatgaactttttctcaagacaaaagtgccattaataaacttaatgattccttcatgcttatgatattatgcttgtgactggatgtacagtcagtatttgtgtgtaaatttaaatatataaatttcatgtgtatgtgcagttaatattcattcatgacaccttattcagggaaatactctggaatactttacatgtgggatctacctataaagatttatgaagtgctaacctggctactagttataaatattgtgctcaatttgtatcacattagccatttacaaaagtgtgatatctcaataagtcaaagcatttctgtatttctaagttgtttaataagaagtaaatccaaagaatattaagattatccttgagtataaatataatattatggaggtagggattgttaatttcaatttcagcttttatcaggtgtatggcatgttctcattattaatagttggccactattgggtaattcaccaggtcacccactgccaccccaccctgctgtttgcatatgcataacattaggggttttcatactggaaggagcatggtggctgtgaggtaaatgaattaaacagtggacaaggttagacggaggggactgtcatagtccagacaagagatgatgacaccttaacttgagcaggtagaaaggagaaggagggtagggagtaaatttgaggcattgagaagaggaggaatgtagaatgacttccaaactccagtttaagccactgcattatcatgcattaagagtgcatgatagagcagagcacaggtgtgagagacccgatattcatgcttgcacgtgctagcctcaagagtctttggggcatccaggtgaaaaatggcttgtggcctgtagattttatgggtctgggactctaaggagtgatacaagctggggatattaggagttatcaatgtgtagatggtgtttgtggtcctcactattgttgaaatttcccaagaaagtatgtaatgaaaaccaaggtcatatctttggaaaacaggaacatttaagagggggcagaaaacaactgagaagggaatactggagaaggaatttggagattgcattaggccgttcttgccttgctatgaagaaatatctgagactaggtaatttattaaagaaaagaggtttaattggctcacagttctgcagggtatagaggaagcacagtggcgtctgcttctggggaggcctcaggaaacttccaatcatgacaagaaggcaaaaggggaacaggcacatcacattactagaactggagcaagagtgagagagctggcgaggaggtaccacacacttttaaatgaccagatctcatgagatcactcactgtcttgaggaaagcaccaagccatgaggaatccgcccccaagatataaacacctcccaccaggcctcacctctagcactggggattacaattcaacatgagatttgggcagggacaaatatccagactcttatcagaaatgatccaggatagagcagcagcggggaaattaagagacatatagcaaatgccaccgtgcttaagcgttgttggcaaccacaaaagtagaagcggcctcaatagaatcatcagggcagaaaataaacggtaatgagctaaagattaaatgtgaggcagggaaattacagcaataataatgtagaagtttggtcatgaatagtggcattaataatttaggacatataagatgaaaggaaatgagtatgtttgtttctcttaacacgtaaactacttgaatacaggcacagaaatgagcaaattggggacgagttgtttaagagatagcaagaggagaactaactggtggattaagatccctgaggaggcaggaagagctgtgtttcagaacacagatggatgtatcaatctctggcaggcaagaagtggaacacctctttgtcactaccgggcagacaggaaggatgaatggatgaaaatacagataaactatgtggacagaatggcagagtagataaaggagtttgtacttaatcgtttctgtcttctctgtgaaatagtaaacaaggtcatctgctgcagatggagggccgtgtgccacagagagtggtgaacaagggaagaactttagggagagcactgggaatgacttcagtgcttacggagagtgttgaacattgggaatcacttctcttctgccacttgatgctatgtgaaatcgtatagggtgtgtgtatttatgtgcatgctcacgtgcataatcatgggtctacaaattacctcggaattcttgttcatttaaaatagatattgctgcacttaaacagctatattttatctgcaatattgtcccagggtaactgatctttgtaataaagactctgagttacttcagaatttttcaatttatcataatatttagactgaattttatatattcaaattactcaaaaactgtaatttactttgagtatatacacacatacacagagagagagaaggagagggagagagggtgggcaaagaggactcagagttgatcagaatgtttacttaaccagaaattctcacttcttggccagttcatagcatttacaggaatttattcagtgttgtgagatatcactttgctgtttaatttacatgttacacaggctattttctatgcttcctaacttagtggtacatcttaaccaccctggtgttgaagcgacgtcctgagattggtcaggctcgtggtcagggcagccatgtgtggagcccaatggggctggggcaggatgctgaagccatccacagggttctccttgggtcttatgttgatggctttctgttgttgttttgattttaatgttatattttcatatattcagactaatgctgtctttttcccttccttcaacaggaagcagctcttgaagctcaccttgtccctgtcttgcactctctctggccttggattttgatggatgattcattgatgcaaatttctctgcagctcctttgtgtctatactgcaaattttccaaatggtaataggatccaatactgcctttcaataatataccaaaatactagttttataaatgttgttaaggtggactggaaaaactaatacatattttgaagtatttctctgatttattgaggatatgatgggcaaaggcaagctttctcgtaggtattatgagagcagacagatattttagtgtgtttgttgacatgagagagtcattggcagcgcagggaatagagagggaggactggtctgattatctggcaatgggaaattgagtttagtaggaaaattgagaggataaaaattatgatgtaagacctcaaaagccacgtgaaggttagaacttctcatagattctagagcaggagactggcatgttgaaagttctcataacagttggtctggtgatacttgatatcactagggctcctctttcgctcatgcacttgatagacactttatcaagagcctgtggtgggccatgcattgtgagttctggtgagagtgatctgaaatgagataggaggacaggtcatgtagggcctcagaggccagagtagggagtttggatttttatgtgagtgtaacaggatgacattggcagttgtaagctggtgagtggcatgatttaatttgtgtttaagaaggattaggctgggtgcagtggctcatgcctgtaatgccagcactttgggagacccaggcaggcggatcacttgaagtctggagtttgagactagcctggcaaacatgaggaaaccctgtctctactaaaaacacaaaaattagccaggcatgatggtgcatgcctgtagttccagctactcaggaggctgaagcaggagaatcacttgaacccaggaagcggaggttacagtgagccgagatcacgccactatactccagcctgggcaacagagtgagactctgtctcacaaagaaaagaaaagaaaaattgccctgggtggtatgtggagaatgaatgattgggagcaagtctagaagcagggagacttgtcatggagatataatggtggcttgggcttgagtggtagctggagagattgagagaagtagacagattcagtatatagctcaaaggtagagtcaaggatacctgttgtgggaggtaggaaggaaaaaaaggtgtccggggtgaacttcatttggagaaatgagcctgagtgcacagtagtgccatttactaaaatggggaagatttaaaagaagcagacttgaagtgagaaagtagtaggaatcaagagttctgtttggtcttgttaagtctaaggtgttgatgttcactcaagtgaaaatagtaagctggagttgaattcaatggagtgtagagataagtttgaagatttcaaatgttgggaatattattagttatttattgctacaaaagaaattactctaaaatttagcatctgcaaacattaatcatttcattatgccacggcttctgtggctcaggaatctgggcgtggctaatctgggtggtcctcgctcagagtctctgcaatcatctgaagtcttgactgggatagaggatccagtgtgactatgggagcctcaattccttgctacttagggctgtctcaaacgacccagaatgagtgggctgagggcagaagttatagtctcttataatccagtctcagaagtaactgaacagcactcctagctcttgtgggtcacacataccaaccctggtacagaggcaggcgccactgggaccatcttggaggctggctaccacaggagtcattgtcatgtagattgtacttaaagccacgtggctgtttgcgattacccagggagaatgtgtagatggagaagcagaaacccatgaccaagttctgaggcacatcaacatttggagttaatcaaaagatgagaaaccagcagaaaaaaaagagaaggagcagccaatgagataacagtgcacagtcacagaaagtcagagaagggcatgctcagttgtgtggaatgctattgaaaattctgctaaagtgaggatagaaaaaatggctgttggacttagcagtattgatgttcttttggaccttgagggtaattttagtgcagtgccagaacagaaacctacttagtgtgagctgaggagagaagatgaagaagtagaggagacagcttttccaaaatgtactactcttaagaggacaaagaaatggagcaacagcaagagacagatgtggagtcaaaggaggagtttttgctcgtttttaaagatgtatgtttttaaggcatgtttattaacttaagggattgggagaatgaggtgcaggaaagagtgcaggtaagagcccagcctgagagggtaagagaggtgagagctagagcacagctgacaacagaagcggagggaaggctgagaggaaggatgtggatttaggagggctggtagacttgatgggaatgatgagaaaattcccattttgaatacttctgctttcttcatttaggagagaacactgaccactaagaatgagcaaagacaaggagtagaggtgatgtgagaagaggagaaagtgtgaagtagctgtttttagaggaaggaaagtaaacacaccagagaagcaaagtaggattgctggcagtgttaagtaccacttatggtcataaatttaagaaaataaattagaatttatggtcataatttatggtcataaatttaagatttaaattttattaaatttatggtcataaatttaagatttgactagcaagtttttgtactttcttctaacaacactcagtagcccagcaactggggtctctgaatatcaaaggttatacagagaagggactggaactcacaacagttaaggagcccatctagttactgccagatgctgttgatggcttattcctttgaataatctgccagatgctgatgatggcttattcctttgaataatctgacacctctggagctgtccatttcgatacccaactcaggttgtctccagtcagcacaaagagatataaacagaccttcaagctcttgaacttgaactgtcattgaagcatatgtgtacaggattgtccttgccttcattctgtgctgttaactttctccattccttaggtctggtgggaatgtctcctttcagtgcattttccagctccactagtatatcttttgtttgtttactcatcttttatgagtttcttttacagaatgtatttgattctgatcagtttatacttaagttggcctcctcgtatgaactttcacaagtcaattataccttaggtttatgtataatacagtcttattgatttaacattaaaatatatttctaatttttttttctccctcaataagtctcattcagttacttaatttcctgagaaacactgaaccctggaaagcctgtagatgccacttttggctcctgctatgctaagctgtatgaccttgaacaacaaactggcttttctgagctccatatctttgttgaccaaatatagaaaatagtatttgttttgtccgctttcccagggatattatgttccttatttgtatgttatgtaaaatgaaggcattagacaagttatctcccatttctaaaattctgttcctttacacaggcctttatttagatgttttctttagcaactattaaaaaccctagtatgtttattttattctttttttaaaaataaacctggtgtcttaaagtgctttagtgagataattaggccctcagtgaggacagtatatctattaggttgactgtagacaccaacattagcctccattgctaatttgcagttcacaggttaatggcctagtcattttgttagacagatatgctttgccacttagtgtcttcaaaaactaaacagggaaactgagaagacattgtgataggctgttatttttgaaggttgcagttctctttgttggtcaagttgtggacaacaccctgttcaagctacacatagaggagccgtgagcaactctctgatgctgtgtatcctaaagttggcttcccagatgccactggagaacaccacggttcagcagatggtttttatgcttctttcaaacctggccttgtcgcatgactgtaaaggagtaattcagaaggtacgcacttaaactccccacatatcttaaaagggtactcagtgaaataatctttccaatcaaaagtttacaactcaatttctaagattattatgattttgaggcattttattttaaaggattataaaagggttaagaggttcactttgtttaaagccagttgatagatgacacgtgcagaaggacaggagctagagtagagtcataccatttccttctcatttatcttcttagctttcggattgtattttatcattctcaaagatgagggttttagaaagatagccgtcttacatttattggaaataataaaagtaatatattggtctttaaacagaccaaattgggcagtaacaatttcagtttaatttcattgacaaaatggtttatgaaatcacagcccacttcccccagttagacttaacttccttatggcatgttaagcaattttatgagttctctaggattccagttcccaatctagacttctcatcactgattttaacttaaggtaatttaaaagggatgtaatgagttaaataaattctagtacacatgtgcacttatattctgtatttagatgtgtataaacagaatccctaattgggaaaatcccttcaaatttgaatgtaatcagattatatactacttactagtattgtaatttgagtgtttccatttcttttacttgaaggccaagataaattgcagaagttgagagcatttataagaattgagtctccttttcctctactgtttcttctccctgaactcctcagaagatactttgttatcaccacataaatagaaagttcggtctttctaaggaaatggaaagatcaatcttaccaaggaaagatgttttcagtggcacgttggagccagcctcctactgactcatgagtgtcatcttaaatttgcaggaattttataaaaattccagttgatgttacattgttattttgaaatcagccacagtgggcatatcacaccacgtaattcagcgaactgtacaaatcttggatcttttctaccctcaccacaatcagttgtttatttaccagcacatggctggatattttcttcatgtatatgttcatgtatgtcatatatgtatatatatttgaatatattttcttcatatatgtattcatatacatgcatcacttccaaaatgagacattctcttgaactggatatatgtgattagcatccataagaatgagagattctgcatatgtgagagcagagcgggggcagtgctttccaccacttccttatagagcatgttggtgggaagctaagtgggagcacccagaaggaatgtaagtgccaatctcgagtctggtctgtgactttgagctggagacctattctctttcagcttcatttgggtttaacaaaataatctctaagatatgttcaactcttaatctgttattctggtgctatacttaagaatattttgatgaagtgtgatcagactctctttccagggacggattaatcaagtctttttcctctgctctaattaggaaatgcctgagacttcctctgctgcattaagtaataatgagcccagacacttaacacttctacttcttcattactcatctgtaggacatagaaaatgcagcaggtggtattgtacaactcaggctccgaaatatcctgcttgtttgtttttttttctaccatggtatacatctctacatattctacctggtgtaggaaattgtctgaaaacatctttagaagcagcaaaaaaaaaaaaaaaaaaaaaaaaaaggagtgcccacagcacatttatatttgagagcactgacatctgctttatcacccttgtcagtcccaaatccagcaagggttgaatctaaaaactgtcagtttggctgacagtaggtgtgagtgacagcacatgcagctgaaagtgggcatgtaattttacagtttacttattgtgtgggtaatgttgataatatttctgtagctcatttcattcttaacactcagagtccttttgtataaaaacgttaagtttattttatagattaaagccaacatcttgattttggtctaggaaaacctaagagataaactggagtagatttaaacagagagagagaagagttattctgtgcaatcataaaagttaagtgattgcatttcatttctaaaatgtccacctaactgtggtttccatgctgccatgggctgcagcttgatgcagcacttttatactttgcatatagattagtctaagcaataatttattatctttcttatagtgaagggtttggtggggttttttggaaggggctttatttggaggttgaaaagactcttacagttcaaataatagagctttctcatctgtaagcataatagaatgacgtgtagccatcagaaattcttacttgtaatgataagtacctgggataaagtgaatgtaagatgtatctatagatttgataaaaacaacaacaacacctgtagctataatgattcaaaataccctcactacttccagagttgttaactagtattcaagactgatttggatttttgccttttttccttccatagggtagcttttaatagcaaaatcaccagaaggcagagagaagagaaaactcaagagccctgaaataatctccaaacttaattaccaattctaaataattaagagttaactatagtatacttcatccatcatgaggaaataattagcaggaattaaaacttgagcactattttgttcttcttacctttttcacttatgcttggaaataatatagatggaatattcagaagctattagaaaggagaaattaatgtagagggagagtatatcagaatgttagttaattggtcaccaagggactaggaaaataatgaaaaagatgagaagaaaataatattctctctatttatccacagagtaacttcttacagaacttcctctctctagcattgccaaaaggaggaaataaacatctaagtaatctgactattctttggttgaagttactcctgaatatatcatctggagaagatgggcaacaaatgattctgaggcttgatggctgtctagacttactaacagagatgagcaaatacaagcacaagagcagccctttattgcctcttcttatctttcataatgtttgcttcagtcctgcaaataaacccaagatcctggctaatggtaagttttcacacacacatacatttatatatgtagttattcatagactgttcaggtcaacaccaaataattttataaataattttctaggcatttattaagcacccactgtgttcaaagcactgtggaaggcatgggaatgaatcaggcatggcttcagccttccgtgggcttccaggagtctcctgaggttagcaaatcatgtcattccagtgcacatactggacacctggaggaaggggagccgtggacgagggctccctggccttaccttctgctccctctcctctctccttgctcttcctctaactccagctcccctcttctgcatcttcaagcaaatgctactatgtcaatgaagcctctcgggaaccatgtgttaatataatagccccgcacccagggggccttctctttcctcctcctcactatttcctttcctggttttgtttccctccgtagtattatcgccatctgatagattatgtgtttcatgtatctgtctattcctagtcttcccacactagaaggtaagctcttatggggtcaggaggcttttgtctgctttgtttatgtgtagcacctagaattgtgcctgcaactagcgagcactcaataaatatttgatgattgagagagatcccaagcagaccggagagagttcagggcttgagatcagatggtgcagtgagcctcgcagagacttcattctctgagatgtaggacagatggaggcgaggattggtaaggattcagaaaaaaattgaagcaaaaagaatcggaaagatctttttctgcaaccatgtgttatctctgtgaggagtatgtgaatttcgtggggagtgagttttataaaagacatgtgttctagtgaaaaacagaaggtgggctccagacccctacacacctggtcttgaatgccagcactagggcatcactccagcgtcgcctggtgcagcctcgctgggcccagcttcttcatctataaaagaagcccactcttcttggtttggtaagaatcagtttataaacacacataaagtgcctagcgctatttctggtacatgataaatgtttaagatagattcattctcttgtttttttcatgtttttcacttaaacttttctcagaagcatttttctgtgaaatcaagggttttctaagtgtacgaaaatgattcttcttatattttgtggtgtatatagttgtgattctatttttctgataagcattctgataatcaactgctagatatgatatagaaggatgtttaaagttcagttagcttgtagcagacctaaccttactgtggattttgcactctgccttccggtggctgctgtgctgatgctgcgttctctgttgctgcgtgatgtacatcactggttttatttccatcctctcccactgtagctgcttcagccctcacatttgtaaaatgagggtgatgataatccctcctcagggcaatgagagagcctgtgaagtgtttgtgaccattcttggtatatagcagctactcagtaacatctgttattgtttattcacctttcttagaatgattttttttttctttgagggctacttactccagtttattattgagagttggaaaaaggtcaagctttttgagaagtgaaggagagaagtctgcattttccacttctagacccctctagaattatttttagcatttctttgtagtcagcaatgctttttctccttcattagcttaaagcagatggataaactttggtgagaagcttcccctagcccacagactagagatcagtgggcttttcaggcaggggtaagataagagacatcagctgtgcagtttctgtgtggaactataaagggatgtcacagcctatgcctcgctttccacttggggatttatggaggaggccttagcagagtcagccagcttaaaagtctcccaggaaaggctgcctctgatcggtagcacccacacatctggtttaaatggtcaggagtggagtgtgcagtggagcttgaccttgctggtaaaaatagatctggggcttggcatggtggctcacaactgtaatcccagtactttgggagaccgtggtgggtggatcatttgaggtcaagagtttgagatcagtctggccaacatggtgaaaccccgcctctactaaaaatacaaaaattagccaggcatggtggcgggcaccttgtagtccccagtagtagaattgcttgaactggggagacggaggttgcagtgagccaagatcgcgccactgcactccagcctgggcaacagagtgagacttcatctccaaaaaaaaaaaaagatctggaacattccttgtttctggcaatgccagactaagtctcttctgaaaacgacaataacatgctagacaggctgtattaaaatgcacctcaaaataatcacaaaaactgaaaagatagaaactcccagtccagttttgattgaaagtcttgcccagacaagtaagaagtatatagaaaattattttgccccaagtgcatttgccaaggttgtatgcttggcttttgttgaggagtatcgaggggtgagaggacagaagccgcgattccccaaagtggggattcttactggctatcctgcttgtattaagctggacctccaaagaaccattctcttaatagatggatgggtcaaaaataagttggtttcccaaacttcatgaaggagactgtaaagaaaaggaaaaaaaaaatgtgagaatgggtactacagactgcttctgatagggctctgcacccaaagttggccgtgaacttggcttgaggtgtcttcgattgatggtgcctgtgggtacttagcagaaagcaaactgccttggtgatggatgaaagacaagttcatactgggcctcagggaacctctacaaataatttttcaaaagcattaaccagtacaaagttagagataatcaagcacattaggagacatggcaacatgtagtaagaaacagcagaagaataaaaataccagcttatctgcccagactttgaatatgggaattacaaagcatgggtttaaaaataactttaattataccatatttagataaataaatgacaagcttgaaaattttaggaaatgggaaactgacaagttgaaatatttgaaaagaaccaaacagaacttcaagaactttactgtgcagtatgataatcagccacatgtagctatttaaatttaaactaattaaaattattcagttgtactcactacatgtggctagtggctatcttattaaatagcaagatataaatatttccattattgtaggaagttctgttttacaacagtaatctagaacttcagtggccaaaattgaaaacttaatatacatgtctgacagcaagttaggtatagcagagaacttaggaattagaagatagattagaaaaatattatccagaatgcagcagagaaagctaaaaagatgagaaaggatcaaaagaatcaaaggtaagtgacacagcagatatatcaagacagtctttgtgtttaatgaagtgtcctaggagaatgggagaggaaatatttgaagaaatgatgggtaaaaactttaagaacttttctaagacattaatgtcaccataactgacaactcactgtaattaccaaactgacatccctaaacttatacttaaaccaattgtattaagaaggtaatattcaattattatattaaggtaacattcaattattatattaaggtaatattcagttcaaatattcaaaaatactgtctcattatttacattttactactgtatattcactttaggttatttaaatgtttatatgagagttcagacctacttgttgaactcaaaattgttttattgctttgttatatgcatgtttcacaataacatttgttttgttaaaaaagtcgatccacttgcattatcagaggggcccaccacattaattcacacacacacacacacacacagacacacacacacacacacatatgtatatatacatacacacacagtactttattaaaaatgctttaagggatagctggttgaaggagttataaacttacttagatcagaggagttatatattctgagtgtttgagacaacatttaaaaacatcacttgatgctactcagatggaacataaggaagtcaccctcccatttaataaggggacatttgatgtgccctaatgagtagcacttgcagccataacctcacgtgataaattgcatctgcaagctatgtacatggcttggttctgggtaggttatgatacacgacaaccaaagggcatcagatagtgcagatgaggtgttcagggagtcggctgcagcgtgcccgaaacatcactgcacctgcctttcacattgtcctgatgcacatttccagttcactttagggagcagctttttttgttttgtttttgttaaatatttaaaatcccttaaaataaaaaaattgaattatgtagacaaaatttttgtttattctattctggaatctttcacacaacgaatatttattgagctcctaaaatacactagcattgtggttggtctaataccagtgagtagacactgccatctaactaataccagtgagcagacgttgccctgtaactaataccagtgagcagacactgccttctaaccagtaccagtgagcagacgctgccctgtaactaataccagtgagcagacgctgccctctaaccagtaccagtgagcagacactgtgctgtaactaataccagtgagcagatgctgccctctaaccaataccagtgagcagacgctgccctctaaccaataccagtgagcagacgctgccctctatctaacaccagtgagcagacgctgccctgtaaccaataccagtgagcagacactgccctgtaaccaataccagtgagcagatgctgccctgtaaccaataccagtgagcagacgctgccctctaaccaataccaggagcagacgctgccctctatctaacaccagtgagcagacgctgccctctaaccaataccagtgagcagacactgccttctaaccagtaccagtgagcagacgctgccctgtaactaataccagtgagcagatgctgccctctaaccagtaccagtgaacagacactgtgctgtaactaataccagtgagcagatgctgccctctaaccaataccagtgagcagaccctgccctctaaccaataccagtgagcagacgctgccctctgtctaacaccagtgagcagacgctgccctgtaaccaataccagtgagcagatgctgccctgtaaccaataccagtgagcagacgctgccctgtaaccaataccagtgagcagacgctgccctgtaaccaataccagtgagcagacgctgccctctaaccaataccagtgagcagacgctgccctgtaaccaataccagtgagcagacgctgccttctaaccaataccaggagcagacgctaccctctatctaacaccagtgagcagacgctgccctctaaccaataccagtgagcagacactgccctctaaccagtaccagtgagcagatgctacactcacagaccctgccttgaaccttttcctattttagtacccttatttatttatcttgcctgattgccctggccagaagttccaatactgtgttgaacaggagtggtaagaaatggcatccttgtcttgtgccagttttcaaagggaatgtttccagcttttgcccattcagtgtgatattggctgtgggtttgtcataaatagctcttattattttgagatatgttgcatcaatacctagtttattgagagtttttagcatgaaagggtgttgaatttttttgaaggcctttctgcatctgttgagataatcatgtggtttttgtcgttggctctgtttatgtgatagattacttttattgatttgtgtatgttgaaccagccttgcatcccagggatgaaacggacttgatcttggtgaataagctttttgacgtgctgctggattcagtttgccagtattttattgaggatttttgcatcgatgttcatcggggatattggcctgaaatttcctttttttgtgtgtgtctctgccaggtttttgtatcaggatgatgctggcctcataaaatgagttagagaggattccctctttttctattgattggaatagtttcagaaggaatggtaccagctccactttgtatgcctggtagaattcggctgtgaattcatctggtcccgggctttttttggttggtaggctattaattactgcctcaatttcagaacttgttattgatctattcagggattcgacttcttcctagtttagtcttgggagggtgtatgtgtccaggaattcatccatttcttctagattttctagtttatttgcatagaggtgtttataatattctctgatggtagtttggatttctgtgggatcagtgctgatctcccctttatcattttttattgtgtctatttgattcttctctcttttcttctttattagtcaggctagtggtctatctattttgttaatcttttccaaaaaccagctccgggattcattgattttttgaagggtttttcgtgtctctctctccttcagttctgctctgatcttagttatttcttgtcttctgtaagcttttgaatttgtttgctgttgcttctctagttcttttaattgtgatgttagggtgttgattttagatctttccccctttcacctgtgagcattttgtgctataaatttccctctaaacactgctttagctgtgtcccagagattctggtatattgtgtctttgctctctttggtttcaaagaactaatttatttctgccttaattgtgttatttactcagtagtcattcaggagcaagttgttcagtttccatgtagttgtgtggttttgagtgagtttcttaatcctgagttctaatttgattgcattgtgctgtgagagactgtttgttatgatttcaggtctttggcatttgctgaggagtgttttacttccaagtatgtggtcagttttagaataagtgcgatgtggtgctgagaagaatgtatactctgttgatttggggtggagtgttctgtagatgtctgttaggtccacttggctcagagttgagttcaagtcctgaatatccttgttaattttctgtcttgttgatgtgtctaatattgacagtggggtgttgaagtctcccatgattattgtgtgcgagtctaagtctctttgtaggtctctaagaacttgctttatgaatctgggtgctcctgtattgggtgcatatatatttaggatagttagttctatttgttgcattgatccctttatcattatgtaatgcccttctttttcttttttgatctttgttggtttaaagtcttttttatcagaggctaagattgccacctctgctttttttttctcccctgcttgccatttgcttagtaaatcttcctccatccctttattttgagcctatgtgtgtctttgcacgagatgggtctcctgaatacagcacaccgatgggtcttgacgcttcatccaatttgccagtctgtgtcttttaattgtggcatttagcccgtttacatttaaggttaatattgttacatgtgaatttgatcctgtcattatgatgctagctggttgttttgcccattagttgatgcagtttcttcatagtgtcaatgttctttacaatttgatatgtttttgcagtggctggtacaggtttttcctttccatatttagtgcttccttcaggagctcttgtaaggtagggctgctggtgacaaaatctctcagcatttgcttttctgtaaaggattttatttatttttcacttatgaagcttagtatggctggatatgaatttctgggttgaaaattattttcttgggccatacgcagtggctctcacctgtaatcccagccttttgggaggccaaggtgggcggaccatgagatccagagtctgagaccagcctggcccatatggtaaaaccccgtctctaataaaaatacaaaaaaattagccaggtgtggtggtgcccacctgtcgtcccagctactcaggaggccgagacagaagaattgcttaaacctggtaggcggaggttgcagtgagccgagatctcaccactgcactccaaacctgggagacagagcaagactgcatccccctccccaacaaaaaaagaaaagataaattctttaagaatgttgaatattggcccccagtctcttttggcttataggatttctgcagagagatctgctgttagcctgatgggcttcccttggtgggtaacccgacctttctctctggctgcccttaacattttttccttcatttcaaccttggtgaatctgatgattatgtgtcttggggttgctcttctcgaggagtatctttgtggtgttctctgtatttcctgaatttgaatgttggcctgtcttgctaggttggggaagttctcttgcatttaatatcctgaagagtattttccaacttggttccatttttccccatcactctcaggtacaccagtcaaacataggttgcttcttttcacacagtcccatatttcttggatgctttgttcattccttttcttttttttttttctctaatcttgtcttcacgctttatttcgttaagttgatcttcaatctctgacatcctttcttctgcttgatcgatttcgctattgatacttgtgtatgcttcacgaagttctcatgctatgtttttcagctcccatcaggtcatttatgttcttctttaaactggttattctagttagcatttcctgtaaccttttatcaaggttcttagcttccttgcattgggttagaacatgcttctttagcttggaggagtttgttattacccaccttctgaagcctgcttctgtcacttcgtcaaactcattctccatccaattttgttcccttgctggtgaggagttgtgatcctttggaagagaagagttattctggttttgggaattttcatcctttttgcactgggttttcctcattttcgtggatttatctacctttggtttttgatgttggtgaccattggatggggtttttgtgtggatgtccttttggttgatgttgatgctattcctttctgtttgttagttttcttcctaacgggcctctctgctgcaggtctttgggagttggctggaggtccactcctgcccctgtttgcctgggtatcaccagcagaggctacagaagagcaaagattgctgcctgctccttcctctggaagcttcatcccagagggcaccccccagatgccagctagagctctcctgtatgatgtgtctgtcaacacctgttgggaggtgtctcccagtcaggaggcacgagcgtcagggacccacttgaggaggcagtctgtccgttagcagagctcgagcactgtgctgggaggtccactgctctcttcagagacagcaggcaggaacatttaagtctgctgaagctgcacccacagccgccctttcccccaggtgctctgtcccagggagatgggagttttatctataagcccctgactgggcctgctgcctttctttcagagatggcctgcccagagaggaggaatctagagaggcagtttgggtacaacgtctttgctgagctgtggtgggctctgcccagtttgaacttcccagtgccttcgtttgcactgtgaagggaaacaggctacttaagcctcattaatggtggacacccctctccccaccaagctcgagcatcccaggtcgacttcagactgctgtgcaggcagtgagaattttaagccagtggatcttagtttgctgggctccatgggtatgggatctgttgagctaggccacttggcaccctggcttcagccccctttccaggggactgaacaactctgtctcactggcattccaggcactactgaggtatgaaaaatctcctgcagctggctcggtgactgcccaaatggctgcccagctttgtgcttgaaaccctgggccctggtggtgtaggcacccaagggaatctcctggtctgtgggttgcaaagaccatgggaaaagcgtagtatctgggccggaatgcaccgttcctcagggcacagtttctcagagcttcccttggctaagggagggagctcccccaccccttgtgattcctgggtgaggcgacaccccaccctgctttggctcgccctccatgggctgcacccgttgtctaaccagctccagtgagatgagctgggtacctcagttggaaatgcagaaatcacccgccttctgcattgatctcactggaagctgcagaccggagcttcctattgagccatcttgccagccaccctagtcatttttaaaaaacatcaagcagtgtgatatttgatgatcgtttttgtatagtagctcatgctactgatgtgtttgtatgatagtctttataatttatcatgaaagcagatctgtttttctgcctgccagaatgttagctgtaattgagtaactcattaatgtacctaattgtatacttatttttacacacttgtggtctttaaatgaatgtgccttttcttgaattctggccaaaaaatgaagcagcttcagtgtctttgacccttctatgcctgacatgaaaacaatgttttgaggttgtcctcccatataccacatggcataaaagattggttttgccatagtctagtgataccaactttatgtatgcattctaatgggaaaagaggggggtgtctgactagtccaagataagaatacaatgcagtgtctgggactgaacttttaaaaaatatatgttcatttttagaaaaagtcattactgtgcttgctgcctgtctggaaagtgagaatcaaaatgctcagaggattggagcagctgccctttgggctctgatttacaattatcagaaggtcagttttaaaaatcattgttacacctggggagcaaacaacaaggtataacccaggtataaactcttaggatacatccaaaggtgtcaagagttacagcaaaagaaaaaagacaaaatcaaagatccatgttccctttgctgattcatacaattagtaaaccatcagttgaaatctttttatttaatcatttcaacagaatgtctcagtttagaagagaatctctgaactgactttttcctcttaatttaaattgatttactttattattgcaattttagtatagattgtttcttctaaaagacgtatcaagggaaaacacatcttaaagtaaaactgagtaacaaaagttttatccaattgtacaattcccctttatctagctcagttcttgtacgactgcagcccaaagcctgctctgagaaaagggcaggcaacgtggagatttgtgttctactctttctctggcctttggacttccactttattgcagacatgttgttcccaagagaaatacccataagtatctagtgattaagtagtagccaagtgacagtgttaggatagacagccatcctagaatggtgttctctcagctgactgtctctgccggggctagttttctccctgctggccagagtcacgtacacaaggacaagagggtgttgttttctttctcacctgggtatccccagagcttagcacaggatttggcactttgtagtcactctgtaaatatttgttgaccaactgctaatatttggtatatgtgatcagaaatctgaggtttgagggagtatgaaaaactgaaaccaaggatgactagtttaaaatagcaaattgagattaggggagaaggagtaaaagagaagggaagaaagaaaatgggaatagagaaagaatcaagttagataagaggatatgggcaagacttcagaatgtgcaaggggattggctcaataggatgtattatgctaagatggaactctctagttatattattatatttcataatattctgtttaatactgtagttagcaatgggcagaattagtgttttgctatcatgatccataacacatggcaagaaacctaattaatggattgttctaggcaaaaacagctttgaaaagcccatcagtaaaaagaagagtggatgaagcatactccttagcaaagaaaagtaagttgcaataagaaagagattatagttaaactcagaagctattaagtggattttctgattaatgagatatttggacaggccacagcaaaatggcattgtaaaatgtgccaatattcagtatgtgctttaattatatcattttttaaaataataaaatagatagatgaaggtttaagatgtgattgcttctaaaaatgcatctgtgatcttcgtcttatttttgtactaaattttctttgccaacagtgaccactgtgctgaagtatgttcttagtgataagaactggcccaattagaattaactgtgagcagaaaacctggatctaacatcagggagctggaggacagtcttccaagaattgatcctgttacccttatatccacgtttccctgtgatgtggtcacaatactagagacggttttcttttcaaagcacattattcatttttagtgacaccaaatttcagtgagcgttattctctgaacattttttatgctaaaacactgaattgtgtctttcctgtactgtaatatatctgttggttatttgtgtttttatagtctgatttttttttttaagcaggggaggttttagtttgttttagctgcgaccatgaatttctggagctagtgaagttaaagattatgctttaggaaggatggtacataaaaaaagattaatggcattcatttggaattatagttaatggtatccattatggggggtactttttaaaaaatactctgggtaagctgttaatttaaaaaaatattgattttgtaacttgtttattttttaaaaaatgcaaaatattctggaatgctattacatcaagaacttagagctttaaattatatataaatcctgttcatatgtatttgtttatgtgtgtgcctcctaagtatagtaccaagtttcataaactagtatttctgtactcttatttttctatctcagctttcccaaactcagaagcaaaccctctaaatgcctattatttgaaatgtcttgaaaacctcgtgcagctccttaattcttcctgagtgccatgggatgctacaccttgaagctgacagtcatcaacaggggagctaaagttgaagccagctgtgtgtagcagctgttacctgaagacgtgctacctctctacaaagtgttgatccccttctttcccatgagagagagaactggtgatactccaacaccgtccagttgtggcagctct

SEQ ID NO: 15784 - DNA, 39293 bp, Homo sapiens
attaattgtggctggacgcagtggcgcggcagtttaattctccggcggctgcagattgacgggacgagatggtcctggcagggctcatcaggaaactcggtaactgtcagcttgcccctcgcccaaggcaccccccgcgctctggccacttgctgagaatggtcgtgtcacgtttccgcggccggccgctccgcgaccgctccctctttcacccccgctttgtcaggatagcccccggggacccatctcggactttgtgtaaacttcgcggttcgcgtcccgaaggcaccagtggcctgcttctgaaaaaaactggtttattccgtcttcacgccgctcctgcccacagcataaataacgtagtctctttgcagtcgggaaataaaatagttttgtgccgttcgttgacaggtcatcagctggccgagatcagggagcgcgctctcaagagtattctctgcaagattgagcacaacttaatctgctacgctgatctcattcaggagaggcaactttttcttcatttgctggaatggttcaatttcccgtccgttccgatgaaggaagaggttctgaacctgttaagcagattggttaaggtagggtcattttgaaataaagaaaataatcagacgagtgacttgtttcttagtcatttaattgtagcgtttattgaaagttaaataattggggttaaaagtttttttaatcaaccagagatgtttaattttaattaatctgggtatatggttcatcttttatttgtgatactgaatcccacatggtctctgctgtgctcagaagtaacacagaacttcttttgagttttggtatgttctgtgtttttgagttatctttggaggttaatatttgtattctgtttttgttttctgacatttacatcttaaaaactagatatgtcagtatgaaagggagcactttaaaaataatgttacataaccgtgattcataaataccaatgttaagttgcttgcccatatgcttttagattggtattcttatgcctacctcaagagtagttagttatcggggtcagatatcaaagtgtaagtttaacctttcaaaactaaatcactgtacaatggtagaggaatcttaaactactttgacatcctgttgaccggttggggctgggaccataaggtgagtgtcagtggaaaaaagtaacccattaaaaaaataagagtagggattgataatgtgcatttctagcgttcagtgtgttggctcatctttcataaatgttatcaagtgttggatgtatgtctctataggtgtatgtgctcctcatggaagtgccttacttcggggcagagccatgaaggatttgtttttcagaaaaggaacatctgatataccaaaaataattttatgttttgattgctgtaagttatagagattttgatacagttattctcaagatcatcctcttcttattttagtatcccccagcagtccaacatttggttgacgttggtgcagtagagttcttatctaagcttcggtctaatgtggagccaaatctgcaggctgaaattgatggcattctggatggactttttcttcttccttcggaagttcctgcactatcttctgcctcataccaaaccaatcaaactggtaactctttggaatctgttaaatacaaatatattaattctaatggtaaattttaaggaaagggagattagatttttttaaaaaggatttctcccacctcccccaaacttatttttcttgtgttaacttacatgattttgacctttttcccctcctctactgttagtcaaaggatggtacatttgcattaattgctttttgggtcaggcctaaacgatgccagtgactttgcttttatgaggccagtttgacagattatttttttggcaataacaatgtatttttattgagcacatgagtgctcattgttcttagtgctttatatttgtatttttgaccttgttcgtcatattggagtataatgatatctgtcctagctcatgatcttgttgtggggaccaatcaaaacgacataatgcaagtatttttatatgctgcagtccatcatgatatacttgttaaaatccaagtcaaagagacatggatttaagtctcagttctgctgctagttgtgtgaccttggctaaggtaattaacccttccaggcttcagttttctcattcaaaaactgggataataagaaagaacaccgggctgggcatggtggctcacgcctgtaatcccggcactttgggaagccgaggcaggtggtcagaagttcaagaccagcctgaccaacatggtgccccgtcactactaaaaatacaatacaaaaattagccggacatagtggcgggcgcctgtaatcccagctagtagggaggctgaggcaggagaatcacttgaacccggggggcggaggttgcaacggtgagctgagatcactccattgcactccagcctgggtgacagagcaagactccatctcgaaaaaaaaaaaagaacactttctcatagaatcgtcatgagattagatgagacaatgtctgtaaagtgcttagcacagggcccagcatgtatgaaatgtggctgtgttggctgctgtgctgctgctgttgtgttgttgttaatgcctagtatagtgccttgcacatggaatgcatttgaattgatttgaagaaaaacatcttcatgcaatttatgtgactgagtagtaaaagtaaaaaaaaaaaaaaaaagttttgatgcttaacctgttagaccatattttcttctctgccagtactgttacagcttcagctgtgggtactgcggttcacaacaacaatagcagctgtcatttattgagttttgttgtgggcattgaatacattgatttaaacacatcatcttgttaaatcttaaagcagccttttgactgagatgttattagtcttactctatagctgagaataaaagtataaagtaacttgccccacagtaccaagttttctaacctgtagcagatgcaggattctaacattgctttatctggctcccaaacctgtgatttttaacaatatattttacagtttcgaagacatcacaaataaagtagagtcttacactgtgaatttttaatctgattccttgcgggtgaaagtagaggaatggtttagggctaaatgttatttttctttattagtgttaggaactattgccatgaaaacttaaaattacaaactatagttttagccttttcctcattttcattgcagctgaactgctgaacatataatcgcatgttatagggaattgtaaaggtattgaaagataatatttgactcctttgtttttgacaactttctttttaaggtatgaatgaaaattgaagtgatcaggaactatataattggagtcaagggagagggagatggattaggaagtagagagggatagtccttgaatactttgtagcagattcttcgtgtacattctaacaaataactgtgtttggctaacagtaaaagtgagagggaaaaagcttcttaactggaagtgggctcaatgtgcacattttttcctctttagcaagatagatcattcagaaaaaaaactggacttttttttaatttttaaaatgattccaatacttaagagaaaacattaccacttaaagaaagtaagtttcacttttagcaaataaggaatcgacaatacagtaatgtttatttccttttcagaattgtcaaaaaaccctgaaatcttaacaggatattttccccaagacaaaagtaatttccagcagatggaagtgccgccacgaccagtgggtgtgtatatgtcgggaagtaaatcctgttgacttgggaagttgaaaattaatgtacttttttcgttattgtgaagatgtatttttaccaaacttgaatgtttcagcaccaaactatcattaaatgttttagttgtttcaagttagtttaggatatcgagtagaaatgataaaattttgtgttattctaaccatatttgaacaactgtgtagatggatggtattaatggcagtagtatgtcgtactgaatgaacatgagtttttttttttttttttttttttttttgagatggagtctcgctctgtcgcccaggctggagtgcagtggtgggatctcggctcactgcaagctccgcctcccgggttcacgccattctcctgcctcagcctcccaagtagctgggactacaggcgcccgccactacgcccagctaattttttgtatttttagtagagacggggtttcaccgttttttttttagccgggatggtctcgatctcctgacctcgtgatccgcccgcctcggcctcccaaagtgctgggattacaggcgtgagccaccgcgcccggccgaacatgagttttttgaggcattgtgccctgcactacacatgtcatctcatttgttctccagcttaacgatggcaccatctatccagttacgccagccagaggctgaagatcattttagtttcttttcccatttcctcaccacccagttaattaaaaagttctgatttagaaccctgtttctggaatctggaatctcatctccatctttttgtatctggctgtgttcagcctcagctcacatgccacctcatcagagaccttcctggtgattctagccagtgatcacttcctatgtgtagttttcttcctaacacattattttttattatttttgttttaagtttgataatagccgtgaacattgcattattttcagtgtctggaacaataccaaaaaatgtattaggcactcagtatatattctttgaaggaatgaatgaatcctcctggagtgtctttgagattggtattattagtgaccacattttactaataaagacactgagattagaaaggttgaaaactttgtccttggtgaggcagttaggaagtagttaagtaatcacgtacttaccattttcttgcctgcacagttaagttgaaaaggatatgttcaagagtatatctgctgatgtcacatattcaaatgaactccatttggaagcctctgttattaaaaagctttcatggaaactcacaggtggaataacaagaaagaactgaaaacttgttaagccattagaatactttaccttttcattcattgttaggcttgtagcaagctttgtttttgaggccagatggctgagaggcttaattccatcaagatgagagacatctgaagggagggggaatctctagggttggtaaaggatgggtgtctgaatgaagccgatgaaaacattaagggggattgagattgttacacttttatgtgagttgcagtttgtcttgattgagggtctggcttattttggacacatttttactgtgtggtgtaagcctgtccttccctccacccacctctccttatttccttagaaagtaaatcctgcttttatgttagcaattttgaaagaagtaactgtgctatgtttgggaatttaataatactgctatccacatttagcgattccatgctcttttcaaagcacttggcagaaagactgccatttggaaggacttatgtagatgctatttctcagtgttgccaccttaacttgtactatataagatctgttaaaaataacttgcatggggatagtttaaaactgttgctttctcagatttcttttaatcttgttcgaacactgatacttgttttttgaccttacggtcttcaagtcatcttcgcagaggtttaaaacacctgacaccatataggatatttgaacatggctagatatggtatatcattatgttttatcatttttaattttgaaaagttaaggttttccctaaatgtcagttccttttatgttgaatttaagtttgatgttctggtcagccacagggtaaaatagaaaatttaatggaaacttcatatgtcagtctgtattggattgtgtttaatgctcttcttctaatacttattttgatatcatatgagttctgtttaaattatgaaaagagaactctcttatttatcctgtgatagaacaaatttgcagctgaccttgtttggtatattttaggttactgtaagatgcagcctttattttgggacttgttttaaagggaaaacttactcttaacattgtgaatctgtcatctctttattctttgataccataagatttgctctttcactgacagtaaatcagactgtgaagtgcttgaagttttctacatttccttggctacccctgaccaccacagacagacatgtcctctcctctaatgaaaggtacggtgcttgatgtattttcaggtatttttgttcacttatagtcattaagtttgatagttattacaatatgttttaccaggaaaagatactagtggcagtgaaaggtagtaatggtcatatttaaatgatttttatttttcaaaaagctagccagaaaaaaattcctatttgcttttaatcaatctacacatcaagtttcttttatttatttatttatttatttttgagacagagtctcactctgtcacccgggctggagtgcaatggcaccatctggctcaatgcaacctccgcctcctgggttcaagcgattcttgtgccacagcctcctgagtagctggaattacaggcacgcaccaccacgctgagctaatttttgtatttttagtagagatggggtttccccacgttggccaagctggtcttcaactcttaatctcaagtgatccgcccctcttggcctctcaaagtgctgagattccaggtgtgagccactgcatttggcccacgtttctttttgtggttggactcttgtgtagtccttggtgacaggagttttctcttattggccagattctcttattggccattgcttatgcccttgattgataaaaatggaaaattgaacataaatgtagtctttttggcagaatatatttcaaaatgtgggcttcattaggagacaaattaaaccatgtggataaggttgggtaccactgatccaatctaatgtaatgactgttaattgattgctacccacaagagtaaatagctgatatatagagatttagagagtattttaatgtccagattcactttgtgcagtttcataaatgccacaatacacgagttatctgcttttttggggtataaatctggaaaataaagaccaatttactagggctaagtccagattacaggtggatgccattaagtgatttttaataatgacatgaattctcttggaacaacatattcgagaggcaaagtgcacatgggaaagggttaggaggttgtatgatctctcagttttgagtcagtcccaaaggcagagatggcgataatttctaatgcatgcctgtagatagtgaatggtggatagtataatggaactgggctgagagaaggggtgtgatttttttggggtggggagtgaacaactgccaatcctaggtgggcagaagttgataggtgtcctctgtatgggataagaggggagtcctaatctgattcaccttgagtggggaagatcagtaaggactttaattcttagaatttgcctctgtacttttgttctgtctcatttcttaatttatttggcagatttcctagaattgtgtgctctttgacctcattgaactcgttttgcagacttgtgataatctctgagggtacagtgtttagtatgatgtcgttcctgctcttgagagggtctagtggggaatgcaaaatcaacaggcagttaacaatatcacaaataatggacaaacggaaggagcactgccctagagttgtttattggttagggaaaagatctaggaaggcttttctggagaagtgatatctcagctgagacccaaaagattgttaatggagtcattgtgtcagtaggctacttagaatctggaatagatgaactcttcttaaaaatgattaacgctatgttttgtagctctttaagaagtagtaaccacactttaatctggaacacctgtgaactattgaaggatgttatcatgcaagattttcctgctgagattttccttcaaaggccaaaaattgttcaggtcagtgccctctataattgttttagattttgaactagagaactttttgcaataaagcaaattttgcagagtaggagttcttgggaaggaactttgtactcatgtttttaaaaagtgaagtatttggctatttaaagcacttattcgctaacttgggtggatagttatagttcttccaatagtagtagtttcatttgacacttgcagtccagtctggccaccttgagttaccatttatggatcacctaaatggtagagtagactttggacattgagattgtgcaggagcccttattaaaagtaagaatagcattgcttcttgagtatctcgtttatttaacgcacagtgctacatgctgggaaaatacagtagcggtgagtaacgcagatggattcttttctttttttctagtttattgcttgtatagtagagagagagggatccagggtggggaattgcaacatcttcacagcagccagtaatggctcagcattctcgctccacactcccagggctgaaatggactccagtgggtgccaactgttaatacctaggatcaaagctggcaaatgatcgcagaggaaagctgttaattactaaaatgtggttaaatggtttagatgcttgagatgaaaagggcttgctgtgatttttaaaatgttctctgtaatgtaatgtcctgagtggggaataatttctgtcttctctcagaatggttactcaactaacagattttagaaataggaaacactgactattctatttaaatgttgttgtcttattttattttgacccatctccttgctttatgccaagtcatatttgcccatttcagtttcttatgtcttacaaatatttggcaacttattttctcttgattattcacttaggcttacttacttaagctccacattctgctttgaagttgagctctttgttcccttagtaattttcacggctcttcttgatttcagagccttttatctctgttgaaactggcctttggagatggaaagcatcgcctggcattacagtcggtgtcctgcctgcagcagctgtgcatgtatttaagaaacagacttaactttcaccgagatccaggttttttctccaataaacacggtatttatttttatctgttcattagccactggtgttatttgtagattcttctgggaaccttccattatagttactgttagggtttattgtgtacgcattttcacaacataaactccccactcctaaatgtattcaaatgattatctttacagattgcgtgaatgacagaaactgccatgatctcttgagcctttttttttttttctggataagagatatttacaaggtgtttttcttttttctcccaaacttgcagagattctatatagtgttgttgggatgtagtgactcggatatttggtatggctattcatgtaggactttggacaatttagcaagttacatatagtgttaatacattgttttgtttgaaaaatattgatttgaattttatgaagagtatttttatgcaacttgcaatgtagtcaagtgttgcagcaatgtgagacttcagagaaaaagtgccacctaatggccaaatagagtaccagcctggcttcgacaaaaccagtaccatttaggatttttgtgagcttaatgcaacctgcatcgaaagtcaaatattatagtcatttgtcatcatgtttcatagttaatccctatttcattgggagtttcactgatcctgtgctacttgaatatttatgctttaccttggttttattctagatcttagagggtatggcattgtacaaatgactggtaatagagaacgtctgggtaccccatacttcaacagaaaaagagttacaatgttgatttaaaaagttgatatctctgaagaattgttaatgtatttaataagtatgtatttattacctgttttatgcccctgatattctagcctctagggaagtataacactgaacaaacgaataagatccaagcccttatgagcttctattttaaaaggctgggcacaggtgataaacaatcaagtttgcttgagataaggagaagtacttgaaggaaataaaaagggtgatgtgacagaatgtggttgggtaaacatagcttcatttaggatagtcagggaaagtccctcagaaagcttctattttaaaaggctggggacaggtgataaacaatcaagtttgcttgagataaggagaagtacttgaaggaaataaaaagggtgatgtgacacaacgtggttgggtaaacatagcttcatttaggatagtcagagaaagtccctcagaggaggtgacctgaagggtgacaaggaatcgtcactcgaagagctgcaagaagagtgttccagggaaggccaggcctcaaggttagcactgagggtgatgtccttgagcaactgaaataaagcccatgagagtggactgcagtgagctgggcagaagaggagaatgaggtgacatcagagaggtagttaggggccagagtatattggggcttgcagatctttttaaagattttatattttctttgaagtgtagtgagaagctcttggagagttttttttccccctctctctgactgtaaatgcttttattacctaattctttttttaaattggggtaaaataggtataatataaaatatgccattataaacatttttaagtatacaatatagtgacattaataacattcacattgttgtgcagccatcaccactatctgtttctaaacctcttcattatctgaaacagaaactctaatcattaagcagtgattcctcatttttcctttccccaaagctggtaaactctaatttactttctgtctctgattttgtctattctaggtacctcatctaagaggaatcatacagtatttgtccttttgtgtctggtttatttgtaatgttttcaagcttcatccacattgtagcttgtatcagaacttcattcctttatatggctgaataatattcctttgcatgtatatcccacattttattcatctatgcatttgtcgatggacatgtgggttgtacccacatttggcggttgtgaataatgcttcagtgaacattggcatgcaagtatctgtgcagtgcctggtttcaattcttttgggtaatacccagtgaataatagtgaaattgctgcgtcatatggaaattctatctttagctttttgaagaatcaccaaactattttccacagcagctgtaccatttacatttctatcagcaatatataaagcttccagtttttccacatcatcactgacttgttcatttttttcttttttaaaaataatcgtagtcatcctagtagatgtgaagtggtatctcatggttttgatttgcatttctctaaagacctaataattaatgaccaatgaatctctaataactttttatgtgcttattgtttgttcatgtatcttctttggagaaatgtttattaaagttctttgcccattttaaaaattggactggtttctttattgctgggttttaggttacttatatattctgaaaattaaacccttatcagatatatggtttgccaatatttcctcccactctataagttatcttaacactttcttgtaatgttcccttggtgtaccaaagttttagattttgatgaagtccagcttatctgtctgttccttggttgtttgtgctttcgatgtcatagttaacaatcgattgccaaattcaaggtcatgaagatttattttttccgctaagagctttatggctttagcttttatatttaggttgttgatccactttgaattaatttttatgtacagtatgaggtagccattcttggagagttttaagcagacgagtgcatgatctagtgtttttctgctttggtagtctctaatgttgtaactgaatgccattgactagaaggtcccatgtaatcaagtcagttagatataaacctaaatgtactaagtgaatacttatagaaaagtttgatctttgcttttgtttttacccctgtagaaggattcctactatcttaatttgttaatgtttttggaagaatgatacataaataccacatagtcagaagtctgtttctactaaagaataattttattttttctttgtttccccagacacagtttcccaaaattcttctttgtcttattgtcatgaagcaagaggtactcatcattcccagaatccttccccaggaagcagcagccctcggccttctgtggttgggcgcacaggccagcgacccagaggagatggccaggactgggatgcagcgtcctctaggtgactgctagcagtgtctctggggaaatgagaaatgccggttaacttgtgtgtgtgttaatttcagaaggagataattatttttctgtccttttttttttttttttttttgaaacattaacacaggtataggccttgtgttaaaccctggcttcatactttttttgaccatgatccacggtaaggacagataaatattacatcgcaactcagtgctcagtacttgaacatatgctctgtttatgtatatatatgtgtgtgtatgtgtcccccaaaacaaaatgttcacataatagtattctgatactatgtttgacacactgaactatattttcagttccgatttcattagaaaagaaatgattctgacccaataaattgtttttaccagctgcaaacggaatatgatcaagtttaaaagaatagctttaaatgatagatacattgttgatagtattttacacatatttttgtaagtcttataacaaatggataagtgtttactgttaaaaggaatggttggagaattttataaaataaggactccttcaaggtgaacaatttatggtatttgtttgtgtaaatacagatttttttcttttttttttttttttttttgagacaaggtctcactctcttgcctaggctggagtgcagtggcacgattatagccttgacttctgggctcaagtgatcctttcgcctcagcctcctgagtggctgggaccacagatgtgcactaccatacttggctaagccttttattttttgtagagatggggtctcactatgtttcccaggctggtctcgaactcctgggctcaagtgatcttcccatcttggcctcgtaaagtgctgagattacagacatgagtcaccatgcttggcccccagtgcttggcacccagattttcatacaccaactctgcttaaaaggattggtgtggtatttgtatgttaccttatccttgggtgcaaatgtgttagaaacatattagtctctttagtgtcattctaaaaaatgttcactaagttaagcattggtctgttggcttaattattttcttgcaatactgctactactgttaacaagctaatactgattcatacctgctgtgtgtatggtgttatgccctgtgctttgcatactttgtctcctttagttgtcctagaataggattgatattatatatagcattagtattattattatcatcctcattgaggtttagagaggttaagagcataacagttggtaaagagcagagctagggttaaataaaatgataggagagtctatgctcttagtccttatattgtagttggttgttcagccatgtttttctctttctcctgaagcctttctgcctcattctcttgtgtgcttcatgcttctaagttttcactcctgagtgaacagcttcctcactgaaacttcctttcagagttacagagaagcccgagttgtttccatattttggggtgcttggtatcttgaaattgaagaaacgacaaagttggtttataatttgggcaaatttaaatgttccatagcattaatatgtctcttgtgatccagcttcggttgtggataacatcaaaagacaaaattttgaggctctttgtaagtgtgaggctctagcctttctacactttttaaatccttactccagcactttacatccgaggtaagaactttttaatgaagaaagccaaggacaatgggatgttccgtttttttgggtgcatttttgaagtcactacatgatgtcgaatgtactaagtgaagtaatacatttcccatgaggtttttctagaaacatccttcatttactaacactggcttactcagaacagtggtgaaactcagaaaatctaggaaacggtatgaactattggttttgtctctacacgttgattacagaagagctttcctataaatctgcttatttccttttggaaatgaatgggttatcagtgctaatattgattcctactataggaatgttgacatgttttgagatatcagcctgacaagcaaaatatagatgcatttttggcttcatttacaatttagagtctttttttttttttgagatggagtcttgctctgtcgcccaggctggagtgcagtgtcgctatctcagctcactgcaacgtctacctcctgggctcagaagattctcccgcctcagcctccccagtagctgggattacaggtgtgtgccaccatgcccagcgaatttttttttttgtatttttagtagaggtgggatttcaccatgttggccaggctggtcttgaactcctgacctcaggtgatctgcccgccttggcctcccaaagtgctgggatgacaggcatgagccaccactcctggccttgagtcatctttatggaatttaatttcgtaaatttgtcaaagtttctacaaatctgaccagagttgaatgaagcagtagagttgtgacttgtatgaggcttctaatatgcgaggcagcagatatgcagtaaatctgtttggggattgtttctgtatgcaaggtttatcatttgtttatcttgcagtggaagtagtagtcatgctcatgtaaactccaggatatccgttcattcacctttggatatgggacacatagatctgccagagctggaaactgaagacacattggaactacaattccagcagctcagtcttccccagttttgtgtctccattctggaatcagctgttcctctcttaagaacaggttagttgttttagaaatcgtaattctgatataatttgtgtctgttttgtatttcgttaggattttcctttttttctcttctatgttagggcctttggaatctgtatttacttatcttttgggatataaatttctaaaaacctaataaggtctttattatttttaaattaaatgtggatgccttggagggctattcagcttgcccttccattttatgagtttttattggcacaggctttcatgcttattttttttttagaatttttatctattttttgcatttattcttgctgtcatctatttttttcttttttttttggactgtatggctattttaaatttgagcagtgacaacattcagcaactggaataaggtataaaaggtggactggcatgaatagaccagaataaaaaaatctttggcttttgctctttggaaactttttgattagctgtcagttgtttactcttcccattcatttcttgctacttaagccacttaacatgttaaaaacaaaactccaaaactggattcttacctttgtagtaatttttcttaaaaaagccacaaatattttgagatcccatttttgttcagatgtactaggaaaatttgaagaggttgactgaaatatacactggtatttaattgtaattgtactgaacaatggtaacagcaataacaatatgacagaggtctgctgagtctagtaatgaaacaacagttagcacgtgtccctactgggttctgccttcatacttggttttgtgtgcattatttcgtgtatttttcatatcaacccattttgttttttcactggtagttaactaattttatctccatttttacaaatgatgaagctgagtttttgagtggtttagaaacttgcctgaagtcaaacggctaaaagcagggacttgaaccacgattcttttgaatctaaagtccatgcttttaaatactttagcattttgcaaggtgtaaagaaagttttagaaagaaaacagtcatgatttttattctcaaaatctatacattttcaacgtttgataaactcatcaggatataaataagataaccaagttttgccctttttactttatactggcaaagtaaaaatatatattccaagttaatggttctttaagtcccatgtctattttttgccacttggaggtgatggaggagaaagaagcaggaaggtatatatttggaaaacatttaaaatgtttttatcctgaggaaaactgtgtactcatactttttactcagtaagtgcttctactagctggaactatatattaattcatatactaataatgtgaaatgaagaaagatctgaactttggcatcataaagtacatatgtttatctgtctggtaagctgagaagaacagtcttagactttaatgattttgcatttaacctttccttaatttgctttaaaaagtcagattgataattataaagctatatcttggtacataaaaactaaatgttctcctgcccttttgtggtaaattatggcatgatttgtaactgttcaatatcgtaagagatttgtaagagaatttggtccagctcttctagtgaaaaaattaatctagatccttccaatctggtagtttgttttactttgattcattagaacttaacctttgggatgcggggtgggaaagtctcgtgtgaatgttcgtctcacacaggataatggaagtggagtctttgttattctgtctctgtggagaaaggaggttgctctggtgggtgtgactttgggaagtttttttgagtttaaggtgagtacaaatagtttctttagcaaatgttagcatgttcatttattcctttagttgctccagtccaagcttagcttcccaggcaactcctgtgtgggaaaatactaatttatgagaaggctcacgccttctagtactaagtagaaattattggaatacgttttctaaacctttctggtgctttgtcacatattacgtgtaaaatggatggtccctaaattcgaaaaattattttaatctatctcacagtacttgttagattattgctactttcaatatcttttccaattataaatgtatttgatttgttatgtagtaaagtagtactgtgactggaacagaagccttcagtgtgattgtaaattgtgatttctctacagttctaagaacattagaaaaaaagagaaaatgttggagcatgactaactagaaaattgagcaatatgatattcagctgattattttaaagttaagtaacttcttctcctttacttttttctgtttgtattcctaggtagcagacaagtgataataagagttctggaattgcttacagaggatatgacacttattggtgaagcaatttcaacagatatctgggatgacagcagcctttttggtatagatatggtaagaatcaatgttttctttgggatatagggaatagtattttttaagattttggttcttttaagccggtttcattgtctcattcgtgttcaaaatcttttttctttttgactcaatatgtcccaggcttatgttataaatagcctggaacaggcctatttttccaaaggttctggttacttctaatagtggaacgtatattaagaccaaaaccaggccattagaggtggttatagctactgtgatatcattcttttctttcaggaacaattaggaaatacgtatttttaaagatcgtgagtttattgctatttttcttattttaaatttgtatttcttatccttgcgcttgtagaaagtcttcgttcctagcaatatcagcataattgcttattagctttgaccttaaacatacataagatagtttcagaacagcaatattaacattgctatgaacaattctaatgaaaagttcaagatttcctggcagttctttttgagatagactaatctcactaaggatatacagtcaaaatactgtgccttaaagctaccgttacccattcagcatacagttagatttttttttgtttgttttcactattgggaattgttttttcttcataaaaatgtagctcagagatgcctctctcccatccagttacctttaagatgttttccttattggtagtcatttttattttctggctatttttttctatttttattttatttttgcaaatgtaagcaactaagtatgtagattcttatcctctccccatcctgcataaaaggtggtatattatagacactgttttgcaccctgtttttataacttaaaaatacgtcttatgtgcatagaatagtaggtatgaggattattccctatctatctatacgtgagattttctcgttcttttttataggtagcaaatgcttcgttgtgtatttgttaacctagtctcttgatggatattattgttaatataaattatgtacaaagaataatgggcttatgctatttcataaatgtgcaggtatgtctctagggtagatttatttaagtgggcatgctgtttttctaaaaaacttttatttagcttcagcggtacgtgtgcaggtttgttatgtaggtaaactgtgtcatgggggtttggtgtacagattattttgtcacccaggtaataagcctagtacccgataggtaatttttgtggtcctcctcccactctctgccgtcgagtaatccctggtgtctgttattcccctctttgggtccatgtgttctcattgtttagctcccacttataagtgagaatatgtgtatttggttttctgtttctggattagtttgcataggataatggcctccagctccatccatgttgccgcaaaggatatgatctcatgcatttttatggctgcatagtattcattggtgtgtatgtaccacattttccttaatcagtctcccattgataggcatttaggttgattccatgtctttgctattgtgaatagtgcagcagtgaacatacacatgtatgtgtctttatggtagaatggcctcaagtgatctgcctgccttggtctccgaaagtgctagaattacaggtgcgagccaccgcgcccggctgagccatgttgtttatgtagtagtacagcagttcctcacttggcatcatagataggttttcggaaactgtgactttaagcaaactgacttataacaaacccagttattttttctcatcagcatttagtgaaatggcatggaacttgtaatgctgtttcattaaagtcagtttccaagaacctgttgaccaagttaagtgaaggcttactgtagtttattcattttatttctgagtagtattacattgtgtggacataccacaatttgtttatccattcacctgttggtggacaatggggttgtttctagttattacaaataacattcctatggacattccagttgttccacatcttcaacatctattatgttcagttttttttttttttttgggggggagagggcattctgatagatgtgcaatggtatcttagtgggttttaatttgcatttccctagtgactgatgattatgagcatcttttgtaatttttagagagcaagtctaggtttttttttaaaaaaacacttattcttaagtattcttttcaatgccattgtgaatgaaaattttaaaagtttttggattgctcattgttagtatatagaaatacaattgatttttgtgtattgatcgtctatttggtggccttgctgaacttactagttctggtagttttttttgttttgttttgttttctggtagatcccttaggattttctatctataaaatcttgttatctgtgaataaaaacagttttaagatcatcttatctgtgaataaagacagttttatttctttctattcactctggatacctttaatttttttaaattgcctaattgccctggctagaagccttagtataatgttggatggatgtggtgagagccttcttcatgatttagagggaagcattcgatctttcaccattaaatacaagattagctctagtacatttgtattttgtagatgcctttataaagttgaggaagttccatgtattcttagtttgttgaaagttttgatcatgaatgattattgtattttgccaaatcttttgtctctattgagatgatcatttagctttttgaagagcagaaaaacttaattttgatgaggttcagtttcttagtttttcttttatggatcatgcttttgatattttatctaagaaatctttgcctaacttggaatacaaagagtgtttcctatgctttcttttagaattattacatatgttttaggttttatatctttgattaattttgagttgatttttgtatctagcacaaggtaaggaatgaacttttttttttatgggtatacaattattttctcagcactatttgttcaaatgactgtcctttctttcctgaattccttaccaactaactatatgtgggtttacttctggaatctatttgatcggttttctcttatgatgccaatacccaactgacttaattattgtagcttatagtgaaggcttatagttagctatagtgaagcttattgtaagtcttgaaataaggtagtataagtccttcaactttgttcttgttttttttttctgatatgtagtcctcgctctgttgcccaggctggagtgcagtggcgccatctcggatcactgtaagctccacctcccaggttcacgccattctcctgcctcagcctcccaagtagctgggactacaggcgcccgccaccacacacacacacacacacacacacacacacacacacacacaaaaaaaaaaaaaacctgctgtggttttgaatggaattgagttgaatttgtagatcaattcaggaaaaattgacatcttaatagtattgaatcttctgatccatgaataccatatatatgtcttcacttgtttagctcattatttatttttatttttattttttttaacatggaatctcattctgtcacccagactggagtgcagtggcatgatcttggctcactgcactgtccgcctcccgggttcaagtgactgtcactacagcttcagcctcccaagtagctgagattacaggcatgtgcccagctaatttttttgtatttttagtagagacagggtttcaccatgttggccaggctggtctcgaactcctgacctcaggtgatctgcctgcctcggcctcccagagtgctgggactacaggcatgagccactgtgcccagccttatttagctctttaatttgtctctgcattgttttgaagttgtcagtgtataggtcttatacatttgagtatttcagttttgggtcttgtccactggctgacttttctctttatggatcttaatatttgatatgtgtagtaatttctgattggatgctggaccttttcaatgttaccatgttgagtgtcttgattttttattttacccttttagaagcactttgggagggttctgaagcactttgggaggccagcatgggagcattacttgaagccaggagcttgagatgaacctgggcaacaaagtaagatcttgtctcttcaaaaattagtaacattagctgggcatgtaggtgcatacctatagtcccagctatttggaaagctgaggcaggaggatcactcgaacccagaagtttgaggctgacaggtggttatgttacttgtagagcagtttcattttctcaagactttaaaaaattttgctagaatgggtctaaaatagtggttttcaactggggggtaattttgcttcccagaggatgtttggcaacgtcgggagccatttttgattgtcacacctggagtggtgctgctggcttctagtagatagaagccagaacagctcaccacaacaaagaatgttttagctcaagatgtcagaaaaccttgaggaagtgttaaggttgagaaaccctgatctagaagaacctttgcttggggttaaactctgctcctgagatgtgatcctttgggacctctattgaatgtccaaagtgatgattgatgactgtctactctgcctggttgaagactgagttttattgtcttgtgtgagccctgggagttgttcaatttaaatctcagtaatcatctttggcctgtatttacagagtatctacctataatctaagccacctaatctcagcatggtctgggtggaaacttgtttaggtctctgaaattctttctttgcatagctctcccacaattcctaaccatgtcagcttccacaggcatcttcatctcctaaagtcatcgagactgtcagactctttggatttctcttgcctgtgtttgctgtacagtaattgttttcaggtatagtaggactctcattgcttattttccttctctctggcatcacagtcctgcaatgacactatgccactttctagttgatttctggggaaggacaggagatgtccttgttattatttcatggccagaattggaagttttacgtaaagtttttaattatgtcatttaagcaactggcctatctgtgagttattaggagcttaaatgtacatttatctagagtgaaaattctggatcaactttagaataatcattcaaagtgtggagagttcaggataccttgttttttgctgtttgtatttcagtagagtagataattttagaaaatatggaattaaattttgttttttttgtaagaagtgttttgataagtaatattttgcatgagtaatcaacatgtgtacagtagtagccttaagaatgttatattacaacataatatttaagagatctatggaataccagagtatgtctccatgtaactggaaaacatatcttttttaacatttcaaaatatcataaatcatttgtcatttaatatctttcattttgaaattgtcatctgataaccttgccttccttgaagatttggcattctatctcttctgttaatgtgaattcctaatgtctggtcttccttcctctccctttcttccttcccctctcccttcctcccttcccttttgctgccttgtcagggcagtagaatcaaaatttattagtcataaaaatatatattgactcttacgtttatcagttttttttctctttatgctattttgatgtaagtcggtctatatttaattaaacattgttacaggctgtctgaaatccttgtgaatagaggtctgaatataaaaaaataaattacagatatttacataataacaatacccatgtaagaaagaaacccaaacttttatttttttcataacacgagcctcttaaaaagagaaacaaactgcatattttaaaatgggtgtattttcaagtctttcattttctgataatagttctgaatcttggtttttctttagtccttaaggttatcacactattttgtagtacttttaggagatttttcacatattgaagattttcaacaagtaaatttttcctttgaagtgtgaggaatgctttatcagttgtttcttaaattaacttaaattttcttggccagaacatttatctgtaaaagttagtcattcacttttaacttttggctgctggtactttatgattcaatgaattatttttactttaaaggttaattctgttgtacaagtgccagttggtatgttacaaatgctaaataaaacagaagtacttcaaattatatttgatttacttttacttgtttaaaaagaataaatgtctcttttctttggctatattttaaaagaagcaaacaagtaaaatttcttaatgttcatacttttgccagttttcaaaagaaagacggaagcagtatttttgttgagtcattaaaggaacaaaataataaatgttgctatcaatttagaaattaagtacctgaggatatataatcaaatctctaggtatttccacacagtactaatatcagtaacatcaatcatgtctggaaccctgtaactcagcatggaagggaatttcaatttccccccttaattgaatatttttatattactcgaagtaaataaaagaaaaaatattttcaccaaaattagttatgctgacctaaagtatgtcatatgtcattccccctagtcctccatcatcaaatcaggtctattttttccctatttacatgctaagtcaggttcaagatgcaaggagaaagtagctttcacctcctgccagataacctagactcttaggtctatattctgtttcttttccgcatttcttctgtgtcattcctgtcattgcagtcattggaaagcagtcttttcatctttatgactcattgcttctaaattcccatctgacctgctgtgaactggtaacttcaacatcaaggcatgttggtagaattgtagaatgttggtaggacttcaagaggggctaagaggattgtgaaagaaactaaagatctttgtatccagtaagggctcattaaggatatttggaccagattgtgaattgataactggtgtagtgggatctctaattacatagaccttccctgctgctgccaccattccaaagacagttattttaactcacatttcttgattgcccgttattaatatatgctaggcacttgggatatcaaataagatgtagtgctttttatgcctatgggtgatagatacttttaatatgacattagtaaaatagagataagcataaaggaataacacgtaaactaagatagtttaaatatagcacttactgtatgtcagacactaagcactatttatgaggtcatttaattatcatgaccctgcaaactccataactgaggcacagtttatttttcagggtcacttgtggttttgtatttatagccattatgttttattgccaatggtgctttgaaaacactatgaactatgaacttgggatgtcagtgagggctttttttttttttttttctcttccccagactcagagtctcactctgttgtccaggctggagggcagtggcgtgatcttgactcactgcaacctccgcctcctggattgaagcaattttcgtgcctcagcctcccaagtagctgggattacaggcatgtaccaccactcctggctaatttttgtatttttagcagagactgggttttgccagattggccaggctggtctcaaactcctgggctcaaggcaccactcctggctaatttttgtatttttagcagagactgggttttgccatgttggccaagctggtctcaaactcctgggctcaagtgatcctcctgccttggcctcccaaagtgctgggattagaggcatgagccaccgtgcccggcctcagtgagggctttttgtagatctgaatgaactgagttttaaattataggtaggatttggccaagcaaataaaatagcattttttttttttaatctggcggagcgtgagaatgaaccatgagccatgacaaagaggcatggatagttctgatcggagataaaggataggcctggtagtagatggaacacaagcacctagaccatgaaatgtgaggtgcaaatagtggagagagactggtgggataaatgagggtctgctggtaggggtcttttggcatgatgctgagtagtcctgcctttcctctgaaggcatgatgagattgcttttaatcagagaagtgccttgtgagactggcaggaggaaccgtgactggctgcagtgtggaaggtccattggaagcatgtgaggggcagagcctgctgcagtttcttactccaggtgccttgtagaatccacaacccattgtatattgcagaggtagtgtgtaagttgtgtttacactataaaatctgttttattggtaatatttaagacattttgctaacctggtatttcaattttgtaccttctgttgtaaaaactatgagtatcctgtgaggacgggtcttttcccccaccgtcaactcctttagggttgttgcttaaacatctttagcccaaagaattaaaaaatgtgggccagttactattgtttttcaatcctttcctacaaaacaaaacaaaacaatacaaaaagccattttttttatgcttagaagaaatgttggaaatagaactgtaaaactcattcctaaagtattttctttttatgatattttgagaagtactcaattcatcattagaattagcaagattattttaaacaatttcacaagtaaatagacttgaataatagagatgttgttcctagtactgttttcatggagaaatactgtatggaggaattaattgcctgtcaatataataagactgtcactgtatttccaatttgttttctctagaccagtagttgtttgtatgagggcgttttactttttctgttttaattttgtaaggattgttctactttcggtttaaatatttattgctttttagttttatttcttggggatcagagaaatatagccttaaatatacactgaagttttctttgtggtaaagtatgtttaaagttaatttttgtcagtgtttcttggaaacttaaggagaagttatattctttgcagtgttcaaagtttatgtctattaattttaattatgttcaaaaagactgagttaaaatttataagtccatatcaataacatgttttgttgatgtcctgttttattcagatcacagactcatttttattgagtctttattgttaaacatgtcatcagtagaaaattactctaatttattttgccctaaattattcactattcatattgcttagaatttttgttttaattctactactcattgaacttttaaccttttattcacaaagtttttttagaattttattttctttttttacttataatcccatgacagttaaggatttatatataaatttttaatttttgttttttacttcaatatgaaattgtttcatttataggaaaatttaaactttttatagtatagttatgcttggtctactctcaaaagtttttgccttgttttgcttatgtagatcattttgtcttccttttacttctgcagtgacattgttgtacaaccattatcattatctatgcaactttttcatcatctcaaatggaatctctgtacccattaaacaataacccctcattctgcctatccccagctcctggtacctcatataagtggaatctatatttgtctttttgtatctggcttattttacttttgtatttggcttattttattttatgttttaaaggttcacccatgttgtagcatgtatcagaatttaattccttttgaatgctcaacacccttttctttttttctttgagacagagtcttgctctgtcgccaaggcctgagagcagtggtgtgatcttggctcactgcaacctctgcctcctgggttcaagttcaatcctgctgggattacaggcgtgagccatcgcgtccggcctccttttcttgcatgtatatacaacataccacattttgtttctgcatttattggtcagtggccactttcattgtttccaccttttggctgttgtgaatagtgctgctgttaacctgggtgtgtatacatctcttttggagaccctgctttcagttcttttgggtatattcccagaagtggaatttgctggatcatatgataattctgtgtttttttgaggaactgcccattatattttccacagtggctgcaccattttacattcccaccagcaatgcacaaggcttccattttttccatattcttgccaacgacttgtgctttttgggcctcataccttttagttgttccctgtatagtcatccttgaattgaagaaattctggtatattagatttttgttcttagtttgcaggtatttctcattcttcttttcatatgttttcaatggaaaattgaaagttaagtacttcagttttttttttctttcttactgagggtgtccttttacccgctagtttatgggggcatatcagtatatctgggatatactttgtctatattgatgtgacttacaagacagtctactatgcatagattcttcttcatatttaatgtataccttttagtttaaaagatatgatttctcttgaagtagtaaattatttaaatttatgatggcataacattttccacttgaaaccttattatctaaagagagtttataaaatttgatatttaattgttttttaattatttgactttccttgatgcatttctttagaaatgttggtatcaatttgaggacagagatcatcatgtctcttgtactaatgcattgttctttcattatgcctgccactgtgttaggcgtatagtaagcataagaaatacttgacgaggggtttgcgtgttaacgttccaaattggaacaattaggcactagaaactaggaggaaattatggttcatttaccttttatattctattgtttgtatttattcattgttaagattcatcatattaaatacttaaaagattattgtatttttaaaatgtaggtggtttatcattcttttgtgctttttaaattatgtcagcaggcattggtaattctcacaggaataaattctgttttgatttgttttcctatttaatgaaaatgataatattttaaactgttctccatggcttttgtatactggcccctaaaattggttgttttcttctgtttcatgttgtgtaaatgttttcagaaggagaaactactcctggtgttgggagcccttggagaaaccatgtgctaccataaaagtagtatcagtttggagcagccagaggtgatgcttgtgcaccacagaatggcctttatcagcatttccctgtttgcagttcgactgctacaaacgcttctccctgttgaaaaggtaaggcaggcaatgctgctcatttgtactttacagactattataaataaatgctctgttgtaaatttcttctgctcttttcatggtgtgaaggtattgtgctttaggccattttcaaaataagtgtaacaggttatatgggaaatgtagaaattgagaaatggctaacattttgaacaattttgacaaatcatttgatgggaaattattttttaatcgtgctgttgcttttattgcatatgttttattgcagtctgtacgtttgtttattccttgttcattcagtgaataatttattgattgcttacagtggactaacagtattacttgctggatgtaaaactgaataggttagaattagtccctggcctcatggaacttagttttgtaaaagacaagacttggctgttatctatacatatacatatacatatacatatacatatacatatacatatacatatacatatacatctacatctacatctacgtatacatatacatatacatgtatatgtttgacttctttggtttctttaataactttgggatcacttgagggaagagattatgtcttaatatacgaatacatttttccatacatatatacatatataattggtacacttgtatcttttaattgattggagggcattgaaagcctactgatcttatctctgcagtgtgtgtcttggttcttatcattaatatcaagagtagcctttccttctcttcagctaggtacgtgttgtcagagttctttacttattcactatttcccaggttccttgacacacagaatacaaacaatagtttccattgctgctccagaaattattttatagttagcatatcttaatgtcatggaaccttttctttttcttgttttatctattcaaaatactgttagcagtgctttagtttctaagtattggtcaagttggtttctgaggactgtcctatttcttgtatttgttgtactttatgtatattgctggtgtgttgcatattttagtaacttaagggattttttttttttttggtcccatgcatttctcttgaaggtatcccactatttcctttctgtcagcaacttaattgcttaatatttttattttagcacctgatcaaaagaatttcagaagtcatctttggtaggattaaatatcctgatttttatttgattcatctagttaatatttggtaacttgttttatgtctaaaccatatttgtagtttgagttacgtaatatatgatttcataccttagtatgtcttttgaaagttgtttttttaattaacgtgttgctttaggtgtctttcacaaagctgcttttctgcccatgatagcaataaactatcttctgtgctagtctttattctagtacttttctttttcctacttttctattttacctagacctttcttttcttaagctttggtgttttcagtttttaacttttattcagaaaataaaatgttcatttaaaaaacattttgatgtacaaagaagaataaaaattcatttataatttcaagttagttttgaggcttttttcttttctgctttaagtccaattgacagcgtctataaaagttatttattctttttttttttttttttttttggttttggttttgtttttgagacggagtctcactctgtcacccaggctggagtgcagtggcactttcttggctcactgcagcctccacctcccaggttcaagtgattctccttcctcagcctcccaagtagctgggattataggtgtgagccaccacacccagctaattttcgtattttttttttttagtagagaccagatttcgccatgtttgccaggctgatcttgaactcctgacctcaggtgatgtgcccgcctcggcctcccaaagtgctgggagtactcgcgtgagccactgcacctggcctgtttattctcttttttttttttttaaccatttcttattatctaacatacattttccatttaattaaacacttcataaattttaatgggtactaatattttaccagcaagatgttctatgatttccacaagtattccagaaattaagcttttaggtttctttttttctttttttggtattttgataaataacactatgctgaattgctacttacgcatgtttactcatattttggattcttaaattcctagtggcattactagttcaaaggctgaatgcttaaacatgtttttattataagcataatttaaaaatattatagtttcacgagtttcattgtttttaactaaagaatggataaaaagagtagtacacggaaaagataattgtgagaatatatggccgggaaattactaaaaagaagcactttttgaaagtgcctaaggctggtgtctcttctgtgtgtttgccaattacagtttctgaaattgtgcactgttagtttaactagaacacttaaatttttaaatgatttttaaaatgctatcagaaaaaaacattaattctgtaaaggcttttttttttttttttaaactttcatatacattcagaaaagtacatagttcagtgctttttctactaagtgaatgcatctgtctttaaaaagtgaccacccccataacagaaaatagaatgttaccagcattccaaagaccccttctctgttacctctccctccttctccaagccacactcctttctgacttctgtcactatagatcaattggcctgttttgaatgttgtttaaatgaaattataaagtatgtactctctcaactccttcttgaggttcataactattgttgcctatagcattaatttgttaacttttattacaaaatattccattgtatgaagtctgttaaaagtgattttaatatgtgtaaatatttctttaaaatcttcttactgactgtatttttaaacgtgaggttatctctgaatttgaatgttagtggtaaaaatatctcagatcattcagacatcagtgtttcgtggtgtacttattaccaaaacaaaggagtgacacactaaaatgcaggtatgggagaaattatgaaaactagaaaactattccttatgcctctttgttgcccttagttattaaacatttgcagctttgtttcctagaattctgtagagcatatagtccaaactctattttcttttttttttttttttttttgagttggagtcttgctctgtcaccaggctggagttcagtggcgtgatctccgctcactgcaacctccgcctcctgggttcaagccattctcctgcctcagcctcccgagtagctgggattgcaggtgtgccccaccatgcccggctaatttttgtatttttagtagagatggtgtttcaccatgttagccaggatggtctcgatctcttgacctcttgttttgcctgccttggcctcccaatgtgctgggattataggcatgagccaccgcgcctggcccaaactccattttctaagtatcacttatatacacaatgtattatcaggtgatccaggaaaacggataaaacactgcattttaaatatagtattttgctttaaggaaaataacatcacttgtgttacttttaatttttaacttgtattcactagtcattatgtttctgaagtccttttctgttttgaagagtgacaatttttcaaggcataagcatcaagaatggaagaattccagtctcttaagaaaggaattgaatttaaaatatgggtgtcttccttaatattatataaatgaaaaattagtggtgctacaattgcttgctattaagtattgcaaatggtcaatctatctatgggtcgaagtattgatggaaaacttatcctatcagttgcatcatgtagtttttgattgtattttttcatctatgtgcttatttggacaggaaccaaaaagaaatcagtaatttattttacttagtgccagaataatgtaaagttaattttccatgcttttttttttaaaggtagttattgttttattgtttccgtttttaaaaacaaatcaattatctaatttttggtagttattttaaatatataacttggaactttattaaaacaattttgatcattgtgggagattgtaattaaggtatttgtttttagatgattatatttgttttgattaattgactaagtactttaaaatgagatctaaacaaaaatgctatttcattgatgttaaatttcttctttggtttatataaatgtaaggttatgctgccctctgtctgttgctagcccactaataattgaagtagaatttggactctgaaactttttgcctttaaagtggtttttttgagttgccactgaccaagtaggtagtttggatgttggaaaataaatatgaatctatgtagagatttcctaagtttaacaaaatgtcctctgatgcctgttttgaaactgatatttgttgatattaaatgattttggagaatactcatgtataggttaaaatgatacgttggtaatcttctgaaaaatattgtggttgagtaaactaaattggtaaaacaaatgaaggtaatttcatttggggaaacatctgggaagtaagagctaaaagtactagccctgttctggaagcagaagcacagagcattctaggaactgctgttactcttagctagtgatgcttaccaaggctaaggaagaatttgtaacacaaggtctttagcttttcagggaggtatataaaaagatctaatgacctggtgaagccagttgagtgactgagagcagtgcttttcaaacggtaatgttcaaacagatcacttagagatattgttaatcacatcttgcatattctgattcatcaggtaaagggtagggcctgagagccggcatttctaacagactcatagaattatgccatggctgctgagtggctagtttacaggaaacatttatagcccctcctcccaatgcacatgaggtgatgttgctgattattttttatctaatggggtgatggatttgcactgaaacatcttcacttttagttctgatggcatgtgactaatgcttatatatgcaggacagctatcttagattaggggtgtaaattgtgattagtccattgggccatgtaaagattagctaatgacattagcatggggctttgagttgttgagatagcaagagtttcaaatacaagtacgcagggtgaaacattggaattcctttgtggtgaagcgagaaaaggaaattaatatttattgagtgctatatgccatatgctctgcttaatgcttgtttaattctcacagcagctgttatttttctgactagagtcagagagaactctcttaaactagaacacagtgcctttagagttagatccattaggatttactctcttagcacagtgtaaatcgcctttgctaatttctctttatcttcctaactcttcaggagtggaaccccaggactgacagtagccctcatgaaatatatcccatttgtgattgttaaatgccatctatttgttgatgcctgccaaatttatacttccagaccagacatataacctgaactctgaacttacctgtatccagtgtcctttttgatgtcttcacttgggtgacaataaatgtctccaactgaacatgtcccaaacttcattctttgtttccccttccaaatatgttcttcctatagtcttgcctgtctcggtaaatgtcaactttgttgttcaagttgatcgttgatcaggcaaaaaccttagagtcagccttgattcctttcttttgctcatatgtggatataatccctgagcaaaatttgtcatttctcccttgaatacctatacagaatctgaatacctgagttaagcccaccattctgtcctgcctggattactgcagtaaagtcctctgtctcttagcttccacttttgcacattaccatcagttctctacagaccaattttgatacttgtttaaaatgttccagtggctttcagcagaggacaattccttatgacgacccaaagccttaactgatctggcccaccactcctttctgactccatccctcagaaccagctccactggctttcttgctaccaaataatagtttttgtaattgctcttccctcttctataaatgctttccctcagatagccacgtggctcctgacccttccagggttctacttaaatgtcatcttattagcgaggccttcctctactactttggagaagtagcagttccctgcctccactccccattacttctctgttcctcttcatctttcctatcctgttttaaaacactttttagccacacctaacatcttaggaagtatatcgatttacactctactttcttcagtgggatgtgagcttcatgcgggcagaggttgtattttgctctctgctgggttcccaggactggagaggtacctggcatatagtggaggaacatagtaaggcctaattaatattcaccgagtgagtgaataataggtgagcagataattgagtttctctttttcctcccccgcccacaaaaaaaaggaaagttcttcacagaataatgaaatttctctttactttctaatagctgctgttttactaatctggaggtttgtcatgtctgtgtaatctaaaattttgatttctgtagtttctgatcttcatttagcaactatattcatttaaaggtatcgttgtttagctgattcagctcttagactttcaggtagttaatgattatccttgaaataggttatccatgaaataaatcatgaccaaacccacttttgtaaagacagcatttcagccgtaatagtgagtcttgtcaagagattttctctgaacgtcaaatttttagtcctttttattcctttaattgatatttagaatcctgtcacaaaactagaaccatttttttaaaaaccataattctttcagttttaaatctattgatttaaggttataatgtgtataatatttcatttgggcatattgattttatactaattaaggggctatcttctgtattttagaactatttaaaatattatattggatttccactatcccctctaaaagacaaaaccaaagaaaaaaattcgtttctgttcaaatcaatctatagctatacttgatttcgtgttattaatatgtcattaataagctctgtcatgttcagctatgggatggggaagtgttcttgtcttcagtttatcaggttattggggagatttgcgtacatgtacagaaaatacttagagaaaaaggcctcatgccttagttcaatagcagaggtatatacaaggtgcagggctcaaggagagaagaagttggtttggggaagaagaaagtagttagtatcttaggctttgagaaagagttgatatttggacttgagacattttgtattgaaaaaagacagagatagaggtagatgatgtgttgggaaatgggattttctttggaaaaagtttcagttttttgacaaagaattgctaaaaaggaagttggattagattaagactatagcccactatgtttctctaaaataagttttttttaaacaaagttttaatttttttgtttttttaattcaccaaggcaagcgagtttttatcagagcctatgtcaacagcattatttctcctttctttggacatgcctatttctttggaatatccaaatattcatgaagctgttgtggcctatttggaacagctgaattctgaaaactacagtatttataaacgaactgcagaggccgtttattcaattgaatgcacctgtaacttcctgtctgatattgggaaagaggtaaaaagcttttttaatatctcttttaaatccctttgacatattttgaaaatttaatctatacttttcaaattgatggacatataattaaattgtcacaggtgggatacattattcctgagtgggtcaattatacataacctgttatttaacaggttaaagtaaggatatgatttgtatagaagtaaaacgaagactttaattaatggtgtatattcctaacatcagtgatttacaaaaaagcagtggttattacaaatgtcttaatatttaataatgagtacctctattaagtgacttactgatatgaactgaatgacagttgatgtaaccaaaattataagggctattttagtgcttacttgtagacatatttttgcctcaatattttatagatagttcttacatatatataaaggctgatttttgaaatatattaagtacagtgatgaactacattgtttataatgtattaggatgactttatggcagtgttacagcaataattatgtgtcggtatttatcccttttaaaaatactattagaatattagtatgttatcaatgaaagggttaatgggtcttagagacagacattgatacaagagttgtttattgtttgaaaataaggacatggatcctgaagatcttgaagaattagggataaaattcttactcattttggtgcctacagtagaatctatctgaacctatttattttctttgaattttttttttttttgacagccttctcagttgcctaggctacagccttgatctcttgggctccagcaatccatctgccttggcctcctaagcaactagtactataggcacatgctaccacacctggctaatatttaaattgttttgtagagatgaggtctcactgtgttgcccaggctggtcttgaactcctggcgtcaagctgtcctcccaccttggcctcccaaaatgctaggattaaaggtgttagccaccgtgcctggccttgaacttgatatttatgatttttcttacttaccactgtagtttgttttttttcccctttccttttgccatgttagtaccactgtcttcttgttttctctgtgatagaattttgaattgtgtctttaagttgaagtatttctgtggcttttttttttttttgagacgaaatctcactctgtctcccaggctggagtgcagtggtgcagtcttggcgcactgcaagctccacctcccgcctcagcctctcaagtagctgggattacaggctcgtgccaccacaaccagctaattttttgtatttttagtagagacggggtttcgccatgttggccaggttagtcttgaactcctgacctcaagtgatctgcccgcctcggcctcccgaagtgctgggagccactgggtctggcctctgtggcattttgtgtggtcagttaatcacacatgtgttcaatgtcctgtgtgttcctagtggtcaggctgctacaagaggcaggtttataataaaataaatacattagccctacttttattaggggaggtagagctacaaagaagtaatcaaagaaccaggcaacttgattgtaactttaagcttactcagagttaaataatagaaagtctcatgtggcatttagctagggaattttcctacatttctccacctcggctgacatttttaggttgcttgatgagaaagtggacttaaacaaatgtaaacagtctcatggtctctgaatggtctaatttcttgaagctgcttagttagctgttgagaatatcattgcacatgaacttgacatttattgttccattctgcttcttttgtagggagagaagaatctcttagaattagtggagctggcagaccaagccttgcgtagcttttcctatcatcagcatttcccgctaataaaggaaatcatcagcatttgttcaaagatgtaatattttctttcttaatgtgattacgttattattggacacttagggtgtgtgtaaacttagaaacagtgaaagtgaaactgactgtatatctttgttattattttttagtttaattgcttttatatgtgtctgatttttaaagggtatatgtacagctgcattaggatacttaactgttatattcaagattaaacttcaaaaatgtcatgcctacaatcaaaatgaataatccttggatttttatacatttgtttttggtatccatccagactattcacacacattgtttatttatctttaaagttttaattaataacttaaactgagagttttgtaacttttattactttgtacctttttcttatgtggatttttagaaaagactgtgtattggttaatttattttgaggacatcagcaaatttctatttagaacttagtgtctttattgcttttggaaagaataaattctgtgatgtgat

SEQ ID NO: 15785 - DNA, 193883 bp, Homo sapiens
aaggatgttatcatgcaagattttcctgctgagattttccttcaaaggccaaaaattgttcaggtcagtgccctctataattgttttagattttgaactagagaactttttgcaataaagcaaattttgcagagtaggagttcttgggaaggaactttgtactcatgtttttaaaaagtgaagtatttggctatttaaagcacttattcgctaacttgggtggatagttatagttcttccaatagtagtagtttcatttgacacttgcagtccagtctggccaccttgagttaccatttatggatcacctaaatggtagagtagactttggacattgagattgtgcaggagcccttattaaaagtaagaatagcattgcttcttgagtatctcgtttatttaacgcacagtgctacatgctgggaaaatacagtagcggtgagtaacgcagatggattcttttctttttttctagtttattgcttgtatagtagagagagagggatccagggtggggaattgcaacatcttcacagcagccagtaatggctcagcattctcgctccacactcccagggctgaaatggactccagtgggtgccaactgttaatacctaggatcaaagctggcaaatgatcgcagaggaaagctgttaattactaaaatgtggttaaatggtttagatgcttgagatgaaaagggcttgctgtgatttttaaaatgttctctgtaatgtaatgtcctgagtggggaataatttctgtcttctctcagaatggttactcaactaacagattttagaaataggaaacactgactattctatttaaatgttgttgtcttattttattttgacccatctccttgctttatgccaagtcatatttgcccatttcagtttcttatgtcttacaaatatttggcaacttattttctcttgattattcacttaggcttacttacttaagctccacattctgctttgaagttgagctctttgttcccttagtaattttcacggctcttcttgatttcagagccttttatctctgttgaaactggcctttggagatggaaagcatcgcctggcattacagtcggtgtcctgcctgcagcagctgtgcatgtatttaagaaacagacttaactttcaccgagatccaggttttttctccaataaacacggtatttatttttatctgttcattagccactggtgttatttgtagattcttctgggaaccttccattatagttactgttagggtttattgtgtacgcattttcacaacataaactccccactcctaaatgtattcaaatgattatctttacagattgcgtgaatgacagaaactgccatgatctcttgagcctttttttttttttctggataagagatatttacaaggtgtttttcttttttctcccaaacttgcagagattctatatagtgttgttgggatgtagtgactcggatatttggtatggctattcatgtaggactttggacaatttagcaagttacatatagtgttaatacattgttttgtttgaaaaatattgatttgaattttatgaagagtatttttatgcaacttgcaatgtagtcaagtgttgcagcaatgtgagacttcagagaaaaagtgccacctaatggccaaatagagtaccagcctggcttcgacaaaaccagtaccatttaggatttttgtgagcttaatgcaacctgcatcgaaagtcaaatattatagtcatttgtcatcatgtttcatagttaatccctatttcattgggagtttcactgatcctgtgctacttgaatatttatgctttaccttggttttattctagatcttagagggtatggcattgtacaaatgactggtaatagagaacgtctgggtaccccatacttcaacagaaaaagagttacaatgttgatttaaaaagttgatatctctgaagaattgttaatgtatttaataagtatgtatttattacctgttttatgcccctgatattctagcctctagggaagtataacactgaacaaacgaataagatccaagcccttatgagcttctattttaaaaggctgggcacaggtgataaacaatcaagtttgcttgagataaggagaagtacttgaaggaaataaaaagggtgatgtgacagaatgtggttgggtaaacatagcttcatttaggatagtcagggaaagtccctcagaaagcttctattttaaaaggctggggacaggtgataaacaatcaagtttgcttgagataaggagaagtacttgaaggaaataaaaagggtgatgtgacacaacgtggttgggtaaacatagcttcatttaggatagtcagagaaagtccctcagaggaggtgacctgaagggtgacaaggaatcgtcactcgaagagctgcaagaagagtgttccagggaaggccaggcctcaaggttagcactgagggtgatgtccttgagcaactgaaataaagcccatgagagtggactgcagtgagctgggcagaagaggagaatgaggtgacatcagagaggtagttaggggccagagtatattggggcttgcagatctttttaaagattttatattttctttgaagtgtagtgagaagctcttggagagttttttttccccctctctctgactgtaaatgcttttattacctaattctttttttaaattggggtaaaataggtataatataaaatatgccattataaacatttttaagtatacaatatagtgacattaataacattcacattgttgtgcagccatcaccactatctgtttctaaacctcttcattatctgaaacagaaactctaatcattaagcagtgattcctcatttttcctttccccaaagctggtaaactctaatttactttctgtctctgattttgtctattctaggtacctcatctaagaggaatcatacagtatttgtccttttgtgtctggtttatttgtaatgttttcaagcttcatccacattgtagcttgtatcagaacttcattcctttatatggctgaataatattcctttgcatgtatatcccacattttattcatctatgcatttgtcgatggacatgtgggttgtacccacatttggcggttgtgaataatgcttcagtgaacattggcatgcaagtatctgtgcagtgcctggtttcaattcttttgggtaatacccagtgaataatagtgaaattgctgcgtcatatggaaattctatctttagctttttgaagaatcaccaaactattttccacagcagctgtaccatttacatttctatcagcaatatataaagcttccagtttttccacatcatcactgacttgttcatttttttcttttttaaaaataatcgtagtcatcctagtagatgtgaagtggtatctcatggttttgatttgcatttctctaaagacctaataattaatgaccaatgaatctctaataactttttatgtgcttattgtttgttcatgtatcttctttggagaaatgtttattaaagttctttgcccattttaaaaattggactggtttctttattgctgggttttaggttacttatatattctgaaaattaaacccttatcagatatatggtttgccaatatttcctcccactctataagttatcttaacactttcttgtaatgttcccttggtgtaccaaagttttagattttgatgaagtccagcttatctgtctgttccttggttgtttgtgctttcgatgtcatagttaacaatcgattgccaaattcaaggtcatgaagatttattttttccgctaagagctttatggctttagcttttatatttaggttgttgatccactttgaattaatttttatgtacagtatgaggtagccattcttggagagttttaagcagacgagtgcatgatctagtgtttttctgctttggtagtctctaatgttgtaactgaatgccattgactagaaggtcccatgtaatcaagtcagttagatataaacctaaatgtactaagtgaatacttatagaaaagtttgatctttgcttttgtttttacccctgtagaaggattcctactatcttaatttgttaatgtttttggaagaatgatacataaataccacatagtcagaagtctgtttctactaaagaataattttattttttctttgtttccccagacacagtttcccaaaattcttctttgtcttattgtcatgaagcaagaggtactcatcattcccagaatccttccccaggaagcagcagccctcggccttctgtggttgggcgcacaggccagcgacccagaggagatggccaggactgggatgcagcgtcctctaggtgactgctagcagtgtctctggggaaatgagaaatgccggttaacttgtgtgtgtgttaatttcagaaggagataattatttttctgtccttttttttttttttttttttgaaacattaacacaggtataggccttgtgttaaaccctggcttcatactttttttgaccatgatccacggtaaggacagataaatattacatcgcaactcagtgctcagtacttgaacatatgctctgtttatgtatatatatgtgtgtgtatgtgtcccccaaaacaaaatgttcacataatagtattctgatactatgtttgacacactgaactatattttcagttccgatttcattagaaaagaaatgattctgacccaataaattgtttttaccagctgcaaacggaatatgatcaagtttaaaagaatagctttaaatgatagatacattgttgatagtattttacacatatttttgtaagtcttataacaaatggataagtgtttactgttaaaaggaatggttggagaattttataaaataaggactccttcaaggtgaacaatttatggtatttgtttgtgtaaatacagatttttttcttttttttttttttttttttgagacaaggtctcactctcttgcctaggctggagtgcagtggcacgattatagccttgacttctgggctcaagtgatcctttcgcctcagcctcctgagtggctgggaccacagatgtgcactaccatacttggctaagccttttattttttgtagagatggggtctcactatgtttcccaggctggtctcgaactcctgggctcaagtgatcttcccatcttggcctcgtaaagtgctgagattacagacatgagtcaccatgcttggcccccagtgcttggcacccagattttcatacaccaactctgcttaaaaggattggtgtggtatttgtatgttaccttatccttgggtgcaaatgtgttagaaacatattagtctctttagtgtcattctaaaaaatgttcactaagttaagcattggtctgttggcttaattattttcttgcaatactgctactactgttaacaagctaatactgattcatacctgctgtgtgtatggtgttatgccctgtgctttgcatactttgtctcctttagttgtcctagaataggattgatattatatatagcattagtattattattatcatcctcattgaggtttagagaggttaagagcataacagttggtaaagagcagagctagggttaaataaaatgataggagagtctatgctcttagtccttatattgtagttggttgttcagccatgtttttctctttctcctgaagcctttctgcctcattctcttgtgtgcttcatgcttctaagttttcactcctgagtgaacagcttcctcactgaaacttcctttcagagttacagagaagcccgagttgtttccatattttggggtgcttggtatcttgaaattgaagaaacgacaaagttggtttataatttgggcaaatttaaatgttccatagcattaatatgtctcttgtgatccagcttcggttgtggataacatcaaaagacaaaattttgaggctctttgtaagtgtgaggctctagcctttctacactttttaaatccttactccagcactttacatccgaggtaagaactttttaatgaagaaagccaaggacaatgggatgttccgtttttttgggtgcatttttgaagtcactacatgatgtcgaatgtactaagtgaagtaatacatttcccatgaggtttttctagaaacatccttcatttactaacactggcttactcagaacagtggtgaaactcagaaaatctaggaaacggtatgaactattggttttgtctctacacgttgattacagaagagctttcctataaatctgcttatttccttttggaaatgaatgggttatcagtgctaatattgattcctactataggaatgttgacatgttttgagatatcagcctgacaagcaaaatatagatgcatttttggcttcatttacaatttagagtctttttttttttttgagatggagtcttgctctgtcgcccaggctggagtgcagtgtcgctatctcagctcactgcaacgtctacctcctgggctcagaagattctcccgcctcagcctccccagtagctgggattacaggtgtgtgccaccatgcccagcgaatttttttttttgtatttttagtagaggtgggatttcaccatgttggccaggctggtcttgaactcctgacctcaggtgatctgcccgccttggcctcccaaagtgctgggatgacaggcatgagccaccactcctggccttgagtcatctttatggaatttaatttcgtaaatttgtcaaagtttctacaaatctgaccagagttgaatgaagcagtagagttgtgacttgtatgaggcttctaatatgcgaggcagcagatatgcagtaaatctgtttggggattgtttctgtatgcaaggtttatcatttgtttatcttgcagtggaagtagtagtcatgctcatgtaaactccaggatatccgttcattcacctttggatatgggacacatagatctgccagagctggaaactgaagacacattggaactacaattccagcagctcagtcttccccagttttgtgtctccattctggaatcagctgttcctctcttaagaacaggttagttgttttagaaatcgtaattctgatataatttgtgtctgttttgtatttcgttaggattttcctttttttctcttctatgttagggcctttggaatctgtatttacttatcttttgggatataaatttctaaaaacctaataaggtctttattatttttaaattaaatgtggatgccttggagggctattcagcttgcccttccattttatgagtttttattggcacaggctttcatgcttattttttttttagaatttttatctattttttgcatttattcttgctgtcatctatttttttcttttttttttggactgtatggctattttaaatttgagcagtgacaacattcagcaactggaataaggtataaaaggtggactggcatgaatagaccagaataaaaaaatctttggcttttgctctttggaaactttttgattagctgtcagttgtttactcttcccattcatttcttgctacttaagccacttaacatgttaaaaacaaaactccaaaactggattcttacctttgtagtaatttttcttaaaaaagccacaaatattttgagatcccatttttgttcagatgtactaggaaaatttgaagaggttgactgaaatatacactggtatttaattgtaattgtactgaacaatggtaacagcaataacaatatgacagaggtctgctgagtctagtaatgaaacaacagttagcacgtgtccctactgggttctgccttcatacttggttttgtgtgcattatttcgtgtatttttcatatcaacccattttgttttttcactggtagttaactaattttatctccatttttacaaatgatgaagctgagtttttgagtggtttagaaacttgcctgaagtcaaacggctaaaagcagggacttgaaccacgattcttttgaatctaaagtccatgcttttaaatactttagcattttgcaaggtgtaaagaaagttttagaaagaaaacagtcatgatttttattctcaaaatctatacattttcaacgtttgataaactcatcaggatataaataagataaccaagttttgccctttttactttatactggcaaagtaaaaatatatattccaagttaatggttctttaagtcccatgtctattttttgccacttggaggtgatggaggagaaagaagcaggaaggtatatatttggaaaacatttaaaatgtttttatcctgaggaaaactgtgtactcatactttttactcagtaagtgcttctactagctggaactatatattaattcatatactaataatgtgaaatgaagaaagatctgaactttggcatcataaagtacatatgtttatctgtctggtaagctgagaagaacagtcttagactttaatgattttgcatttaacctttccttaatttgctttaaaaagtcagattgataattataaagctatatcttggtacataaaaactaaatgttctcctgcccttttgtggtaaattatggcatgatttgtaactgttcaatatcgtaagagatttgtaagagaatttggtccagctcttctagtgaaaaaattaatctagatccttccaatctggtagtttgttttactttgattcattagaacttaacctttgggatgcggggtgggaaagtctcgtgtgaatgttcgtctcacacaggataatggaagtggagtctttgttattctgtctctgtggagaaaggaggttgctctggtgggtgtgactttgggaagtttttttgagtttaaggtgagtacaaatagtttctttagcaaatgttagcatgttcatttattcctttagttgctccagtccaagcttagcttcccaggcaactcctgtgtgggaaaatactaatttatgagaaggctcacgccttctagtactaagtagaaattattggaatacgttttctaaacctttctggtgctttgtcacatattacgtgtaaaatggatggtccctaaattcgaaaaattattttaatctatctcacagtacttgttagattattgctactttcaatatcttttccaattataaatgtatttgatttgttatgtagtaaagtagtactgtgactggaacagaagccttcagtgtgattgtaaattgtgatttctctacagttctaagaacattagaaaaaaagagaaaatgttggagcatgactaactagaaaattgagcaatatgatattcagctgattattttaaagttaagtaacttcttctcctttacttttttctgtttgtattcctaggtagcagacaagtgataataagagttctggaattgcttacagaggatatgacacttattggtgaagcaatttcaacagatatctgggatgacagcagcctttttggtatagatatggtaagaatcaatgttttctttgggatatagggaatagtattttttaagattttggttcttttaagccggtttcattgtctcattcgtgttcaaaatcttttttctttttgactcaatatgtcccaggcttatgttataaatagcctggaacaggcctatttttccaaaggttctggttacttctaatagtggaacgtatattaagaccaaaaccaggccattagaggtggttatagctactgtgatatcattcttttctttcaggaacaattaggaaatacgtatttttaaagatcgtgagtttattgctatttttcttattttaaatttgtatttcttatccttgcgcttgtagaaagtcttcgttcctagcaatatcagcataattgcttattagctttgaccttaaacatacataagatagtttcagaacagcaatattaacattgctatgaacaattctaatgaaaagttcaagatttcctggcagttctttttgagatagactaatctcactaaggatatacagtcaaaatactgtgccttaaagctaccgttacccattcagcatacagttagatttttttttgtttgttttcactattgggaattgttttttcttcataaaaatgtagctcagagatgcctctctcccatccagttacctttaagatgttttccttattggtagtcatttttattttctggctatttttttctatttttattttatttttgcaaatgtaagcaactaagtatgtagattcttatcctctccccatcctgcataaaaggtggtatattatagacactgttttgcaccctgtttttataacttaaaaatacgtcttatgtgcatagaatagtaggtatgaggattattccctatctatctatacgtgagattttctcgttcttttttataggtagcaaatgcttcgttgtgtatttgttaacctagtctcttgatggatattattgttaatataaattatgtacaaagaataatgggcttatgctatttcataaatgtgcaggtatgtctctagggtagatttatttaagtgggcatgctgtttttctaaaaaacttttatttagcttcagcggtacgtgtgcaggtttgttatgtaggtaaactgtgtcatgggggtttggtgtacagattattttgtcacccaggtaataagcctagtacccgataggtaatttttgtggtcctcctcccactctctgccgtcgagtaatccctggtgtctgttattcccctctttgggtccatgtgttctcattgtttagctcccacttataagtgagaatatgtgtatttggttttctgtttctggattagtttgcataggataatggcctccagctccatccatgttgccgcaaaggatatgatctcatgcatttttatggctgcatagtattcattggtgtgtatgtaccacattttccttaatcagtctcccattgataggcatttaggttgattccatgtctttgctattgtgaatagtgcagcagtgaacatacacatgtatgtgtctttatggtagaatggcctcaagtgatctgcctgccttggtctccgaaagtgctagaattacaggtgcgagccaccgcgcccggctgagccatgttgtttatgtagtagtacagcagttcctcacttggcatcatagataggttttcggaaactgtgactttaagcaaactgacttataacaaacccagttattttttctcatcagcatttagtgaaatggcatggaacttgtaatgctgtttcattaaagtcagtttccaagaacctgttgaccaagttaagtgaaggcttactgtagtttattcattttatttctgagtagtattacattgtgtggacataccacaatttgtttatccattcacctgttggtggacaatggggttgtttctagttattacaaataacattcctatggacattccagttgttccacatcttcaacatctattatgttcagttttttttttttttttgggggggagagggcattctgatagatgtgcaatggtatcttagtgggttttaatttgcatttccctagtgactgatgattatgagcatcttttgtaatttttagagagcaagtctaggtttttttttaaaaaaacacttattcttaagtattcttttcaatgccattgtgaatgaaaattttaaaagtttttggattgctcattgttagtatatagaaatacaattgatttttgtgtattgatcgtctatttggtggccttgctgaacttactagttctggtagttttttttgttttgttttgttttctggtagatcccttaggattttctatctataaaatcttgttatctgtgaataaaaacagttttaagatcatcttatctgtgaataaagacagttttatttctttctattcactctggatacctttaatttttttaaattgcctaattgccctggctagaagccttagtataatgttggatggatgtggtgagagccttcttcatgatttagagggaagcattcgatctttcaccattaaatacaagattagctctagtacatttgtattttgtagatgcctttataaagttgaggaagttccatgtattcttagtttgttgaaagttttgatcatgaatgattattgtattttgccaaatcttttgtctctattgagatgatcatttagctttttgaagagcagaaaaacttaattttgatgaggttcagtttcttagtttttcttttatggatcatgcttttgatattttatctaagaaatctttgcctaacttggaatacaaagagtgtttcctatgctttcttttagaattattacatatgttttaggttttatatctttgattaattttgagttgatttttgtatctagcacaaggtaaggaatgaacttttttttttatgggtatacaattattttctcagcactatttgttcaaatgactgtcctttctttcctgaattccttaccaactaactatatgtgggtttacttctggaatctatttgatcggttttctcttatgatgccaatacccaactgacttaattattgtagcttatagtgaaggcttatagttagctatagtgaagcttattgtaagtcttgaaataaggtagtataagtccttcaactttgttcttgttttttttttctgatatgtagtcctcgctctgttgcccaggctggagtgcagtggcgccatctcggatcactgtaagctccacctcccaggttcacgccattctcctgcctcagcctcccaagtagctgggactacaggcgcccgccaccacacacacacacacacacacacacacacacacacacacacaaaaaaaaaaaaaacctgctgtggttttgaatggaattgagttgaatttgtagatcaattcaggaaaaattgacatcttaatagtattgaatcttctgatccatgaataccatatatatgtcttcacttgtttagctcattatttatttttatttttattttttttaacatggaatctcattctgtcacccagactggagtgcagtggcatgatcttggctcactgcactgtccgcctcccgggttcaagtgactgtcactacagcttcagcctcccaagtagctgagattacaggcatgtgcccagctaatttttttgtatttttagtagagacagggtttcaccatgttggccaggctggtctcgaactcctgacctcaggtgatctgcctgcctcggcctcccagagtgctgggactacaggcatgagccactgtgcccagccttatttagctctttaatttgtctctgcattgttttgaagttgtcagtgtataggtcttatacatttgagtatttcagttttgggtcttgtccactggctgacttttctctttatggatcttaatatttgatatgtgtagtaatttctgattggatgctggaccttttcaatgttaccatgttgagtgtcttgattttttattttacccttttagaagcactttgggagggttctgaagcactttgggaggccagcatgggagcattacttgaagccaggagcttgagatgaacctgggcaacaaagtaagatcttgtctcttcaaaaattagtaacattagctgggcatgtaggtgcatacctatagtcccagctatttggaaagctgaggcaggaggatcactcgaacccagaagtttgaggctgacaggtggttatgttacttgtagagcagtttcattttctcaagactttaaaaaattttgctagaatgggtctaaaatagtggttttcaactggggggtaattttgcttcccagaggatgtttggcaacgtcgggagccatttttgattgtcacacctggagtggtgctgctggcttctagtagatagaagccagaacagctcaccacaacaaagaatgttttagctcaagatgtcagaaaaccttgaggaagtgttaaggttgagaaaccctgatctagaagaacctttgcttggggttaaactctgctcctgagatgtgatcctttgggacctctattgaatgtccaaagtgatgattgatgactgtctactctgcctggttgaagactgagttttattgtcttgtgtgagccctgggagttgttcaatttaaatctcagtaatcatctttggcctgtatttacagagtatctacctataatctaagccacctaatctcagcatggtctgggtggaaacttgtttaggtctctgaaattctttctttgcatagctctcccacaattcctaaccatgtcagcttccacaggcatcttcatctcctaaagtcatcgagactgtcagactctttggatttctcttgcctgtgtttgctgtacagtaattgttttcaggtatagtaggactctcattgcttattttccttctctctggcatcacagtcctgcaatgacactatgccactttctagttgatttctggggaaggacaggagatgtccttgttattatttcatggccagaattggaagttttacgtaaagtttttaattatgtcatttaagcaactggcctatctgtgagttattaggagcttaaatgtacatttatctagagtgaaaattctggatcaactttagaataatcattcaaagtgtggagagttcaggataccttgttttttgctgtttgtatttcagtagagtagataattttagaaaatatggaattaaattttgttttttttgtaagaagtgttttgataagtaatattttgcatgagtaatcaacatgtgtacagtagtagccttaagaatgttatattacaacataatatttaagagatctatggaataccagagtatgtctccatgtaactggaaaacatatcttttttaacatttcaaaatatcataaatcatttgtcatttaatatctttcattttgaaattgtcatctgataaccttgccttccttgaagatttggcattctatctcttctgttaatgtgaattcctaatgtctggtcttccttcctctccctttcttccttcccctctcccttcctcccttcccttttgctgccttgtcagggcagtagaatcaaaatttattagtcataaaaatatatattgactcttacgtttatcagttttttttctctttatgctattttgatgtaagtcggtctatatttaattaaacattgttacaggctgtctgaaatccttgtgaatagaggtctgaatataaaaaaataaattacagatatttacataataacaatacccatgtaagaaagaaacccaaacttttatttttttcataacacgagcctcttaaaaagagaaacaaactgcatattttaaaatgggtgtattttcaagtctttcattttctgataatagttctgaatcttggtttttctttagtccttaaggttatcacactattttgtagtacttttaggagatttttcacatattgaagattttcaacaagtaaatttttcctttgaagtgtgaggaatgctttatcagttgtttcttaaattaacttaaattttcttggccagaacatttatctgtaaaagttagtcattcacttttaacttttggctgctggtactttatgattcaatgaattatttttactttaaaggttaattctgttgtacaagtgccagttggtatgttacaaatgctaaataaaacagaagtacttcaaattatatttgatttacttttacttgtttaaaaagaataaatgtctcttttctttggctatattttaaaagaagcaaacaagtaaaatttcttaatgttcatacttttgccagttttcaaaagaaagacggaagcagtatttttgttgagtcattaaaggaacaaaataataaatgttgctatcaatttagaaattaagtacctgaggatatataatcaaatctctaggtatttccacacagtactaatatcagtaacatcaatcatgtctggaaccctgtaactcagcatggaagggaatttcaatttccccccttaattgaatatttttatattactcgaagtaaataaaagaaaaaatattttcaccaaaattagttatgctgacctaaagtatgtcatatgtcattccccctagtcctccatcatcaaatcaggtctattttttccctatttacatgctaagtcaggttcaagatgcaaggagaaagtagctttcacctcctgccagataacctagactcttaggtctatattctgtttcttttccgcatttcttctgtgtcattcctgtcattgcagtcattggaaagcagtcttttcatctttatgactcattgcttctaaattcccatctgacctgctgtgaactggtaacttcaacatcaaggcatgttggtagaattgtagaatgttggtaggacttcaagaggggctaagaggattgtgaaagaaactaaagatctttgtatccagtaagggctcattaaggatatttggaccagattgtgaattgataactggtgtagtgggatctctaattacatagaccttccctgctgctgccaccattccaaagacagttattttaactcacatttcttgattgcccgttattaatatatgctaggcacttgggatatcaaataagatgtagtgctttttatgcctatgggtgatagatacttttaatatgacattagtaaaatagagataagcataaaggaataacacgtaaactaagatagtttaaatatagcacttactgtatgtcagacactaagcactatttatgaggtcatttaattatcatgaccctgcaaactccataactgaggcacagtttatttttcagggtcacttgtggttttgtatttatagccattatgttttattgccaatggtgctttgaaaacactatgaactatgaacttgggatgtcagtgagggctttttttttttttttttctcttccccagactcagagtctcactctgttgtccaggctggagggcagtggcgtgatcttgactcactgcaacctccgcctcctggattgaagcaattttcgtgcctcagcctcccaagtagctgggattacaggcatgtaccaccactcctggctaatttttgtatttttagcagagactgggttttgccagattggccaggctggtctcaaactcctgggctcaaggcaccactcctggctaatttttgtatttttagcagagactgggttttgccatgttggccaagctggtctcaaactcctgggctcaagtgatcctcctgccttggcctcccaaagtgctgggattagaggcatgagccaccgtgcccggcctcagtgagggctttttgtagatctgaatgaactgagttttaaattataggtaggatttggccaagcaaataaaatagcattttttttttttaatctggcggagcgtgagaatgaaccatgagccatgacaaagaggcatggatagttctgatcggagataaaggataggcctggtagtagatggaacacaagcacctagaccatgaaatgtgaggtgcaaatagtggagagagactggtgggataaatgagggtctgctggtaggggtcttttggcatgatgctgagtagtcctgcctttcctctgaaggcatgatgagattgcttttaatcagagaagtgccttgtgagactggcaggaggaaccgtgactggctgcagtgtggaaggtccattggaagcatgtgaggggcagagcctgctgcagtttcttactccaggtgccttgtagaatccacaacccattgtatattgcagaggtagtgtgtaagttgtgtttacactataaaatctgttttattggtaatatttaagacattttgctaacctggtatttcaattttgtaccttctgttgtaaaaactatgagtatcctgtgaggacgggtcttttcccccaccgtcaactcctttagggttgttgcttaaacatctttagcccaaagaattaaaaaatgtgggccagttactattgtttttcaatcctttcctacaaaacaaaacaaaacaatacaaaaagccattttttttatgcttagaagaaatgttggaaatagaactgtaaaactcattcctaaagtattttctttttatgatattttgagaagtactcaattcatcattagaattagcaagattattttaaacaatttcacaagtaaatagacttgaataatagagatgttgttcctagtactgttttcatggagaaatactgtatggaggaattaattgcctgtcaatataataagactgtcactgtatttccaatttgttttctctagaccagtagttgtttgtatgagggcgttttactttttctgttttaattttgtaaggattgttctactttcggtttaaatatttattgctttttagttttatttcttggggatcagagaaatatagccttaaatatacactgaagttttctttgtggtaaagtatgtttaaagttaatttttgtcagtgtttcttggaaacttaaggagaagttatattctttgcagtgttcaaagtttatgtctattaattttaattatgttcaaaaagactgagttaaaatttataagtccatatcaataacatgttttgttgatgtcctgttttattcagatcacagactcatttttattgagtctttattgttaaacatgtcatcagtagaaaattactctaatttattttgccctaaattattcactattcatattgcttagaatttttgttttaattctactactcattgaacttttaaccttttattcacaaagtttttttagaattttattttctttttttacttataatcccatgacagttaaggatttatatataaatttttaatttttgttttttacttcaatatgaaattgtttcatttataggaaaatttaaactttttatagtatagttatgcttggtctactctcaaaagtttttgccttgttttgcttatgtagatcattttgtcttccttttacttctgcagtgacattgttgtacaaccattatcattatctatgcaactttttcatcatctcaaatggaatctctgtacccattaaacaataacccctcattctgcctatccccagctcctggtacctcatataagtggaatctatatttgtctttttgtatctggcttattttacttttgtatttggcttattttattttatgttttaaaggttcacccatgttgtagcatgtatcagaatttaattccttttgaatgctcaacacccttttctttttttctttgagacagagtcttgctctgtcgccaaggcctgagagcagtggtgtgatcttggctcactgcaacctctgcctcctgggttcaagttcaatcctgctgggattacaggcgtgagccatcgcgtccggcctccttttcttgcatgtatatacaacataccacattttgtttctgcatttattggtcagtggccactttcattgtttccaccttttggctgttgtgaatagtgctgctgttaacctgggtgtgtatacatctcttttggagaccctgctttcagttcttttgggtatattcccagaagtggaatttgctggatcatatgataattctgtgtttttttgaggaactgcccattatattttccacagtggctgcaccattttacattcccaccagcaatgcacaaggcttccattttttccatattcttgccaacgacttgtgctttttgggcctcataccttttagttgttccctgtatagtcatccttgaattgaagaaattctggtatattagatttttgttcttagtttgcaggtatttctcattcttcttttcatatgttttcaatggaaaattgaaagttaagtacttcagttttttttttctttcttactgagggtgtccttttacccgctagtttatgggggcatatcagtatatctgggatatactttgtctatattgatgtgacttacaagacagtctactatgcatagattcttcttcatatttaatgtataccttttagtttaaaagatatgatttctcttgaagtagtaaattatttaaatttatgatggcataacattttccacttgaaaccttattatctaaagagagtttataaaatttgatatttaattgttttttaattatttgactttccttgatgcatttctttagaaatgttggtatcaatttgaggacagagatcatcatgtctcttgtactaatgcattgttctttcattatgcctgccactgtgttaggcgtatagtaagcataagaaatacttgacgaggggtttgcgtgttaacgttccaaattggaacaattaggcactagaaactaggaggaaattatggttcatttaccttttatattctattgtttgtatttattcattgttaagattcatcatattaaatacttaaaagattattgtatttttaaaatgtaggtggtttatcattcttttgtgctttttaaattatgtcagcaggcattggtaattctcacaggaataaattctgttttgatttgttttcctatttaatgaaaatgataatattttaaactgttctccatggcttttgtatactggcccctaaaattggttgttttcttctgtttcatgttgtgtaaatgttttcagaaggagaaactactcctggtgttgggagcccttggagaaaccatgtgctaccataaaagtagtatcagtttggagcagccagaggtgatgcttgtgcaccacagaatggcctttatcagcatttccctgtttgcagttcgactgctacaaacgcttctccctgttgaaaaggtaaggcaggcaatgctgctcatttgtactttacagactattataaataaatgctctgttgtaaatttcttctgctcttttcatggtgtgaaggtattgtgctttaggccattttcaaaataagtgtaacaggttatatgggaaatgtagaaattgagaaatggctaacattttgaacaattttgacaaatcatttgatgggaaattattttttaatcgtgctgttgcttttattgcatatgttttattgcagtctgtacgtttgtttattccttgttcattcagtgaataatttattgattgcttacagtggactaacagtattacttgctggatgtaaaactgaataggttagaattagtccctggcctcatggaacttagttttgtaaaagacaagacttggctgttatctatacatatacatatacatatacatatacatatacatatacatatacatatacatatacatctacatctacatctacgtatacatatacatatacatgtatatgtttgacttctttggtttctttaataactttgggatcacttgagggaagagattatgtcttaatatacgaatacatttttccatacatatatacatatataattggtacacttgtatcttttaattgattggagggcattgaaagcctactgatcttatctctgcagtgtgtgtcttggttcttatcattaatatcaagagtagcctttccttctcttcagctaggtacgtgttgtcagagttctttacttattcactatttcccaggttccttgacacacagaatacaaacaatagtttccattgctgctccagaaattattttatagttagcatatcttaatgtcatggaaccttttctttttcttgttttatctattcaaaatactgttagcagtgctttagtttctaagtattggtcaagttggtttctgaggactgtcctatttcttgtatttgttgtactttatgtatattgctggtgtgttgcatattttagtaacttaagggattttttttttttttggtcccatgcatttctcttgaaggtatcccactatttcctttctgtcagcaacttaattgcttaatatttttattttagcacctgatcaaaagaatttcagaagtcatctttggtaggattaaatatcctgatttttatttgattcatctagttaatatttggtaacttgttttatgtctaaaccatatttgtagtttgagttacgtaatatatgatttcataccttagtatgtcttttgaaagttgtttttttaattaacgtgttgctttaggtgtctttcacaaagctgcttttctgcccatgatagcaataaactatcttctgtgctagtctttattctagtacttttctttttcctacttttctattttacctagacctttcttttcttaagctttggtgttttcagtttttaacttttattcagaaaataaaatgttcatttaaaaaacattttgatgtacaaagaagaataaaaattcatttataatttcaagttagttttgaggcttttttcttttctgctttaagtccaattgacagcgtctataaaagttatttattctttttttttttttttttttttggttttggttttgtttttgagacggagtctcactctgtcacccaggctggagtgcagtggcactttcttggctcactgcagcctccacctcccaggttcaagtgattctccttcctcagcctcccaagtagctgggattataggtgtgagccaccacacccagctaattttcgtattttttttttttagtagagaccagatttcgccatgtttgccaggctgatcttgaactcctgacctcaggtgatgtgcccgcctcggcctcccaaagtgctgggagtactcgcgtgagccactgcacctggcctgtttattctcttttttttttttttaaccatttcttattatctaacatacattttccatttaattaaacacttcataaattttaatgggtactaatattttaccagcaagatgttctatgatttccacaagtattccagaaattaagcttttaggtttctttttttctttttttggtattttgataaataacactatgctgaattgctacttacgcatgtttactcatattttggattcttaaattcctagtggcattactagttcaaaggctgaatgcttaaacatgtttttattataagcataatttaaaaatattatagtttcacgagtttcattgtttttaactaaagaatggataaaaagagtagtacacggaaaagataattgtgagaatatatggccgggaaattactaaaaagaagcactttttgaaagtgcctaaggctggtgtctcttctgtgtgtttgccaattacagtttctgaaattgtgcactgttagtttaactagaacacttaaatttttaaatgatttttaaaatgctatcagaaaaaaacattaattctgtaaaggcttttttttttttttttaaactttcatatacattcagaaaagtacatagttcagtgctttttctactaagtgaatgcatctgtctttaaaaagtgaccacccccataacagaaaatagaatgttaccagcattccaaagaccccttctctgttacctctccctccttctccaagccacactcctttctgacttctgtcactatagatcaattggcctgttttgaatgttgtttaaatgaaattataaagtatgtactctctcaactccttcttgaggttcataactattgttgcctatagcattaatttgttaacttttattacaaaatattccattgtatgaagtctgttaaaagtgattttaatatgtgtaaatatttctttaaaatcttcttactgactgtatttttaaacgtgaggttatctctgaatttgaatgttagtggtaaaaatatctcagatcattcagacatcagtgtttcgtggtgtacttattaccaaaacaaaggagtgacacactaaaatgcaggtatgggagaaattatgaaaactagaaaactattccttatgcctctttgttgcccttagttattaaacatttgcagctttgtttcctagaattctgtagagcatatagtccaaactctattttcttttttttttttttttttttgagttggagtcttgctctgtcaccaggctggagttcagtggcgtgatctccgctcactgcaacctccgcctcctgggttcaagccattctcctgcctcagcctcccgagtagctgggattgcaggtgtgccccaccatgcccggctaatttttgtatttttagtagagatggtgtttcaccatgttagccaggatggtctcgatctcttgacctcttgttttgcctgccttggcctcccaatgtgctgggattataggcatgagccaccgcgcctggcccaaactccattttctaagtatcacttatatacacaatgtattatcaggtgatccaggaaaacggataaaacactgcattttaaatatagtattttgctttaaggaaaataacatcacttgtgttacttttaatttttaacttgtattcactagtcattatgtttctgaagtccttttctgttttgaagagtgacaatttttcaaggcataagcatcaagaatggaagaattccagtctcttaagaaaggaattgaatttaaaatatgggtgtcttccttaatattatataaatgaaaaattagtggtgctacaattgcttgctattaagtattgcaaatggtcaatctatctatgggtcgaagtattgatggaaaacttatcctatcagttgcatcatgtagtttttgattgtattttttcatctatgtgcttatttggacaggaaccaaaaagaaatcagtaatttattttacttagtgccagaataatgtaaagttaattttccatgcttttttttttaaaggtagttattgttttattgtttccgtttttaaaaacaaatcaattatctaatttttggtagttattttaaatatataacttggaactttattaaaacaattttgatcattgtgggagattgtaattaaggtatttgtttttagatgattatatttgttttgattaattgactaagtactttaaaatgagatctaaacaaaaatgctatttcattgatgttaaatttcttctttggtttatataaatgtaaggttatgctgccctctgtctgttgctagcccactaataattgaagtagaatttggactctgaaactttttgcctttaaagtggtttttttgagttgccactgaccaagtaggtagtttggatgttggaaaataaatatgaatctatgtagagatttcctaagtttaacaaaatgtcctctgatgcctgttttgaaactgatatttgttgatattaaatgattttggagaatactcatgtataggttaaaatgatacgttggtaatcttctgaaaaatattgtggttgagtaaactaaattggtaaaacaaatgaaggtaatttcatttggggaaacatctgggaagtaagagctaaaagtactagccctgttctggaagcagaagcacagagcattctaggaactgctgttactcttagctagtgatgcttaccaaggctaaggaagaatttgtaacacaaggtctttagcttttcagggaggtatataaaaagatctaatgacctggtgaagccagttgagtgactgagagcagtgcttttcaaacggtaatgttcaaacagatcacttagagatattgttaatcacatcttgcatattctgattcatcaggtaaagggtagggcctgagagccggcatttctaacagactcatagaattatgccatggctgctgagtggctagtttacaggaaacatttatagcccctcctcccaatgcacatgaggtgatgttgctgattattttttatctaatggggtgatggatttgcactgaaacatcttcacttttagttctgatggcatgtgactaatgcttatatatgcaggacagctatcttagattaggggtgtaaattgtgattagtccattgggccatgtaaagattagctaatgacattagcatggggctttgagttgttgagatagcaagagtttcaaatacaagtacgcagggtgaaacattggaattcctttgtggtgaagcgagaaaaggaaattaatatttattgagtgctatatgccatatgctctgcttaatgcttgtttaattctcacagcagctgttatttttctgactagagtcagagagaactctcttaaactagaacacagtgcctttagagttagatccattaggatttactctcttagcacagtgtaaatcgcctttgctaatttctctttatcttcctaactcttcaggagtggaaccccaggactgacagtagccctcatgaaatatatcccatttgtgattgttaaatgccatctatttgttgatgcctgccaaatttatacttccagaccagacatataacctgaactctgaacttacctgtatccagtgtcctttttgatgtcttcacttgggtgacaataaatgtctccaactgaacatgtcccaaacttcattctttgtttccccttccaaatatgttcttcctatagtcttgcctgtctcggtaaatgtcaactttgttgttcaagttgatcgttgatcaggcaaaaaccttagagtcagccttgattcctttcttttgctcatatgtggatataatccctgagcaaaatttgtcatttctcccttgaatacctatacagaatctgaatacctgagttaagcccaccattctgtcctgcctggattactgcagtaaagtcctctgtctcttagcttccacttttgcacattaccatcagttctctacagaccaattttgatacttgtttaaaatgttccagtggctttcagcagaggacaattccttatgacgacccaaagccttaactgatctggcccaccactcctttctgactccatccctcagaaccagctccactggctttcttgctaccaaataatagtttttgtaattgctcttccctcttctataaatgctttccctcagatagccacgtggctcctgacccttccagggttctacttaaatgtcatcttattagcgaggccttcctctactactttggagaagtagcagttccctgcctccactccccattacttctctgttcctcttcatctttcctatcctgttttaaaacactttttagccacacctaacatcttaggaagtatatcgatttacactctactttcttcagtgggatgtgagcttcatgcgggcagaggttgtattttgctctctgctgggttcccaggactggagaggtacctggcatatagtggaggaacatagtaaggcctaattaatattcaccgagtgagtgaataataggtgagcagataattgagtttctctttttcctcccccgcccacaaaaaaaaggaaagttcttcacagaataatgaaatttctctttactttctaatagctgctgttttactaatctggaggtttgtcatgtctgtgtaatctaaaattttgatttctgtagtttctgatcttcatttagcaactatattcatttaaaggtatcgttgtttagctgattcagctcttagactttcaggtagttaatgattatccttgaaataggttatccatgaaataaatcatgaccaaacccacttttgtaaagacagcatttcagccgtaatagtgagtcttgtcaagagattttctctgaacgtcaaatttttagtcctttttattcctttaattgatatttagaatcctgtcacaaaactagaaccatttttttaaaaaccataattctttcagttttaaatctattgatttaaggttataatgtgtataatatttcatttgggcatattgattttatactaattaaggggctatcttctgtattttagaactatttaaaatattatattggatttccactatcccctctaaaagacaaaaccaaagaaaaaaattcgtttctgttcaaatcaatctatagctatacttgatttcgtgttattaatatgtcattaataagctctgtcatgttcagctatgggatggggaagtgttcttgtcttcagtttatcaggttattggggagatttgcgtacatgtacagaaaatacttagagaaaaaggcctcatgccttagttcaatagcagaggtatatacaaggtgcagggctcaaggagagaagaagttggtttggggaagaagaaagtagttagtatcttaggctttgagaaagagttgatatttggacttgagacattttgtattgaaaaaagacagagatagaggtagatgatgtgttgggaaatgggattttctttggaaaaagtttcagttttttgacaaagaattgctaaaaaggaagttggattagattaagactatagcccactatgtttctctaaaataagttttttttaaacaaagttttaatttttttgtttttttaattcaccaaggcaagcgagtttttatcagagcctatgtcaacagcattatttctcctttctttggacatgcctatttctttggaatatccaaatattcatgaagctgttgtggcctatttggaacagctgaattctgaaaactacagtatttataaacgaactgcagaggccgtttattcaattgaatgcacctgtaacttcctgtctgatattgggaaagaggtaaaaagcttttttaatatctcttttaaatccctttgacatattttgaaaatttaatctatacttttcaaattgatggacatataattaaattgtcacaggtgggatacattattcctgagtgggtcaattatacataacctgttatttaacaggttaaagtaaggatatgatttgtatagaagtaaaacgaagactttaattaatggtgtatattcctaacatcagtgatttacaaaaaagcagtggttattacaaatgtcttaatatttaataatgagtacctctattaagtgacttactgatatgaactgaatgacagttgatgtaaccaaaattataagggctattttagtgcttacttgtagacatatttttgcctcaatattttatagatagttcttacatatatataaaggctgatttttgaaatatattaagtacagtgatgaactacattgtttataatgtattaggatgactttatggcagtgttacagcaataattatgtgtcggtatttatcccttttaaaaatactattagaatattagtatgttatcaatgaaagggttaatgggtcttagagacagacattgatacaagagttgtttattgtttgaaaataaggacatggatcctgaagatcttgaagaattagggataaaattcttactcattttggtgcctacagtagaatctatctgaacctatttattttctttgaattttttttttttttgacagccttctcagttgcctaggctacagccttgatctcttgggctccagcaatccatctgccttggcctcctaagcaactagtactataggcacatgctaccacacctggctaatatttaaattgttttgtagagatgaggtctcactgtgttgcccaggctggtcttgaactcctggcgtcaagctgtcctcccaccttggcctcccaaaatgctaggattaaaggtgttagccaccgtgcctggccttgaacttgatatttatgatttttcttacttaccactgtagtttgttttttttcccctttccttttgccatgttagtaccactgtcttcttgttttctctgtgatagaattttgaattgtgtctttaagttgaagtatttctgtggcttttttttttttttgagacgaaatctcactctgtctcccaggctggagtgcagtggtgcagtcttggcgcactgcaagctccacctcccgcctcagcctctcaagtagctgggattacaggctcgtgccaccacaaccagctaattttttgtatttttagtagagacggggtttcgccatgttggccaggttagtcttgaactcctgacctcaagtgatctgcccgcctcggcctcccgaagtgctgggagccactgggtctggcctctgtggcattttgtgtggtcagttaatcacacatgtgttcaatgtcctgtgtgttcctagtggtcaggctgctacaagaggcaggtttataataaaataaatacattagccctacttttattaggggaggtagagctacaaagaagtaatcaaagaaccaggcaacttgattgtaactttaagcttactcagagttaaataatagaaagtctcatgtggcatttagctagggaattttcctacatttctccacctcggctgacatttttaggttgcttgatgagaaagtggacttaaacaaatgtaaacagtctcatggtctctgaatggtctaatttcttgaagctgcttagttagctgttgagaatatcattgcacatgaacttgacatttattgttccattctgcttcttttgtagggagagaagaatctcttagaattagtggagctggcagaccaagccttgcgtagcttttcctatcatcagcatttcccgctaataaaggaaatcatcagcatttgttcaaagatgtaatattttctttcttaatgtgattacgttattattggacacttagggtgtgtgtaaacttagaaacagtgaaagtgaaactgactgtatatctttgttattattttttagtttaattgcttttatatgtgtctgatttttaaagggtatatgtacagctgcattaggatacttaactgttatattcaagattaaacttcaaaaatgtcatgcctacaatcaaaatgaataatccttggatttttatacatttgtttttggtatccatccagactattcacacacattgtttatttatctttaaagttttaattaataacttaaactgagagttttgtaacttttattactttgtacctttttcttatgtggatttttagaaaagactgtgtattggttaatttattttgaggacatcagcaaatttctatttagaacttagtgtctttattgcttttggaaagaataaattctgtgatgtgataatcattaactgagtaggggattttaaagacattttgggtttttaaaaatactctttaagacagaacctcctctgccctgaaacaaataagtgcttaggtgagtacttgctagtattggttatttttaataagatctcagtttgaggagttggagtaggaagaaatcccttccagtatgctttgcagtcttttgcttactaacttacttgcctcacatgtcttggttgttttaccttttcaccagctggaaatctgctcaggccagtccattactacaaggagaaagtcagaaggtgcttctccatatgttgtctcacccattgccacgagtgaaagctgaaacttaccactgctgtctggaaatcacgaaggtgaggttttgttttttcgtatgttttgtttttgagaacaaatagtagactctcttgttataccttcaaacttaatttacttgaccttttgtatgagatataagaactatatcccataaaagtagatgataattactagtcaattctggaaaatttgtactattaaattctcttaacttagtaagtccagcaattgaattgctttatttgaagttttattaagaattacatttatgttgtattaatgatggaaaaattataaggaaaattgatttccaggtattcaaaagtgatttctatgcccaggaaaccttttaggttgttgtggcctagattttatggttttaattctgttttttttaatgttattttttatttttcttttcttttgaaatatttatttttctgtcttcttaaatgataaaatatttcagcatagaatattaaatatttcaatattgaaaagaacactgtacataggacaatatttaaaagtatatatattactgcgtactcttgaaagtgtccttttgtatttaacactcttgtaagtactatttggttataataagtgtttacattttgccatttttacttctgattcatttttattcaaagaaaaatactagttatagaggaagcttctttgctttctcttctcccaccagcatagcctagccactcttacacagctggtgtatattcttcccatccagttgttgtatattatttataaagctgtatctttatatataaatattatctttaaataatttaaagaattttatatatagcatgattagtatatatagcaggatttgagatttgcctagttcattcaccttaactgctattaagtttgaatatacttccttttattgaatgataaatatttaggttcagtctcctttttattgaagtaagtttttcagtattttcagtgacagtctgtgactgtgtgcatacgtttgaaaatgtcatgatttcactttattttgaatagtaatttggctgcatataaaatacaggttgactgctagtttttattagcactttgccagtattgcttaattcttattcggcttctatcattgttgagaagtctgatatcagttaattatgatttcttttaatttttttctctagtttgttttaaaatattttccttttctgtggtgccctgcggtttcattaaaatatgtctccatgcatacatgattttccatttatcttgcttaggacttttcgctttgaacactccatctgccttcacttctgtataattcttggtcatgcttattttgaatattgcttttctcttatccttgctgttttctccaagtggaactcttattagacctgtgttagaccttcttagtttaccctttgtgtcttttaagccttctttcatattttccacatctttttaggttttatttgggtagaatttctcagtgttatcctttcagtacactaattctttcctcagctttgtctaatttactttttttgatggtgatatgtatatataacataaaatttattttaggccaggtgtggtggctcatgcctgtaatcccagcatttgggaaggccaaagcaggaggatcactggagcccaggagtttgagaccagcctgggcaacatagggaaatcctgtttgtacaagaaaaaaaaaaaaaatagctgggcatggtggcatgtgcctgtagtcccagctacttgggaggctgaggcaggaggattgcttgagactgggaggtcaaggtacagagagctgtgatcatgccactgcactcaagcctaggcaacagagtgagtacttcatttctggaaaaaaaaaaaaaaaaggaaaaaattttaccattttaactatgttctgagtgtacaattcagtggcataagtacattcgtattgttgtaccatcatcaccattacccatctcccaaattgaaactttatagtcattaaacaataactcctcattctccccttctcccagcccctgacagccacctttctactttctgtctctatgaatttgaggtccctaggtaactcatataagtagaatcatacagtgtttgtctttttgttactggcttatttcacttaatataatgttctcaaggctcatccatgttgtaacatgtatcaacatttcattcctttttaagacttaataataatctattgtctgtatatatgaacactccaattctgaaaatccaaaatctaaaaggctccacaatctgacacttttcgagtgccgaaatgacacttaaaggaaatgcacgttggagcatttccagttttgaattttcagattagggatgctcaactggaaagtataatgcaaatattaagaaatccaaataatttcaaaatctgaaacacttctggtcccaagcatttcagataagggacactcatcctatactacattttgtttattcatccgttgataggcatttgggttgtttccatctttttgcaattgtttatatacccagaagtggaattggtagatcacacagtaattctgtgtttaatttttgaggaattgccctactgttttccacagtgactgtactattttatgttcccactggcagtgccaaggattccagtttctcttcatccttggcaatactttttatctggattttttttttttttgagatggagtctcgctgtgtcaccaggctggagtgcagtggcacaatcttggctcacagcaacctctgcctcccgggttcaagtgattctcctgcctcagcctcccaagtagctgggactacaggcgtgcatcaccatgcccagctaagttttgtatttttagtagagatggggtttcaccatgttggccaggatggtctcgatctcttgacctcatgatccacccacctcggcctcccaaagtgctgggattacaaatgtgagccaccgtgtctggccttgtttttttttttttttttttttttttttttaataatagtaaccatcctaatgggtgcaaagtcatttcccatcatagttttttttaaatttatcaagttttgattatcacttatactgtttttcatgtctataccttttctttgctttctttaactgacttgttcttttttcatgtaatctttcattagtttctgttttttttttttttttttcaacttttattttagggttgggggtacatgtgcaggtttgttacatgggtaaattgtgtgctgctggggtttggtgtacaaatgattttgtcagccaggtagtgagcatagtacccaataggtagttttttgatcctcaccctctgatatggtttgtctttgtgtccccacccaaatctcatcttgaattgtaattctgtaatccccacgtgtcgtgggagggacccagtgggaggaggtaattggaatcatgggggcagtttcccccatcctgttcttctaacagtgagtgagttctcatgagatctgatggttttataaacatctggcattgtctctgctggcattctgtctctctcctgccgccctgtgaagaggtgccttctgacatgattatttcctgagacttcctcagccatgcagaactgtgagtcaattaaacttctttccttatgtattacccagtctcgggtatgtccttatagcagtgtgagaataggctaatacgttctcttcccaccttcccttgtgaagtaggccccactgtctgttgttcccatctttgtatccatgtgtatacgcagtgtttagttcccacttctaagtgagaatgtgctgtatttggtttttctgtgttaattcacttaggataatggcctctggttgcatccatgttgctgcaaaagacattattttattcttttttaatggctgagtagttttccatgatgtatatgtaccatagtttctttatccaatccactgttgatgggcatctaggttgatcccatgtctttgctattgtgagtaatgctgcagtgaacatctgggttcatgtgtctttctggtagaaagatttatatttttttgggtctatacccagtaagggattgctaggtcaaatggtagttctgttttaatttctttgagacatctccaaactgttttccacagtgactgaactaatttaaattcccacaagcagtgtatagggcttatagtactgtgttcccttttctctccaaccttgccaacacctgttattcttttactttttaataatagccattctgactggtatgagatgatatctcattgtggttttgatttgaatttttctaatgattagtgatattgagcattttttcatgtgtttgttgaccgtgtgtatgtcttcttttgagaagtgtctgtttatgtcctttgcccatttgtaatggggttatttgttttttacttgttgatttaagttccttatagattctggatattagacctttgtcacatgcatagtttgcaaatattttctcccattctgtaggctttttacttagttgatatttttacttagttgatagtttcttttactgtgcagaaactttttagtttcattaggtcccacttatctatttctgtttttgttgcaattgctttttttggagacttcatcatgaaatattttccaagacctgtgtccagaatggtatttcctagggttgttatagttttaagtcttacatttaagtctaatccattttgagttgatttttatatatggtgaaaggaagggggtccagtttcaatcttttgaatacgcctaaccagttattccagcactgtttactgagtagggagttatttccccgttgtttgttattgttgtcttttcaaagatcagatggttgtaggtgtctggctatatttttgtgttctctaacctgttctagtggcctgtgtatctgtttttgtaccagtaccatgctgttttggttactgtagccccatagtatagtttgaagtcaggcagtctgatgcctccagctttgttctttttgcttaagtttgctttggctattcggtctctttttttggttccatataaattttagaatggttttttctaattctgtgaagaatgacattggtagtttgataagaatagtgttgaatctgtaaattgctttgggaagtatggccattttaacaatattgattcttcctattcataagcagagaatgtttttccatttgtgtcatctctgatatctttctgcagtgttttacaattctcattgtgatttggctctgagcttggatgttattggagtacagaaatgctactgatttttgtacattgattttatatcttggaacttcaccgaagtcatttatcagttctaagaacttttgggcagagaatatggttttttcttttttttttttttttttcaggtatagaatcatctgtgaagagagagagtttaacttcctcttcctatttggatgccttttatttttcttgcctgattgatctggctaggccttccaatagcatattgaatagaagtggtgagagttggcatctttgtcttgttctggttctcaaggggactgtttctagcttttgcttgttcagtatgatactggctgtggctttgtcatggataactcattattttgaggcttcaatgcctagtttgatgagggtttttaacaagaaggaatgttgaattttatcaaaagccttttctgtgtctgttgagatgatcatgtggtttttctttttggttctgtttatgtgatgaatcacatttattgatttgcatatgttgaatcaaccttgcatccagtggataaggcatacttgatcgtggtggattagctttttgctgtcctgctggtttcagtataccaatattttgttgagaatttttacatttatgtccatcagagatattggcctgaagttttctttttttgttgtgtctctgctagggtttggtatcaggatgatgctggcctcatagaatgagttagggaggagtcactcctccttcattttttggaataatttcagtaggattggtaacagttctttttacatttggtagaatttggctgtgagtttgtctggcccagtgtttttttctggttggtaggctttttttattttttaatgactgattcaactttggaggaacacattactgttctgttcatggttttaatttctttctggtccaatcttgggagtttgtatatttccagaaatttatccatttcttctaggctttctatttggtatgcatagagtttttcttaatggtctctgagggtctttctgtggggtcagtgataatgtcacttttgtcatttctgattgtgtttatttggattgtctctttttttctttattaatctagctaatgatatatcaatcttgtatattcttttggagaaccaaaatttggttttgtcgatcttttgtgtgaatttttgtgtctcagtttcattcagttcagccctgattttggttcttctgctagctttcaggttggtttgctcctgcttttctagttcctctaagtgtggtgtcaggttgttagtttgcaatctttctaacttcttcatataggcatttagtgctgtatagtttcctcttaacactgccttagctgtgttctaaagattctgatatattgtgtttctgtttttgttagtttcaaagaattttatgatttctgccttaatttcattctttactcaaaagtcattcaggtgcaggttgtttaagttccctgtaattgtatcatttttgagagatcttcttggtaataatttctatttttattgcactgtggcctgagagtgtggttggtatgatttcggttttcttgaatttgttgagaattgctttacagctgagtgtgtggttgatcttagagtgtgtgctgtgtgcagatgagaagaatgtgttttgcttttgttgagtggagtactctgtagagtctcctaggtccatttggtcaggtgtcgagtttaggtcccaactatttttgttagttttctgcctcagtgatttgtctaacactgtcagtggggtgttgaagtctcccactattattttgtggttgtctaaaactctgtaggtctctaagaacttgttttatgactgggtgctccaatgctgggtgcattatatttaggatagttaaatcttcttgttgaattgaaccctttatcattatgtaatgcctttctttatccttttgatcattgttggtttaaagtctgttttgtctgaaataagaagagcaactcctgctctttttttgttttctgtttgctggatagatctttatctccattctattactttgagcatgtgggtgtcactgcatgtgagttgggtctcttgacagcatatagttgggtcttggttctttatccagcttgccactctgtgctttttaagtggggtgtttagcccgtttatgttcaaggtcagtattgatatgtgaggatttgattctgtcgccatgttgctagctggttgttacgtagacttgattgtatagttgcatcatagtgtcagtgggagatgtattttagtgtgtttttgtggaggcaggtaatggtcttttgcttccttttttagcactccattgaggaccccttgtaagtcaggtctcatggtaatgaattccctgagcgtttgcttctctgaaaataattttgtttttcctttgcttatgaagcttagcttggctggatatgaaatacttggtttgaatttctttaagcatgctgattataggtccccaatcttttctggcttgtaaggtttctgctgaaaggtctgctgttagcctgatggagttctttttatatgtgacctgctctttctttctagcttccttttaagattttttctttcctgttgaccttggagaatctgatgactatgtgtcttgggggtggtcatcttgaatagtatctcactggggttctctgagtttcctgaatttgcttattgacctgcctagtgaggttggagaaattttcgtggaaaatatccacaaatatgccttccaagttgcttgctctctctccttctctttctggaatgctgatgggtgttaggttcgttttgtttacataatcccatatttcttgaagtttttttttttaattcttttttctttatttctgtttgcctgtgatgattcaaaggagtagtctttgagctctgagatttttttcctcagttatgttattaatgcttccaattgcattatgaaattcctatcatgaaatttttgtttccagaagttcagttttgttcttacttaaaatgtttgtgtcagatccaatcatggatcaaaccaccattttactggtttccatgggtggggcttcagccttcttctatatcttgtcgagcttccttgccttccagcttctgaattctgtcattttagccatttcagtttggttaagaacgattgctggggagctagtgtggttatttgaaaataagaagacattctggcttttagaattgccagaattcttacactgtttttttcttacctgtgtgggcagatgttcctttaatctttgaagttgctgtactttggatggggccttttgcttttatattatttgatgccattgaggattttactgtggtataagttgggattagtcaattggcttggtttctgtgtgctttcagggccagagctcagctcagcacccctgggctgtgtgctctaaccctgggggtgcactgaacaggccagtggctttgatttctggtcccttgaggtcaagcatctgctgcactggaggagccgagatgttcccagactgctggcaacaactttccgatggtgactgcccgagaaagtgctctgggggggcgtggggcggtgctttgggagagtgcacttgtggtgggggtaaccatgggcaagtgcgcactggcaggggaggctgcaggcaagtgcacaccagtaggtattggctgtgggtgggtgtgtgcttgcaaaagcgctctgacaggaaggcagaggctgttggcaaaagacctatggggtggctgttggggagcatttcggcagggcagctgaggctgtgttgcaagctagtgagacagacaggaccctttgagaggctggcagacagggtggcattcagatcaggttggcccagtcttgtgggaaagatagccctgctctttctacttctggcagcgaactaaggctaaagccacctagaggagtatatcaagatttgggtgatgggcacctatcagggaacctgccccaatagtcacgtagtttcttttctgttttccctaagtgtcggctgggttgggaaataaagggacagagtacaaaagagggaaattttaaagctgggcgtccgggggagacatcacatgtcggtgggttccgtgatgtcccacaagctgcaaaaccagcaagtttttattagggactttcaaaaggggagggagtgtacaaatagggtgtgggtcacaaaaatcacgtgcttcacaaggtaatagaatatcacaaggcaaatggaggcagggcgagatcataggaccgcaggaccgcaggcaaaattaaaattgctaatgaagttttgggcaccattgtcattgataacatcttatcagtagacagggtttgagagcaaccggtctgaccaaaatttattagatgggaatttcctcttcctagtaagcctgggagcgctatgggagactggggcttatttcacccctacagtctcgaccatagaagacggccacacccaagggggccattttagagacccaccttcaagggcacattctctttctcagggatgttccttgctgagaaaaagaattcagtgatatttctcccattagcttttgaaagaagagaaatatggctctgttccacccggctcaccggcagtcagagtttaaggtgatctctcttgttccctgaacgttgctgttattctgttcttttttcaaggatcccagatttcatattgttcaaacacacatgctctacaatttgtgcagttaacgcaatcatcacagggtcctgaggcgacatacatcctcctcagcttacgagatgacaggattaagagattaaagtaaagacaggcataggaaatcacaagcgtatttattggggaagtgataagtgtccatgaaatcttcacaatttatgtttagagattgcagtaaagacaggcataagaaattataaaagtattaatttggagaactaataaatgtccatgaaatcttcacaatccacattcttctcccatggcttcagccggtccctccgttcggggtccctgacttcccgcaacaggcacctatggccatgccccattgcagccattactgcgccagaccctctgggctctgtgcagactggcattctgtctctggcaactcattgggcagttctcccttgcaactcaaaggtctgtgcaggtcatggggtctcccatagttaggatcctagaggatcgttgcaagagtgggctgctccatgcctgttgcacttgccacttccctaagagctgctcaaggccaggaacaagtcctctagtttcttcttttgtgttgttgtgaattttaaacatatttattttataatcttgtttagattatggtattagaatcctcccacttgttatggctattgaatcttccttatgttgtttattttagcagatactgttattttgattttcaggtcttctttggcagggtagctttttcttgtgatcttgtattctctagatggtggttgtatatttgtttctgccttgcctttagggatttgacagttagtggtgatgcaccttggaaggggtttgtaatgaagttacattttcatttgtgtatgttgaaataataaaaagaatcagaggaggaaagattgaagatagtgggtagcaagtagctaattaaaagaagctagtgcctttgaaagttgaaggcggtgggaccttgaacatgatggctaattggggttaggtgggcttagatatcacaggaagttgcaggagcctccttctattgagtctgtattttctttgagattgaaagtgagatgttgaatgtgtgaaatgactaatatgagtagatatttgataatatcaaatagtagcatttttgggctgcatgaagagcttagtcaattgtgtctataatcttaatagggagactcttctactttgcatgtttatctttggctagctggtgtggtttctgggaatgtgaaccttgcgatcaatcaagggttgagttatttcattgctgtcggggaggagggaatgcctgtggtgcaagtgagctgagtagttgaaatgacatgtcgactgtagaaccaaaggctgtaaagactacagggaagaaagtagaagggtttatggactggaggtcaaagaaggaccatatttcaagttgagtaagaagattagaaacctacatttatgattttagaggtagaacaagtgaaaagagaaggggtcctcagttatagggcaggtgagtatcattgagataaataggtcaagaaactaagatcactgtatttgggatagttattataccccgaaatttaaaatggtggaatacgatttgatatctttcttgaggcagattttaaataattattggaaataaaaatttttgcagataggaaaatatttggtgtaaattgagttattgatgtatatgatcattttggtatatgatgaatttcaagtaggaataatctggatgttaattttttagaggagttctaaaaaattaacatccagataatttttcctgtcatagaatgataggaaaaaaggaatgtcagaaataaatatgtatgtgtcagtttcgaatttgtttttaaaaaaaatgcactgaattttagtaattttgaaaattctaaattttaatatactatagtttttataaccaagtgtcatacattttgttgcaaaatttaaactgaaagaatattttttgttaaaactcgccttattatcctagttgtagaaggagataaaataaaagaatgtgaactttcatttaatgttttattttcttgttaactatttggaaatttatattagttgacactgttcttgcaaaatattgtgatttttcttttgtcacaaaagataatcatctgtatagtgcaatgtggttttaaaaaattcatgtgtatttactatcagggagttataataatccaagtcaaaagctccaaatgatgagatttcttgtagttagcccctgtgtcataaagatatagtatcttggtttggatataaggatttgtaaaggcatttcactttaattggctatgtctgtcagatgatattattccagtgtcttctggtaaatctccaaggcattgctgcagctttacctacctaaatgtaggagcgtgctagtaatgtggaggttactttttctgaagaggcaagttagctttttattgtaagacttaactttgaggacggtatggtaaagaggtaaaatagcttttaaatttagggatgattaaatggccaccacttccatgttacctacatctaacattcatttagcaatatttactggacactttaccatatgctagactgtagtgatataaagtacagaaaagagccttatcagagagcttatattctgataggggacagagagagatgtatgtaataattaagaaaaattccttaaatacataaaaagtatgtatgtgtatgtgtgtgtgtatatatgtatatatagttttctttataacactatatgtatagaatatgtatatatatatatagtttacaacactgcatatacattcaatgtatatagtgttttaaataaaatagtgttgtaaagacaatgaaaggataaaggactagagaatgactagtaacgtggactaaatttatgtaggctggctagggagggagggagaatttctagcccgaggaaacaacaggtgaaaagcctctgcttttcaggtgagaatgtactttgcgtgtttcacgaacaaaaagaagggcagtataatgagataatagaaaaatggtaccagattgggtctgaaaagtaggcagggtgccaaacattataaagctatgaattgtattctaagtacagtgagatgctatgaatgattttaacgtgatctgatgatctttctgaaaagatcactctcccattgtggggaatggattgtagggggtcaggatggaagcaagaagaccagtttcattgtagtagccctgatgagatgtggtggtgtagtggagatgaagagaaggaaatgaatttaggaggtattacggacgtggagctaattggtcttgctgataatgagagtaggagatagagagtgatcaaggatgaattttaaggttttggatctagcagttggattgatgtcccaaatatgggattgtggattgggtagaattctgttttgaacctaagtttgacatgcctttttatatcaagtgcatatgttaagtagactgttaaatataataatgctaatgctaataatttcattgataatgatagcagctaacatttattgagcatttactcttatgtatcaagtacttttataagtatattatctcattgaatcctcctaacagctctgtgagctaggtactacctctttctgaaaacggagatactttgaatttgtccaaggtcattcaactaaaagtggtgaaactgggctttgaaccctataggctcactccaaagcccatattcttaagcattgcaccacactacctttggagtgtggagcccagattaggtataaaattttcagtcatcagcttagagatgatattaaagccacaagccttgataggatcaactactgagagactagggaagagaaggctgtctaggatctaaccagttagaagttgggaacagagggagccagaagtggagacagaggttagaaggaagagtcacatgagaacagagatgaacacgttggatttggcatcgttgaggttgttggtgtcctctatgagaagctcctgtggaatggtaggaacctaagtcctgctgatgtgcattgaagagggtttggcaaatgaggaagtactgactgaggacagcgaactcttgtgaggactcgtggtgggaaggagagctgaaaaatgaattgttatcaagaggagaaagccagggccatagacacattagaatatgtcatatggtgattagaataatcatgtgaagaaaaataaaggtgctggagaaaaataagacaattttaggaagtaaatcttggtttcagaaggggatagtcacagtttagatggtagataagtatcttaaggaagtaggtgacagctattgtttagggctgaggctttagatctttgaaaaccttgtaatatgaacgaagttgctgtctgtggcatgaagttaacagttgaaagaaaaataatgtatgcaaatacatatgtgagtgtatgtgtgtaactttttgacctttgaattgttgataataggaagtagaaatttgcagaatgaaaaaaagtagtattcatgtaactcattatttattgtatttttaccttctatattgtatttaaattccattaatatttcaagtagctttttttcccctctcaccttaaatagctgctaacaaaatactattctctatcacatattgagaaaaaaattcctgatagttactctaagtgttggttcaaagtaattgtattttaggtacatagctgtattgatgataactttatataatcatatatatatcacatatataggacataaatatgtagcataaaaaattatatataataggtatattatatataaaatatgtattctttatattctatatatatagaatataaatatatatagtatataaagttatgtctcccataacttgaagtccttgaagtcttttcatgttgaatttttctttcccaacctttgtaagtaaaatgcaaacaccttaggataagtttcttactgtgtttatgtcctttgtgtctgtcatgatgaattaactttaagagattatggttgtctcagccgtttgtttacttaatttatcatgattatgcttgtggcagaaagtaatataatatgtatctcctacaaactaagaaactgttagacaggagaatctttttcattctgtcttgttaaaaaaagtttcaatgaagtaaaaactaaaatagaaatgggattgtaaacagaagaaagatggatcttttggaaaaatcagtgttgctaatttaaaaatactttttaatattattttacaggaatgtttaggtgtccataatgtcactaaacccgtgtcttcactttgcaatggaattcattttctacttcatccaaaagttctgtatgaaatctctgtatttggcattcaagagcccgaaagtgaggtatgacattaaacatgagtgaaaatattacagtaacttagatactcagctaaatcaaggtgatattctaatatagtttagatagcatggtgagaaactaaaaagaaacctgtctttggtgcattggttcagttgaagtgttatttaaataaaaataaatgttacataaaatgtgggaataaaaatacaggacacacttgatttcaaaaaattcagatcagtttacttacatttttcatctaagatgtagagaactatacagtacaggtagtaagcagattatttcagttagggaaatttttactcaagggacaaatgtacattaaaggtaaaaaattagaaatattaaggaagaaaaacagaacagaatgtaagatgatgctgtggaagtacgaacatttgaaagaaagagatgttaattatagcatctttccacatgctataaaatgttccaggtgtgtcaggtgacctagcgggacatctcatttgactggtttatcgggtctgtgttgttgagcaggtgaacactgctgccaaggccattctgttatacctgcttcagggacgattgatgatgacagcattgacctggaacaagtttattgaatctctctgtcctgtcatcccaatactacaggtattctgtgaaattcactttttatgataccatttatctttggctgggtgtgattgatttaaatgcatgcaaacagctaaactgtcaagttgtgagagaaatgaagagaagctgtgaaggcgctggggataagtgaacaggaagtgggtggctgtcttgtttctggcagaaagttaaaccaggatagctaatttgtctgtatatattttatatatctgggtgggaggttaaaaagtgaggtgcattcacagcattgactgtgaaaaatagaactcaaccttatataaaggcttttaggcagagctaacagtgctttttaaggagaccttacataactaacttgcctcatgagttctatccatgcatatgtatgattagagtgataccgtaattaacatgctcctagaaacagcttttttttttttttttaaaaaagcaatccttctggacattaaaggagtcagtttcctgtctcttttggatgaaaaggtggagttcagaaatgccatcataagcacagtcctcttttagaagagagagcctgggccttgtgccttgagactcacagattccatgcgtgtagcatttagagcactccatcttcttagggtggggatgggctgaggatctgtgaggtgcttcaccgaggggaggtgccactattagaatcttagaaaatagaaaaatcagcaagtgtcaagaaggttggcatgttttcctgaagttctcctgtatgtatgtgtattttcttttaaatacagttttatttaggctccttggctcatagaagttattttaaaaaataatgattttattcaactgaatccaaagacatttatgagttgctgataggacaatacaattcttattttcaagttgaaaagttatgtatacaattagacaataatttctctttaaaaacaaatctattagggctatgccgacacagaagatcctctgggtaactgcattctccttctaagcaaagcaagttctgacacagaagagatgcttccgtgtactacccgattaaagtccatgctgcgacttttgctagtgaaaaagccatcgtgagtacaacgtaatcttgtgaacgtcaaagattgatggaaacatgctaagaaagtatagtaactatatataatttgaaacaaaactaaagaatttttaaggagggtgttattccattactagaggaaaccaatgcgtgaaactaagcagatacaaggtcttgtatgtacttgctgacgtttcatccactttacagccaagttattccttgccagatcagcctgtgttacaggactgctactaagtgccgctcagtagtgccctaggcaagttggagagccatggagataaatagatggtaaaaattatagtgcattcccatcttctctttagaaattgttagccttccagagtgatccttttgtaaacatctgttctgaatattcagtttttcataagtatagtaggccagttgtctcaaataccagagttatgcaggtattttaatcccatatagctgtgttcttacttggggaactgaaaacatatcctttctttgactgccattaatataagcattgttttaattaatgaaaagaaggagaatgatactgtttttcttccttctctgtcattgcaacatgaatcttttctattattatttttaggtaacagtggttagattttcccttactgaaaaaagaaaaaaatgctgagtcgagatggataagcagggataaagaggaatagttggttgaaaaggctaggaagaatggacagacattcttttcacaatggataatttgtgtttcccaaaccttacatcaggaaaatacagcagcttatttatagacagatcattggactgaaagataaggaaataggtggaagttaactaaactattaagagaatggaaggaggaaaattatagtctttaaaatatctctgtattgtagagagtaatgttatgggtgatccaggaagaagtagggcagagggagttaacgtgcttgtgttctcaggggttgtcttctacacatgcagaaaagctgttccctgttaattaacatgctagtgtggtactccttacttgaacaaacccccagtttggagaattaacacaatagggggcatttcttgtttgtttttcgggcccaaggtcctcagtttaataaagacattctaaggcaggacacccccaggagcatagtgcaaggaaaggccagatctttctttgggtaagataagtctctattatatagaatttgaaacaattcaaatgacatatttgttttccttattgtattaattctaccccatcccatcaacccatccataaactccatgtagacaggaaccctgtccgttggctaatctttatattctcagaacttcatagcgtaccttatacataaatacacagtcatgcgttgcttaatgacatggatgcatcctgagaaatgctttgttaggtgattttgtccttgtgtgaacatcatagaatgtaccttacacaaacctaagcaataataacttaactacatacataacctaggctatatcctatagcctattgcttctaggctacaaacctgtacagcatgttactgtactgaataccatatgcagttgtaacacagtggcatttgtgtatctaaacatagaaaaggtttagaaaaatatagtaatataatcctatgacaccactgttgcatatgtgatctactgttgactgtaacattgttatgcagtacatgactgtactcaaaagttttaaagaatgacatacatgtataggaataactggattctggcatcctatgctaaacctaaaaagatgctaaatgtatataccagagaacaagatgcataaatacatgctttacatatctcatctctagccacctttgctaggggttatacctgtctctcaactgacaaccccagatgtgaatacagatatcattggcttagaatgtaaggaacaaaggaaaactattaggtaggtgtttagcctttctaagctctcttgaggtaactcaggaaatggagagggagaaagtttgcctgacttattagtcctctggagatgatatcagttaacaatattgcagtaaatatctactttgtgtttgattcaggaagtatttattgggtgtcttactatgtatctatgagctgtgggaacgtagcagcacacaacacagacatgggccctgccctttcagcatttagtgtgtaaccgggaatatagctcttattatcaattattctttattattaattgtcataaagtgagataaaagttatgatacaggggctcaaggtggcaggcctgcatacagaaggcaacctgctctagtctgtagtaggagggccaccctaatgatgcatgttttaattgttgtcttataggtagttcttaaaacctggcaacttgtattattgcttaaaatttgtccagtttccaggtagttcaagaacctatcagaggagtgacagatacatggttgtctcaatatctgccgcctcagtgacctttgtccactcagtggtttttctgtttctctatttcattgtttagtggcatacagtatttactcttttcttgaaaggtctcccacctccccactcagctgaccttattcctaatcccttccagataaggaaaaagtatttgtattttcatatttgacaggaatctgtttggcccctaatatgagaagattttgatacattgtagtgttatcacacttccattatgagcgtcattactctcctgtgggttcaacttaacatttggactgtggtcagcggtctgtgatactttttatggtggagaatagttcactagatttgaagacaggagttattgatttaattcgcagatgtacttattgaagtttactgatatttaatctcagtgagtctgtctcatttgtagttattattttttgtttctgatgtttattttataactattacattgaataaatcattataattatatatcgaagaatttttagtagaaaaagtaaattattactagtaatggcagtataattgtgactacttattgtactttgttgatatataattacttgtaattacaagcccttttaaaatagacatttgcatatcacgaaagttcgacttaagtactttgtgttctcagggtccgttcgctagcattaaagcttttagcattccatcttaccagtgaagaaggggctgatacaaagcgtcctctaatagacgccagagttctctccagagttactgatttattcattgggaagaaacctattgaactcagactggatgacagaagagagctggttattaaggtgactataaattttgagtttattactgtgtggtaatttgatacatttttatatcatgtattttatgtgacattcttcagtttgtgtatgtcctggggagggagagaagtatggggattcagggctggtttgaaattgtgttctggctttatctggcttctagatacgttgatttattgcagtggtcccaacctttttggcactagggaccagtttcacaggacaatttttccatggatcagggcaggagtattgttttgggatgattcaagtgcattatatttattgtatactttatttctattgttattacattgtaatatataatgaaataattgtacaactcaccataatgtagaatcagtgggagctctgaacttgtttttctgcaactagacagtcccatgtgggggtaatgggagacagtgacagatcatcagacattagttaaattctcttaaggagcagccagccaagatccctcacacacctagctcacaatacggtttgcactcctatgagaactgaatgccgccactgatctgacaggaggtggagctcagatggtaatggcagcaatgggcagcggctgtaaatacattttcctgtctttagctaggactgtacctatagcatactggactgatggagaattctataaagaaagctgtccactagtccactgttttcatggattcattcctgtgttttgtactttctcatttcactcaagtttgcaatctgtctgttttattttagactaacttgccaaggcctgtagtagtatggtagagccacatgtaatacagtcggtttttttgtttgtttgtttgctttttaatggggaaacacattatgttcttctaaactgaatgttcagggctttatgacagtgctggcagggggattggagagtcttcactggccacataccaggtctggttgggacttccctgagtactaagccattggtagtcactcctgtgccctgatgtatggaggaaggcggggagagggcattctaatacgtcttctgtgagtccatgttaggactggaagatagcagtgagtgggagaaaggagcttcatctttgttattttcttgtccctttttcctgatgctggttttgccacctcagattctgttctagcatgaagtgacagtaagggacttgtctggggggtagctttgaaggggtgctggacagcaagtcccagagtgctgtttgctctggggtcttctaaaagaaagaatggagaggcccacgggaataccagctggtggcttctgggagcaacagggaaatcttgagtcataggtctgggtcgcttttctcaggttagcctggtactacctgtaaagatgttagggaacatggttgttttctgttacctttgtaaggttgctaatggattaatgggttatgaataacttcctagcaaaaatgtatattaagaagagaggggccgggcacagtggctcttgcctgtaatcccagcactatgggaggctgagatgggtggaccacttgagcccagcctaggcaatatggtgaaaccctgtctctactaaaaatacaaaaaattagctggggttggtggtgcatgcctgtagtcccagcaacttgggaggctgaggtaggagaatcacctgagcccaggaagtcgagtctgcagtgagctgagattgcaccactttactccagcctgggtgaccagagtgagaccctgtctcaaaaaacaaaaaaaaaaaaggaaaacttatttgacatgatgactctttattttagatcttaagttccttcctgacctactgcatcattgttgcaaattttatttatttatgtatttattttaaacttttatttcagtttcaggggtacctgtgcgggtttgttatataggtaaactcgtgtcatgggggtttgttgtacagattatttcgtcaccctggtactaagcctagtacccgatagttatttttcagatcctctcccgcctcctaccccccaccctcaggcaggccccagtgtccgttgttcccctctttgtgtccttgtgttttcatcatttagctcctgcttataagtgagaacatgcagtatttggttttctgttcctgtgttattttgctaaggataatggcctccggcttcatccatgttccctcaaaagacatgatctcgtccttttttagggctgcatggtactctatggtgtatatgtaccacattttctttatccaatctgccattgataggcatgtaggttgattccatgtgtttgctgttgtgaatagtgctgcagtgaacatacacatgcatgtgtctttatggtagaatgatttgtatttgagtatccaacatctataaggaacttaaacagatttacaaaaaaaaaccaaacagctccattaaaaagtggacaaaggacagaacagacatttttcaaaagaagacatacatgtggccaaaaggcatatggaaaagagctcaatatcactgatcattggagaaatgcaaatcaaaactgctacgagggaccatctcacaccagtcagaatggctatttatttattttttttgtgagacagagtttcactcttgttgcccaggttggagtgcagtggtgcgatcttggatcactgccgcctccgcctcctgggttcaagcgattctcctgtctcagcctcccgagtagctgggattacaggtgtgtactaccacacccagctaatttttgtatttttagtagagatggagtttcacaatgttggccttttgtgtttctagtagagatggggtttcaccatgttggccaggcttgtcttgaactcctgacctcagatgatctgcccacctcagcttcccagagtgctgggattataggcgtgagccatcgcacccggccagaatggctattattaaaagtcaaaaaatagcagatactggtgaggttgtggagaaaagggaatacttacacactgttgatgactgtgtaaattagttcaaccattgtgaaaagcagtgtggcaattccttgaagacctaaatacagaactgctacttaacccagcattgtgtgaatttacctgtaattatgttggttatttaaataagttgactttttgagcttttgttcatagggcacaaactataaaatcttattggagaattggaagcagataaatgtaattttggtttttttttttttttggtttgtagttggagactgttgaaaaggtatatgaaatcttcacctcagatgatgttgatctcgttttgagaaagtcagctgctgaacagttagctgtgattatgcaaggtaatgtcttttaagggaaatgattgctgtactgctgataatagaattttagattgccatatggtactggcaggagttggcaactatggtttatgcgccagatccagcctgtggccttttttttgacagccctcaagaatggtttttgcatctttagagttgttaacaaaatccaaccaaaaccaaagaatatgcgagagaccatatgtgtgtgtctagcaaagcctaacaacatgcttactaacctggttctttacagaagaagtttgctaatgccttattattatttgacctgtaaaatgccatttgatagaattatcttctttctaaaatattagtgtacttccaatagtgaagtgcatgttccttcctctgtttactgagtgcatgcatcatattttcaatctgtaccatcttgcttagggaaattaatcaaataatacttttgtggtaggtaaaagaaaaatagtacactgtagctatgccttttctttaaacgtttatttttatttttttaaattatactttaagttctagggtacatgtgcacaatgtgcaggtttgatacataggtatacatgtgccatgttggtttgctgcacccatcaactcatttatattaggtatttctcctaatgctatccctcccccaacccccaactctgtgacaggcccgggagtgtgatgttccccgccctgtgtccaagtgatctcattgttcagttcccacctgtgagtgagaacatgcggtgtttggttttctgtctttgtgatagtttgctgagaatgatggtttccagcttcatccatgtccctgcaaaggatgtgaactcatccttttttatggctgcatagtattccatggtgtataaatgtttatttttaaaaacaactagtgtaatacactgttagctttgtttgtagtgttgttattccataggcttttgttctttgggttagttttgaatttttccccatacgtgatgtatgtactttaatatttatgagaaatgataactttgagtttatgtaaaaagatttttatggttagcacttcttgtcttgacattagtggaaactggaatgagagagttatttgaaaaaacatattccacatatttttagttttaacaacaatcacacagactacagaaaagaagactagaaaatgtggaaagccctggttaaaaaaaagatcaagaaaaactcgttaaagagtattccttcaatattgttaacatttcaaaagtatgccttataattttggtatgcactatattggggggcaatggaaatttttttttttaagtagcagctaaagattgttacaatgatagcttccacttcaatatcagtatgtgagtgtatgtgtttttcctaatgagaatataggagaaaatttgtctgcaagttgttaaatacttgtaacgaatatataatcaattacagttttgggttccggtaacatttgtgtgtgcgtgtgcacatgtctatacatataagatttttttatgtatatacaaaaacttctttattacaaacataatatgtgaatatatgcttattaaaaagaagctcaagttctccagaaatatatagtgtattataatcttgttccttttatatttgctattaatagtttgaggttagagatttttttatagatagaaaaatgttcatgttgtaagtcatattttacacatgagcttgtggagaattataaacatttgaaggtgataaatttggaagagtcaatgaaataatataaagaagataatttgcatgtataaatataagcattcatttgtacacttaaattctcgtagttttcagagtctgaactagttccataattctttttttatagttttgtattttatgtgacagaagtaagatatgctttttacttaaacattttcaaattggacaggtgtacgtaaagtaaaaagttaaaagtttcatactcttatgtcaaccccaggtctaagtatttttaatagtttgaaggttgtgtggatatcagttctgagtatttcaaaatacgtgttttaaactacaaaaaatgtgctttaacttttagtaactttttttatctacagatattaaaatgcatgctgtggtgaaaaagttatgcttaattgacaaaataattgagtatttaaatgaatgtgtgagtcaagatggcaaggtaaggctaatgtgcatctagacattgttttacaggctgttttgattaatcagatctgaaattgaactgagcagaatttggatgagtacttggattttaaattctaagtaacacctcctatctcattcattttttttttttaaattcgaaaagtggagtctctataaaggaaaactaatcctaaaatttccataagataggtgatagaagtatatacgaaacttactttcagtggaaagtaattcctagtatttatttacattttagtttcagataattttgatgaaaacgcataaaatttagagtaagataatattatggtctgtttgatctcacctgataattggtgaaaatgaaaagctgtgtttttcctcctggcccaggttgtagaatgtttggtacaaccatgcctcacactcttgaggaaggttttatgtggtgatccagtcatgcgtgtttcgctctcgcaacagtcttctcttttgaccgtgttattcagaggtaaataaaagaaaatctgctaataattagattgttcttaaattttaagtgtttcttctttaattgtaagtcacatttactttttattttactattagaacaacagcatttattagtgaatacactactaatgtaaatggaaaatgtttaatatttttgtggaaattgctttctaatcctgttgctgagtggaggctagagctgagaaaagctgaaacctctgattgttctttgtgccttgatgtagatgtcatctggtgctcagacagtaaactattatctataaagagagaaagttgcagctgctgttattactatcttctttccaatatctctttcgtctttcttgttttgcttatacctttggatcttggtacattttgtctgattatttcatttgacaggtgttaagagtataggctcaacctgtgtgagtagaaactagaccatcctaaatgactctgagcctaaatttattacattctataaaatgtggtttttaaaaacccattttaatttgattctaatttagtaaggtgttagatgaacacgtttcatgtagttttgtccttcctgtcttctctgtttttttttttttctcaatggagagcttggtaacattttgtactattttttttcttagagacttaggccactgctttttgatattttgcaagagtcatgtagaatcatctgaatgtgctgaagagtcacgtacaagcatctgaatgtgcttcatcttgtctattatcaggcatataggagataagtgagatttatgttcaaaatatgttattataatgtagtcattttattttagcatcttttcctcctgttggcttctgcttgccaagtgagtaagatgcagtttatttaagtagcagccctaaaaccaggtaaagctctaaacagattcagtgtgtttaggctcataacattttgagtggactataacgtttttataagattgtatagactgatcatctgaaagagcagcagttacggatttttagttttctttaatcctgttaataattgtcttcttattaacctcattcacttgaatttagttcctggtttaccttttcatttataattttcatttaaattattcaagcatggaacttattatgaacacctactggattcaaaagcacatttcaaggcaatataatctatacccttttcagtatttcagtttttctatttcattgctgtttgtggaaattactttcaatgagtttgagaatgaatatagtatcctccattaatggatttagtttcaggaaaaattttacttacttacttatttatttattgagaaagaatttcactcttatcacccaggctggagtgcagtggcacaatctcggctcagtgcaacctctgcctcctgggttcaagcatttctcctgcctcagcctcctgagtagctgggattacaggtgcctgccaccatgcctgggtaatttttgtatttttagtagaggctaggtttctccatgttggccaggctggtctcgaactcctgacctcatgtgatccacctgccttggcctcccaaagtgctgggattacagtcgtgagccactgtgcctggccgaaaaattaatttttaaccagctgcttaaccaagaaaacccatttctcagcaaacgtttattaagcacatgctttgtgctaggtgcaatgctaggcccttgggttatattggtgagcatggtaaatgaccctcatggagcttacagtagagttggagacattgacaagtaaatatacagtacaccacagtaatacttgtaattggggattcctggtgccagaggacatgctggtcagattggttggtgaaaagtatcagagattgtttctagggaatgtggcatctaagatggaatttcagaaatgagtaggagttcaaataggcaagattgacttctagatggagccgtggttgtgtgtatgagaaattgatgtgtttgagatggagctggctggatttggggagtgtggagtgaaggggaaatgatgggatgaggcagggagggcagttcgtgcagggcctgggagattttattaaacagcagtgaagagctgtttaaggttgttaaacaggggagtatgtgttttaggaagattatttctgtagcatggatagtggatcaaatgagtacaataaataacttctcagataacactgctttgaattataaactttatgttatgacagaattctatagtgtatttcagggttagaaattaacttagaaatcatttactataccatctgtgtgaggtctagagagatttagcaacttggccaaggctataaccaaaaaatggttattgggttatttactttgctactgagagagaatcgaaacttccttacctttgtttgtttctgttttaaataatcacagacctatacatccccattgtaaaaattcaggcaatatagaactatacaaattctaaaagttttcattttcttctcgttctcaatttccccaaagaagactgttctggttatcattaggaatatatttttccgaatgattttttctacatacacatgtagttttcattctgtatattacagtattgtgttgcttccttttttcaactggaaatgtaacttgaatatctttctatattatttcatgtgagtatacattctttaaaaaaccctaaaaactactgcactggtgttgcagaatttcagtttgctatgttactgggtatttgttttagatttttcaccatgacagtaatcatgttgtgtgatcatctttgtgcattcagtgttggaattcctaggtcaaagagattttataagataatggttaagttcctttccaaatcactctcaccaaaggtgtttaaaaatgcttattttcattacaactttgccaacactgaatatgtctcattaattttttttaatcttataggtaaaaatatataattgttttattttcttattttagttttagtgaagttatcttttcatatatattcaaatttcttcatctatggattacttattttcctgttgtatttactttctttttagtgacttgtagggttttttattataagataggcacaatccttatgcttgattttatgtgattaatattttctctcaacttttctatcctttaaatttatttattattatatttttaaccttaaacttaaatattttatggaaacatatagaacttttctgttatggcagttgggcaattttttatcatgctcttcaagtaggactttctctagttccagattgaaaacacttttcctgtgtttcaagtgttgtttaaaaaaattaaatttgaaatcaggcaaaggcattgctgtaattcttatttatttggaaatattatggttcattctattcatcactgatgtgaaatgtcttttattataagttaatttttacatgttctctgtttctttactttttggtttatggctatttttaatcatgccaattacataaggatgattttcttttcctgcagttaggaaaaatctcttctctcaaaacttcttattgctgcttccctgaatttgctaactgtgtattatgttgttattcctgtgagataacatcgtacttctttgtttagaatttcataggtttcaaggagattgtagcattgggatcattacagaagtgggaactgagacttaatgttaaagaatctcaccagggcatttagctaagtagtaagtggtagagctagtgttaagtctgtccattcagagcacttcccttttccatcatcttgtcataattaaaaggaaccaaaacaatgacacagcccaaggataacattttaaagtcaaatccaagttctgtgatcacatgtttgtagtaaagggcaaaagttataaaataagatctcttggtgaggaaactttagctagaattatctgactcggcataaccttcttagaggctgtatcagtttgtttctctaattacctaagactagacagtgtctagtgagtgtatctacaagtgtggctcctggactggcagcatctgcatcctctgagaacttattagaaattcacattcacaggctccaccctaaacctatccaatcagaaactgttttaaccagccttccaggtgattcttgtacatccacaagtttgagatgaaagcctgtgttttagtgtcaccttatctgggtttatgttgcatttcttttctcttcaaatcaagatattttaaatttgaagttcattctttctagacgtacaaatatttcataaagttgtgcttctttttattcagtttccttaatatttcatgaagattgtagtgtcgtgactgaagttggagcactattttgtcttctattatttgatgaagtatcgagaatggatatgtggtgagatataagaatttataagttttttactcttaactatttatctcaggtatctgatgtaatcttatagcaaggcatggaaatttctgatttacgaagcttatgctgtccatgctacacatatgtggtatgaattttgatttgaataaacagtattcaaaagcctattagctcagaaagtctatctcaaattttatttttaaacattactaaatataaactttaaaattactgcagtaatttttgtctttaatacatttttagtacataccttcaactatgtgtttttttcttaatatttcatgatttttaaaaaacctcggaagatatttaggacgatagtatatgattagcgctgatcttgagcaggatccgtgggaggagacgcacaaagtccacctgctagtcccaccactgcattgtatgaatcatttgttatgtggaatttttttttaaaacataatttactcttcataagcaaatctaggaagtagcaaacatgttgtttctatactaaatgatagactcagttgcactgcttgatttcatttgcagtcaacgaagtgaggtaagttgtatttgttagacaaaacttggtctactcagttgtttctttgtttttgtttttcttttatgaaataggtctgttaatccttccaataaaccttctttgccatcggtcttcagtttgcctgtttccgtttttagaaggtaaaggatttatttctctgattttcttgaaggacgaaatgttgttacagaaagggaaatcaaaatctataatttgtcacaattttcatttagcatttaaatcccataacttgggctttcatggttccttcacaatggtgctttgaagatttcagtaagtatatctccccaccaccaattttttattttgataccgttcaaatttacaggaaagttgaaagctatacggtgcatacttgtatgtcgttcagcctagagtcatcaattatttacatatgagtctctttgctttctctctcctaatatatatttttatttatatttaattctccctcacccaccaattggaaataagtttcagacataaattcactcctttcctatatattccagcatgcacatccttaagttaaggacattattctacataactgctacaatatgatcccatctaacaagattaaaaataattctataacatggtgtggtttctccagttatctccaagtatcttttgtgtatattttttcagaatgcaataaccagttaaggttctgcattgtatttggttttcatgtctctttagacttttgtaaaaagtaaattgtttttattgacatatatcgtacataaagcatacaagtcataagggtacagcccttgaatttttctgagtaaacgtacttatttatctcacacagattgacatagaatattactgacagaccggaaaccctttttgtgctttctcattaccttctaccaccccaaaatgtaatcctattttaatttctattgctgtacattatttttgctagtttttgaactttataaatagagtgcattattatattgctttttgctcaacttggagagatttgtccatgttgctgcatgaagcaatcaatagttggttcatttttattctatgtagtattctgtctaagaatatacaacacttttatttaccattctatttgtggatgtttaatttgttttctgttttgggctattatgaagaaatgactgctaagaacattcttgaacacgtgtcattgttggaatataggatatttatgtttagctttagtagatgttaccagacagtattacgaagttgttgtgctgatttacattcctaccatcagtggaaaagtactagctgccccacatcctcactagcctttggtatttgcattaccagtcttaatggtgtttagtttggctaaataatgaaactcacacgactgcagtagtcatgcttagaatgagatcacatttgtgggtgctgggagctgtcttggcttggaagcctcatgtcccaaatagaaaatatgttctctagtaagtgtgctgtaggcatagtttccaggttgcttataagagccacagcactcaagattgctcagagctgtgacatcccatcatgcatttatagtttattcctagatgtctcagtccagatgtggggagtcattttcatcataagcaaagcagcttagtaaattcttgacattccatatctatctgattttactgggtaaagggacagagagttacctcaatatcatgtttgtccgtaaagaggagaaagggttttattactcttttactcacagtaatgttggcatttaaaaaattgttgcccatctgatggatgtatagtgtatctcaaagtggtcctgatgtattactctttgctttttattattttcttccttctgtgtttttcaaacttaattttctgttcattttctaacttactggaggattggccattgattattagccgccctttcatttaaagctatcaatgtttctaagtatggcttttggtatattccacgaatttgatatgccatattttattatttagttcaaaatattttctaagtgttttgtgatttttttttattgatgcaagggttgtttagagttattgggggtaactagtgaagatttagtttattaggttttctagttattttattattaatatttagctaaatattgacattagaaaatattttctatgattttaattctttagagtttgttgaattttactttatggcccagcatatggtcagctttttaaaatgttccatgtgtacttgaaaataataatgtatatgtagtagttgttggatatactgttctataagtctcaaaatatatcaggtttattgatagtgttcagatcttccctgtgtctactttattatatgtgtgtgaagttctttcaggtagcagagaggcatgttaaaatctccactatgacattgtcattctggctgacaatgtattttgaggccatgtaatttagtttgtaaacatgctggtgggttgtctctatcattatgaaattatttctttatctctagcagtgcttcatcatatagaattcactcgatctcttatgactgtagcttccccagcttttatttggttagtggttagcatgatatgtatttttccatccttgtagttttagctgttctgtgtccttaaatgtactttttttttttaagaagtatatagttgagtttttttgtccaatctgacattatttacagttttaatggaatattttaatgcattttacatttactataattactaatatttttggatacagattattagcttgctattttctatttgtccaatgtggtttttttctttctttttcctctctggcttttcttgattaatttttaaaattagtccatgttttccagctgttaacttgtagttacatatacattaagtattttatttatttatttatttgtagcgattgggatcttgctttgttgcccaggctagtcttgaactcctggcttcaagcaattctcccacctcagcctcccaaaagtgttgggattacaggcatgagtcactgtgcccagctaagtattcttctatatacattatttctatatattttatacagatgattattcttttataatatagagattataatttacttccttgactgtgaactagtatttttaccacatcccagacaatgcaaggaccttagaacacattaattccatttatttgctcttcttttttttttcttttattgtcaggtatttaaattctatacatattttaaattctataagatgttattataattattttatgcagtaaatagtcatttagatttgtataccgtggtcgtttctgttactttttattgcttttttggtttttctgcctccatctgagaatttgtttttttaagagttttttattatttaatgtagtgcacttatattagcaatgatttctgtcaggttttttttttttttaatctaaaaattctttctgttttaaaaaatgttatcactaggtatagaattctaggttggcagttggagtccatttttttgtaggaacattggctgtcagttttattgttgcttctttgaaggaactgtgttccccattctcttaggagttccttcagctatatcccacagcactttgcttgcttgcttatttatttgggggagtttattttatttttatgggtatataatagtacatatttatggagtacatgtgatattttgatataagcatacaatgtataatgatcaaatcagagtaattaggatgtccattacctctaacatttattgattctctgtgttaggaacatttcagatctgctcttctagttattttgaaatatacaacaaattactgttaactatttttaccctattgtgctactgaacactagatcttattccttctatctaaatttttatgtacccattagccatcccttcttaattccccccttccccaccatcctttacagcctgtggtaatcatcattctactctttatctccatgagatcatttttttttttttttagctcccacatataaaggagaacatgtgatgtttgtttttctgtgcctggattatttcagttaacgtaatgacttccagttccatccatgttgtttcaagtgacaggatttcattcttttttacatctgaatgatactccattgtgtatttataccacattttaaaaaatccattcatctattgatggacacttaggtagattccatatcttggttattgtgaatagtgctacaataaacatgggagtgcatatatctctttgacataccaatttcctttcttttggatatatacccagcagtgggattgttggatcatatgtaggttctgtttttagttttttgaggaactccatactgtttccaataatgactctactaatttacattcccactaacagtgtgtgagcattctccttcctccacatctttgccagcatctgttatttttttttgtcttgttgataaaagcctttttaactggggtgagatatctcattgtggttttgatttgcatttctctgatgattggtaatgttgagaattttttcatatacctgttggtcatttgtatgtcttttaagaagtttctattcagatcttttgcccagcttttaattggattattattattattattttgctgttaagttgtttgagttccttatatattttgatggttaatctcttgccagttgaatagtttgcaagtgttttctctcattccataggtggtctcttcactttgttgactgtttcctttgctatgcagaagctttttagcttgatatgatcccatttacttatttttgctttgcttgcctgtgtttttgaggtcttacttaataaatctttgcccaggctaatgtcctgaagcatttctctaatgttttcttctagtagtttcatagttgcaggtcttacattaagtctttaattcattttgatttgattttcatatgtggcgagagatagagatctagtttcatttttctgcatatggatatccagttttctgagtaccattcattgaagagactgttctttccccaaattatgttctcggtgcttttgttgaaaattgaccaaatgtgtgtatttatttgtgcattctttattctgttttattggtctgtgtgtctgtttttatgctagtatcatgctgttttggttactatagctttgtagcataattcagagttaggcagtgtgatacctccctctttgttctttttgctcgggattgttttggctatttaggaccatgttttgttccatatacattttaggagttttaaaatttctttttgttccttttaggatgcaaatttacatgcatgttagattatttcaccatgttaaaggaaaaacttgagacaaaatacacatgcatgtgtctttacggtagaacaaaattaactttggtttaaaagatactgctattgaatctgtttttatttctaaacatatttcttggttcttgttgaatttattgatgatgaaaccatgttctcaagtgaaaacaataagctggaattcagtcatttagtgacctctatgatcataggcaattcatttatcagctttaagcctcatttttgatcatttgtaaaataggtatcatagtgccataccatgtaactgtgaatgaatgatacaaaataagcagtgtttggcataaagtaaatatcagtgttttagctgaacaccttttatgtttggttcactgtattcatggtccctgacttcaaggagcattagttatctccacaacaactctaatatagcatagaatgtggtaagtcctcaagaaaggatttaagtgttctggggagtttagaggagatgaaaagaataattgaaatactgtataaattatgataattgtttaaaatagggactaagagaaacctttgcattattgtgggttgggaggcattgaactagccctcatttgtggctcatctttttgagtagcatttaagaatttgaaagtttgtaattatttgtacacattttctttaggtaccatctacctgttcatgtaattggacaccatgctgtgagtccttactccatagttttgcccttatctgctgattgtttggccttgaagccggtgtcagatatgctgagaatagcttggaacctgtcatggtatcatgggagtgataatctgttgaagcaaatgaactctgaaactaaaacgcaagagtaagctcttatattagtttaaaaagcatttgcaattaattaattgtaattaattagttaagttttactttttccttaggtccagtagctttttcccttggtatcatctgattctgctttttaacagttataatttttactttcttttaaatattacatgtgtttattacttttaacaatctatcatatgggaaaactttaaatgaaaaagcattttactctgtactgttttagaggttaaagtctgatttgttcgtagatatgaatcactaggaaaagggtcctggattagaacaaaatctcagtaagtatatgcatgagtgttatcattagtgtgatggtgattacttttgaatatcttaatattctaatctgtctgtcttaagtgaataaaaatttttataaggaggaaaagtcaatataaacatttgggatgccaatgtaaaatcctaatattgacagatatgtatcagtttttcttctggctgtaagtcaaccttttgttaaaagaaaatgaagataaaacagcttttgggagagtttataatagaaataagtgtgagcttttatttaaatagctttatgttcctccttcattttttttctttttgtctagaattttagatgcattgaagttatctacagaggacatcctcactctgaagataacacacatggctagtgggctgcaggactgcctccattccattgttcaggctgcaacccacagggaagttagggctgctgtcaccaggatgagtttttatcttctgaatgacagattgtctttaaagggttgccctggtccatgtggggttaccttgaagtccttggcttggcacaccgcactaaacaggtcagtgtaaggtcaaggctgccagtttcaaagacctggattgcattgtattgtgttcatctcctaacctttgaagataagagtctatgcccttactgctgctatcatagaaagaaaaactccaggatttttatcatctgtaataatagccaaagagaaatttttaatttagttattgcattgttgaagggattattaataaacttgtaacaatttattcttagaaaattttacctcacaaaagcaaataattaggataagacatggatgaaacaaattgaatgtttatttctatccatgttataaatgagttgagacatcagtgaattgattaatagctgtgatacacctgccacaggctgttttgttttgcttttgttttgttcttaagtaaattatatcatttttctttttactctcaatttcatgaagttgattgccatgtggcggtcctttatagcagttaattgagaaggctctagcttgtcaatttaacatgcttaacttgtagcagatggttgcatttgcaacaagactgataagcaaccactgcaagcaggttttcattttattcttcatgtgactttagtataaaatgtataactttattatttaacataaaatgtgcagtttttaagctgctaggttaaatgagtttccaaaatatgaattcctttattagtttagctttaaaaattagtttatctgattaggctttccagtggtgtgctggtgcccactaatgcagccttgtgagagagctgatggttgaattttcaggatttttgtaaggtgattgttaaacacagccattcttaattatataaacttacaattaaataaattatatgaagacaaaaggtaatgaatatgcaaacatcactttctaattatgtggcaacattttactgttatctttgttcttgaggttatgcatacatatgcactacaggggtatgtattttatggaaataactacaatggagtaccactgtgcatctcttcacaacttcatgttacatggtagctccacattgtctacagtagtatatttacaccatggaaattgacaaacacaataagtcagcactctcagttacatatttatcagcacactcccgcatttaaacagtctcgccagttgaagaatgcataaatccttcactttaaataaatgtaatatgtccctatttgtcaaaagaaattttaacataaaagctgattgaattcattgcactaagttttctttctcttgtgaattaaaaccatagaaatagtatgcaataccacattacaggaaagactctcaaactgtgggtcagtggaagcctttagagtatttcaaattgcccaatagcagtaactgtatgtgagcatcacattttttatggttagtttcctcaggactagtgtaagtggagagtatagactgtgtatatgtttaatatatacacacatgcatatataatattcatcttgtatttggtttttaggcctgtgtttgatcatggcaacacagacactactgcctaatttataaatattcatgtatttctgctgtattatgtttcactaaggaatgtatcaaaaatatatatcacagaatccaccttttttcatgaaaactttttaaaaactttacttccagcaatgtatgtactaatgaggctttgggaaactttagttttgctttcattcagtttaatgatagaaaggaacattatctttttgactgattatctaagatgaaccaacagcttaaagggtgcttggagatagaagattcccataaatcatggctgtataaagtattgagatattgagaacatttttataagcttagtttaatatttttaaaatacagctatttcaaattatatcattctagacaaaacaaaatatagagaagcatgttcatacctgtgtgaatggttttttattgtattttaaaaataatgttattttttacacattttccatgtcagtaaatatactttgaggctaatttttcaaatatatgatatatccaaatgaatgttccgcaaaagaggtccttttaggagtgagtgtgtatgttagaataattctggctttgctcagatattttgaaattgtcctctcaggtcatttaaacagcagatgtaaggaagtcttattatattttgaagttatatttaattttttactaaaaaatgatattagcaaactcaactatccagagaagggtaaaaatgatttttacatgtataccgaaatgaacaccaccctaaaccatgactatttatcactattaacaaaagtatatttcagtttgacaaaaaacatggtttctaaaatctttttacttacggtactgtggcttctaaacataactttccaagatgattattttaacagcccaacattaatttatgtgtatgtttttatatgtgtatgctaacacacaagcatacaattataatctaatatcattttggaaacttattttaagaaaacagatgatagtcatggtttagtaggattacaagttgtcagaggtatctagagtcttctttcaactagtttctgttgagtttgcatgtttaatgcctctctactcctttcctactggaagtcctattgctactgtttttctccatttttcaccagactgtagactgactagcgaattggtttttctgcttttaaccttatgccactcatttatgttgcttcctgaatgatccttctgaaatacatgtcacctgtgggttctcttccatggtgtgctagatattaatagaattccaaccccttagcatgctgtagaaagttctttttgatctagctcttgcttaccttttcagctacagtttcctcctctctctctaacatatgctgtgtttctatgaagtgcaaatattggggttttatgaaactgcttgatattttagggcatacacttctgttttatacatccttgcttttacatagttaactccttggctgccttgtgaatatctactcttccttgagctccagggtcttcttactctgtgatgtatgtggaattctagttaccctgattgtcatgtggctttcctgcattacttctacagttgtttaaatatttgttttctcatgtgccttgggtttattacattcctttttatatccctcacatatcgcataagtcatagtatacagttggccatgcagcctcagcgtgaacacctcctttgaaggatattcattctgtttttgcgctgtgattattcgtaagttttttgttcttttagactgtacctgatcatttctacctgttattctgtcctttaaactcacagaataaataatgtcttcacatgtgacagctcttcatttaaacataactataatttcttctctattccccccaccctgctttaaatgatttgtttttttttttagatagactttaaaagccacagtgtccagacttctcatttgttcatgctattttacaagggtattgtgtttcttaggactctccctgagatctggacatgataccttatatgggtgtggtgctgtggcatggggtgaataggaagaaaggggctactgcctttcttttcctactgcttttccatcattcaacaaacatttattgatcacctactaggtgtcactcttgtaggaaatatagcagtgggcaaaactgatagggtcctgctctcatggaacttggaattaagacagctaaaagtataatcaaaagtagaaatgcttccaagcagactattaggaaactgcattagaggagcaccctatccctcttcagtagagagaaagtggttcagagaatgaagcttaagccaaggcataacaggtagaaggatgttaaaagtctatgggattggaagccgaaaagataccaggcacacagagaaacaaataccacatgatctgtcttatatatggaatctaaaaaagtcgaattcaaagaagtagagtagaattgttaccagaggcaagtggcaggtggatatgggtagggaaaagggagacgttgctgagaggttacaaaattccagttagacaagaggaatgagttctggtgatctcttacagcatagtgactatagttaataataatatatgtttcaaaatagctaaaagaatagatgttaaatgttctcaccacagagaaataagtatttgaggtgattggtatgttaattagcctgattggatcattccacaatgtatacatgtgtcagaacaccacattgtatcctaaagatacatacaattattatttgtcagttaaaaataaaacaaataaatggaatatagtttggtgcatgttatgtgacagaaatttgatactttgaatccgtaaatggatggtcagttgactcacaaccacttgcagaatatattatttctcctctagactaaaatgccatattcaacaaatattatacaaattaattttttttttaaatgccaggcaaagggataggccctgagttaggaaagagtgtcttgtgtcttcaagaggaattgaaaagaggatagtacacttagatttaggggatatgagggtggttataaaatggggttacagaggtgatattttaatgttacactggatatcatagaagacttcttataatctttgtgattgttaaatcataaatctcccaaagatctatggttgttagaatcacctctcaattttcataatccggcacttgccatcctactcagctgaatgtcattttggggatgtgagaattttaagtaaggaaaaataataatgagacaaacaccacattactaagaaatacagcattatatatccctggtgttggactgcttagtttagtattcctgttttaaaacttgctagccgtgtgactgtggaaaaacgacttaaccatatttttgcttgggtcttcttgtctttgaaatagaggtgcctacttcataatgttgttatgaagtttgacagaaaccctgctgttagaacataggctggcacaaggttggtgctccataaatgctgagtattaagattcgtattattgtcactcttattaacattttgatgcaatggctttagatttataaaaaataaaacattacagataaaattggatctcatatctcttgctgattgctttttaaaaaaaacgatttccaaactacttctcccttttaaataaaagttttattgtctactaatcttttagctctcttaaaccagtttttttttttaaagaaatcttagaaaattggctcatatccttttgctctgaacttaaaaagaaatttcatcctaagtctaccttcagtgttttccttgcctgttacaaactctagtagcgtccttgcaggcctttttttccccctcactttattaccttattttttcgagttggtcagaattaggtttgaagtactaattcttctcatcagtgaaacatgacattcccagtatgaaaagcaagtttcactgggcggttattagagtcagtgtttttccccttggtatttttttggtactttttctgaatttgttatttttctcttatgatatttgtcacttctagttattttagttacttgtccacatgttttttccactataagctcatgttcttgaaggcagatacccagtttgtttcaactttgcattttccaaagcatttaaaacagtgtctcataaaatagcatcctcacaagacatctgttaagtccacatatctatgatgaacagtggtattgtgtattttaaagcgccagaaaccatgattattgtcttttcattataggtttttacaggtgcttcctgcttgcactgaagatgagaaactgctaatagatatcatacattttttaaataaattaataaaggaacaaagaaaaaattcttcactagaacttctaaactggattctcgaattacttcttagacatgtaagtggtgttaaggaatttggattttaagtttgggaaataacttatttgtagaaatcattaacattatattatggaaaaggataattttatattgtctatgcttggtaaagtagtcttcatgtaatgaatggctcataacaacatggctttcctgatacgattgtgaatgtgtttattaaaattctgtacagtgaatgggacctacagtcttgtgtttaataaaacctgttctgcatgtgaactttctgctgcaactgtatttttaagtggggatttcagttcaggtggcaggggacagggtggatgtccagataggcatgttgagagttagctaacaaagccagatggaggcaggagggggtatagtgatggtgcagttataaagataaagtgtgttcaggccttaaataacggttactggaatatttacccttctagcccccactactgtcagatttttagctcttctaaaaattctaaattttttttttttattttttttgagacggcgtctcgccctgtcacccaggctggaatgcaatggtgcgatcttggctcactgcaacctctgcctcctgggttcaaatgattctcctgcctcagcctcctgagtagctgggattacaggtgcctgccaccacgcccagctaatttttgtatttttagtagagacagggtttcaccatgttggccaggctcgtcttgaactccggacctcaggtgatccgcccaccttggcctctcaaagtgctgggattacaggcgtgagccaccgtgcctggctctaaaatttttctaaatagctattctaaaaattttggctattcagatttcttattctaagaagcgtgtgaagaacccaagaagccaggtccctgttgttggtctatctgtctctttatgtatttatttgcaaataccgtatgaatttactcaacttagctaagataaagctttacacaaataagaagaaaaacaaaacaaaactagaaaagagggcctaaactgatataggacatagtggatcttataaggcaaatatgtttcattatatattaacacatttgcgaaacttagagataattttatgtaaaaatatgaattactgtgttgtcagaaatgctaactgatatgaatgtttgtgtgtatataaaacttatttagaggtttattatcgtcttaggctgttttctgttgtttttaacataatatcagaagctgggtaatttataaaaaacaaaatttatttcttacagttatggggtgcaggaagtccaggtttaagagggcatatctggtgagagccttcttgcagtggggactctctgaagagtcccgaggtgatgcagggtatatgtggtgagggggctgagcatgctgatgtgctatctcaggtttttctcttcttacaaagccatcagttccccttccatgataacccattaatccactatccatgaatggattagtctattcatgagggtagggccttcatgatccagtcacctccaaaggccccacctctcaatactgttactttggggattaaatttcaacatgaattttggagggaatgttcaaaccatagtaattatcttttcctttattgtagattggtgaaggtagggactgttttgttcattattgcatacccagcatttattatagtgccttgcacatagtgagctctcaataaacatttattaactcagtaataagctatgtagttaattacaagaagcacacaaaaccttaattttatcactagttaagatttaacaaaaatggaaaccatgtattactttcaaggttacttatatatgcaagtatatttatagactgaatttctagaattgtaattgctgagtcaaattgtagaggtgcgtgtgtgctgaggtttttgtggttttataaatagataacttattttgaattagatggagattttttcatattcggtcttttcatgaattgtatcttgatgtccttgctggttctccgccacaattgggttgttagtctcctttcatttcttctttcctgtcctttcttttcctcccttcccttctcccttccctttctcctttgctttttccttccattttcctcttccctcccctcccctttccttggagcgtgatttcattctggtacctgcaacttggacattagtgtagagatctttcaccttttgattaaatttattcctaaatatcttaattttttttggtagctattttaaatgaggtttttttttgggggggcgcggttactgtatagaaatgctactgattttttataagttgattttgtatcctgcaactttattgaattcatttttaagatcaaagttttttggtggagtctaggtttttctagatttaagattatatcatcagcatagagggacagcttaacttgccttttttctaatgtggatgccttttatttctttctatatactaattgctctggctaggatttccagtaccatattgaatagacatggtgagagtagacatccttgtcttgttcctgatcttagagaaaaagctttaaacttttcaccattgagaatgatgttagctgtgggtttttcatatatggcctttattgtgttgggattccttttctacttaatttattgagagtttttattatgaaaggatgttgaattttgtcaaatgctttttctgcatctgttggtataatcatgtggtttttgttcttaattctgttaatttggtgtatcacatttacgcatttgtgtatgttgaaccatccttgcatccctggaatgaattccacttgattatagtgagtgatctttttattgtgctcttggtttcagtttgccagtatttggtaaaggattttttatatctgtgtttatcagggatattagcctgtaattttcttttcttgtagttcccacgtctggctttggtatcagtgtaatgctgccgtcataaagtgagtttggaagtattccttcttcatttggttttaggagtacagagattagtattaattctttaaatgtttggtggaattcagcagtgaagccatcaatcaggtcttgggcttttttttggtgaaagactttgcattactgatttaatctccttattattggtctgttcagattttctgtttcttcatgattccatcttggtagctctatgtgtctagaattttttccacttggttgtccaatttgttgacatgaaattgttcataatagtctcttacgattccttgtgtttctgtggtatctgttgtaatgtcttcccttttcgtttctcattttgtcttctttttttattagtctagctaaaggtttgtcaattttgttcatcttttcaaaatctcaattcttgattctgttactgttttctattgtttttccagtttctatttcatttgtatctgcccttatcttcattgttttctttttactaagttttggcttcatttatgcttctttttctagttccttgaggttgtttacttgatatctttctttttgacatagatgtttattgttatgtatgtccttcttagacctgcttttgctgtatcccataagttttggttggtttggtgtccatttttgtttgtctcatgatattttaaaatttcccttttagctttttctttgacccactgattgttcaggagcatgttgcttaatttttatgtatatgtgaatactccagaattccttcttttggtgacttctagttttttatcactatggtcagaaatgatattagatatgatttcagtcttgttatatttgttaagacttgtaacaccatacatgtactgttaattttgtagtatgtcataaggtttatgtatattttataatttattcatagttatgaaattaaaattaaattcctacaagactctagatgattgtactataattttaatgcagtttttgaaaaggatttttggtacagttacatttacttatttggttttgtatggtattaaacctttcttcggaaagcttctactttatctcatatattatcaccacaagtgttataaataatactacttttaagagtgcacaaaagtgaacttaagtgttcactatcagttgggtttactccctaaatattatgctacaagataaattaatatatgttatataactaccaatgtttaggataaagggaacctggaaatagaaaatcaagtaccttttaaagtttatcctttgaagtgagtaaaataagtgagaaatgatttaagaagctcagtaaaataacatttccaagtaaattgctttgaatgtatggacatacatgaaaagatatacaaaagttgtggttgcaaaaacaaaattaggcagatatgaacgcctgattagtcagaagaatgctaagaggaagtgaaaagaaaaatcagctaacttcccgagggaagatttaggaactttctcttgtgaaatttttttccatgtgttttatcaagacattcacttattacaaacatattgtaattcttaggcaatttaggagtttattgcacctctaatctgtttttaatatgatattttgtttatagtaacctagaagtgctgaatttgaatacctttctttttggaatgcatttttttgatggaagttcacaaatgtggggctgttagtttttttcttcttttggtgaagctcagcagaactacacagcatatatattttccttggctggctttcccgtaacgggctcaatgtgcactcagacattattgagggtcttgcagttacttttggcatagcttgctgatggatgtaaagttggatatgatgagtggtaactgtgtgtgtaaacaaaatgagccatcattatagaaatggttgccttttagaggtcaacagtgacaaaataatggcccaagtagttggtttaaaattaggattgaatcctaacgtctaaagacaaaaacttcagatatgattaagcacttgacatctgtaggcatcagtagagacatcttattctactctattgtacttgagaaatggtaattcaccctatattttacaagtggtattgctgaggttcactgaatttcagtgttaacatgtaaatcaaaggtgaaaagagaaaaaaaaacttcagtaatcttcaagtggaagcaagttattaataggatgagattctttgggagaatcttaatttttaggtatacacatactgtttcagtatattcatgtattaatagtagcttctacttaatttttatcagcatatcagaattaataattcctaataataaaattgttttacaagatggagtttgcgtcttggtataaacagtttgttcattttgtcagtagttttgggagtcagaaggcacgtgaatgtgagtcagcttttggatatttagggctcagaacattatagaaaatttatttatttttatgatttactaaatgtgtatttcgattcttttattcatgtatgaaacataaaagttgcagttatgtcttattcaatcttaatttatccaaagacatatattgcttaagataaaagaaaaagttgggaaaaaaactatttagatgttaaaatactgtaaaataagagcaaaatgtcactactagtttccaaaagctctcagttatattatttataattgtatatatctctatatactataagcaatttagaggtttctttacatattttcatttcttttccctaaagagaatgcagttaattttgagttgagctcttttaggtgaaggattttataagaacaatagttacattttgattgtatctctttttgtatgtttttacatgcactagtgatgtgacactgtgctgaggatggaatattaactagctttggagtaagatgcttcttgctctgcccttgtctgtctaagacttagacaattatttaacctctttataaatctatgttcccatctgtaaaacaggaatgaaaatgcaaatcttctagtttattcaaaaagtcaaatgaaatcttactatcttttttttttagcacagtgcctgaggcatcatagatgattaataaatatcccatatatctattaatgcttctgattaatgtaacgttttcttttgtcaatattattagaaataatcctcttatattcctttatctattttttttttagttgggaaaagaggaaaaactttagaaagaactagtatttgtttactagcctatcaaggtggcaaagattattgcagtaataatccacatagcactggcttgggtgctgtgggtcttttcatgtcctgtgtaattgtatgtattggtacattttttacagggacaatttggcaatatatatcaaaaaattaaaactactataatattttgatttagtaattttattgcagaattcatacataagataaaatccaacttgagtacactgtgtgttgcagcttagtgaaattatgcatcattgattatccaggagttagtgtggtaaatccttattgttgaaaaacaatcagatattaaactaatgtttttgcagaaatattgttaataacgggaagtaggaaaaaatggttacagtagtgatttttttcacttgatacgggtttgtgaaaaatgtactgttttaattctgtttatattctcagaaacaaaaaggagagttatatatcaatatataatagtggcaatttctgtgtggcatgattatgtgtggttttgtttttctcgtcctttttttctattttatatgataaatatgtttttcttttgttgagaatatattaaacatcttttgaatttagaacatctctactaatgcagtaaaggcccacacctactagttaggtaatatagctcttactagaacttgcttagcaaccaaaccctttataggaaacaatatatagttcaattagtaaatacattttttacaaatttcattttttagagtgcaaacccactgttagacctcttggttctgacagagtcacaggcacgagaagaaacagatgatatccggactgctgtcaggcaacaacttcagaaagaactgattgctctttttgataccttgctgctcaatttcatggaagttactgacaggtaccatttgtaatattgcaggtttaggtgcatttatatagaacccaagttttctttgattttcaaagttttactttgtacttctttcaaattaagaaatacttctttcaaatacttaaataataatcagttatagtgttctgtttgtttttgtttcagtttaatctgttacagcctgattgtacctgcttggtctctttcactacacacatgcactcacatatgcacacacacagttttgttctctagggtttaattcctggttctctcttaattatctacaaatctacttgagcagtcatacctatgcctatgactttatgattatctttacactgatgactttcaaatacatatctctagttatgaattctgttttttaaaaataaaaatattaagatgaaagtcactattttaaccattttaaaatgtacatttgaatggttttagtatatccgcaatgtttgcaactgtcaccactacctaattccagaactttatcatcaccccaagagaagccttgtatccatgaaaaagtctctccctattcacacattcctctgggccctggcagccactagtcttctttctatgtctgtggatttgcctattctggatatatcacataaatgaaatcaaacaataatgtgacctttagcgtctagcttcttcacttagcatcatgtttccaagctccttgcatactgtagcaaatatcactacttctttctatgactgaataatattctatttatagatatgccatgttttgtttatccattcattcattggtggacatttgatctgtttctaccttttggctattatgaatagtgttgctgtaaacactcatatacagatttttgtgtggacatgtgtttcagttctcttgagtatataattaggagtggaattgttggttcatatggtaactgtaatggtaactctatgtttgacttttcaaggaaatgccaagctgttttccacagcagctataccattttacattcccaccagcaatgtatgagtgtttcattttcttcatatcctcaccaacacctgttattatagcatcctaatgggtgtagactggtatcattttggtttttatttgcatttccccaatgaaaaataattttgagcatcttctcatgttcttatggctatttgtgtatcttcttcggagaaatacctattcaacatctttgaggatttagtatcagtgtgcatcagggatattggcctgaaattttccttttttgttttgttttgttttttgctttaaatatgtcccagagattctggtacattgtgtcttcgttctcattgatttcaaagaacatctttatttctgccttcatttcgttatttgctcagtagtcatttaggagcaggttgttcggtttccatatagttgtgcggtttggagtgagtttcttaatcctgagttccagtttgattgcactgtggtttgaaagactgtttgttatgatttgcgttcttttgcatttgctgaggagtgttttacttccaattatgtggtcaattttagaataagtgcgatgaagtgctaagaagaatgtatattctgttgatttggggtgaagagttctgtagatgcctattaggtccgcttggtcaagagctgagttcaagtcctgaatatccttgttaattttctgtcttgttgatctgtctaatattggtagtggggtgttaaaatctcccactgttattgtgtggtagtctaagtctctttgtaggtctctaagaacttgctttatgaatctgggtgctcctgtattgggtgcatatatatttaggatagttagctcttcttgctgtattgatccctttatcattatgtagtgcccttctttttctcttttgatctttgttggttttaagtcttttgtatcagagataaggatggtagctcttgcttttttttttttttttttgctttccatttgcttgataaatcatcctccatccctttattttgagcccatgtgtgttttttgcatgtgagatgggtctcctgaatatagcacactgataggtcttgactctttatccaatttgccagtctgtgtcttttaattgtggcatttagcccgtttacatttaaggttaatattgttatgtgtgaatttgatcctgtcattatgatgctagctggttgttttgcccattagttgatgcagtttcttcatagcgtcgatgttctttacaatttggtatgcttttgcagtggctggtaccggtttttcctttccatatttagtgcttccttcaagagctcttgtaaggcaggcctggtggtgacaaaatctctcagcatttgcttgtctgtaaaagattttatttctcctttgcttatgaagcttagtttggctggatatgaaattctgggttgaaaattgttttctttagaaaggttgaatattggcccccactctcttctggcttgtaggtttctgctgagagatctgctgttagtctgatgggcttccctttgtgggtaacctgatctttctctctggctgcccttaacattttttccttcatttaatctttggtaaatctgatgattatgtgtcttgatgattatgcattcttgaggagtatctttgtggtggtctctgtatttcctgaattggaatgttggcctgtcttgctagattggggaagttcttctggataatatcctgcagagtgttttccaagttggttccattctctctgtcactttcaggtacaccaatcgaacatagatttggtcttttcacatagtcccatatttcttggagcctttgtttgttcctttttattcttttttctctaatcttgtcttcacattttatttcattaatttgatcttctatcactgatatcctttcttggtgaccttcggttgggatctttgagtggacgtgctgttcctttctgtttgttagttttccttctgacaggcccatgtgctgccggtctgctggagtttgctagaggtccactctcgaccctgtttgcctaggtatcgccagcggaggctgcagaacagcaaagattgctgcctgatctttcctctggaagcttcgttccagaggggcacctgccagatgccagccagagctcttctgtatcaagtgtcggttggcccctactaggaggtgtctccccgtcaggatacacgggggtcagggacccacttgaggaggcagtctgacccttagcagagcttgatcggtgtgctgggaggtccactgctctcttcagagtcgtcaggcagggatgtttaaatctgatgaagttgcgcccacagcctcccctttctccaggtgctctgtcccagggagatgggggttttatctataagtccctgtctggggttgctgccactttttcagagatgccctgcccagacaagggaaatctggcaatctggccatggcagccttgttgagctgcagtgggctctgcccagttcgaacttcccagtggcttagtttacactgtgagtgtaaaactgcctactcaagcctcggcaatggcggacgcccgtcccctcaccaagctctagcgtcccaggtcaatctcagactgctgctgtgctggcaacgagaatttcaagccagtgaatcttagtttgctgggctccgtgggagtgggacctgctgagccagaccacttggctccctggcttcagcacccctttccagcggagtgaacacttctgtctcgctgctgttccaggcgccactggggtatgggaaaaaagaactactgcagcttgtttggtgtctgcccaaatggccgcccagttttgtgcttgaaacctagggctctggtagggtaggcaaccgagggaatctcctggtttgtaggttgcgaaaaccgtgggacaagcgcagtatctgtgcaggagttcctcaggctcagtctgtcacggcttcccttgggtggtggagaaaattccccgaccccttgcgcttcccaggtgaggcgatgctccaccctgcttcagcttgccctctgtgccctgcacccactgtccaaccagtcccagtgagatgaaccgggtaccttagttggaaatgcagaaatcacccgccttctgcgtcgatcttgccgggagctgcagactggagctattcctatttgaccatcttgccagcaatccccccaacctttttttttttttttttaaaaagggatgggggtctcactatgtcaccccggctggagtgcagtgacacattcttagttcactgtaacctcaagctccagggcttaagagatcctcctgcctcagcttcctgagtagctgggactataggtgtgcaccaccacacctggctaattttttttactttaattttattttatttcatttttttagaaatgaggtctcactgtgttgtgttgctcaagctggccgcaagcaatcctcccacctcaggctcccaaggcactgggattataggggtgagccacagcccctggcccagtgtaatcgttacttgtattttatatgacattctctagttggtattttatgctttccttgaaaagtctcattttgatagagactattttctgccattttgtctggttcatttttttctattactatgagtttaagtaaccttttatagccagtaagatagcccattaagcccattatactttcttggtggttgattttccctcttttgcatacataggaaatgctcggaacttctttacgtttttcaaacgcagctggctctgaaactgctccagtgtctgaaagtgacggatgcgcctcatttctatggcctgccgtcccttgagcggaccttacgagggatggctaacctcactgcgtttccgggatggagctcacactctcctctcacaaagcctctagatatctgtgtgaagtacttgtcaggtctccttgaggtaagtaaaaatagcatatggtagttatttactattagttgcttttactttatgccaggccacaagtgcattatacgttactctattcaatgtagaatattatacattatttatataagtcataatagtgaaatgttttagtgatttttattaatagttaagtaaggaaggtcacttttataaataccctcattttcaaaagaaataaatggaaacttttgatgctcaaaggaagtgttcgctagagcatttcagattttggatttttggattaggaatgctcaaccagtaagtatatgatacaggtatttcaaaatccaaacaactccaaaattcaaacacttctggtcccaagcattttgtatacggcatactcaggctgtacaatgttaaaggatatttgttttttctttttcttccagtttgtgcagttctagatgctactgctatgaacattcttatcttttggtgaaaatgagcatcttttttgaaattttatcttctgttattgaaatatgtaaatatagccaatttttatatgttgaccatgtatcaggcaattcttatttccaatatcaaaacaaaagcctttaatttttcacccttcagtatgctgtttatagtttttttttgtcaattaagaaagatcaagttaaggaagttttcttttgtcctgttttgctaggagctttgttttttaattcataattgtatattgcttttttctgtatcttttaagataatcacatgatttttcccttatattccattactgattgattttaaaatgttaaacaaccttgcatttctcgaaacatttcagttaggttgtgatgtattactctttttatatgttagtggatttcgtttctcaattttttagaattctgaagtttttagaattattctatttcctcatgtaaaaaagtttttcgaattttgcatcttttttctcttaaagaatttgtcaggtttttaataatcaaaatcattccgttcttatgactaaaatgggagaatgtgagattgtaagaacgtgactttttcaaccattttaaatcttttcctttatataactttcttttttggaatagctgatttgcattggtgtgattttgttctctaatgttaggtagaatttgatcgtgaaacaatcttggtttgcagttttctttttgggaagattgtaaattgtgaaatgaaatgactttttttttttttgagacagagtcttgctctgttgcccaggctggagtgcaatggcatgatctcagctcactgcaacctctgcctcccgggttcaagtgattctcctgcctcagcctcccaagtagctgggattacaggcgcctgccaccacgcacagctaatttttgtctttttagtagagacagggtttcaccaggttggccaggctggtgtcgaactcctgatctcaggtgatccacacccgtcttggcctcccaaagtgctgggattacgggtgtgagccactgcgcctggcctgaaatgactttttaaatagatctaaaatcgttcagagtttctttttatgtgtgtcagccttagtaagttatgtttttgtagaacttaaaaactttttatctaatttttaaaatttgttactgtgaaggtattcatcaaatcatcttacacttttaatgtctgctgaatctgtagtgaggtcccctttcattgcagacattaattattcctttctcaatttttcttggtttatctttctaatagaatgaacctttggctttgttgagcctctctttaacttttttctcctgttttatttctgccaatatttattatctccttctacttttagtttagtttacagctcttttttctaacattttaaggtagaggcttacgtcattgatttttttaaaagtctttctcaaatgtgtgtttttagctctaatcctctaagcatggccttatgccatgtttttatcatcaatttaggtcaaaatatttctactgtgatataataaatacgacaatgatatggttgtacatagttctatgagaacagcctcatcacagtggcctgacaattttgcatatctgcccttgggcttcatagacaaggcttaactacagccaatctaaatcttggcagaatttcctgtgatccttctggaacatgagaatatgaaaggcttatgagcagctgactatgcaagattgattctcacttacttcacagtctattaggaagtcagttaggagcccgtttcttattggttcctaggttccgacgagcactgggctttctgccttgctctccttggggcatagctacagcttataaaactgctttactgcagcacggcatgggcttctccgcaacagagtgtcctacatctttgttatagtcatctggcccctttgtttcaatgtcatcctgtgcaagggatactagtagctggcacctttgtctattcttgcttttgctgtttatgtaggtaataaactgtctgaatccaaaaattactcattgttttcttactggacaaatctgtcagccttgttttgattgctaactgtgttcggacctcaagaatgattcttgtaggaagcactgtagagttagattttgaaagataagtaaattgatagtgatagcaatagacattctagacatggaattttctgataaaattgtatctataacctcctgtttttttttcatgctgtgggtgacttcttgacatcatataatctctacctattgccagattatttttcagaaacataaatttttcaatccaaacctctttttttttcaagagcataagactcaatattttgcatttagagatttgcctccattgtagttttttcccacatctctgaattttcagttatatctggctgtttttccaaaataaaaatgcactttaaaaagactgcttctttcacatagtttcctctcttttagggatggcaatatctacaaaaaatttaagatctaacttatttatttaccttcatttagtaaaccttttcttattcttccaaggttggatacttacctaatactgtttggcctttcctgtaggttatatacctgtaacaatttatatatgtggctattacttaatacattatatttttatttattttactttatttctttgagacagggtttaccgtgttgctcaggctggaatgcagtggtgcaatcacagctcactacagcctcaacctcctgagcccaagtgatcttcccacctcagcctcccaagtagctggggccacaggtgtgcaccactacacctggctggtttaatttttttgtagagatgggtctcactatgttgcccaggtttgtcttgaattctttggcgcaaatgatcttcccactttggcctaccaaagtgctgctattacaggcatgagccactgtaactggacctttattttgttttctgcattgctctagtagactatgagcttataagtatcatctttgggctatttctactatcccatggctactgcattgacctagcaccatggtttttacatagtggttagtgaatcagttaattaatatatgtgctacataatacatatatattgtgtatagtttttaaattaagatacagtttgaaaaacattttggaaatgtagcataaatgattataaaaatatgttttattgttgtatttttattactaaataatgatttaaataatgtatatatatattttatctggtcttatctagaacttttttccaaaagcacatattgtttttaaaacaagtttaaagatcataaatactctttgctgtactgtaaaatttaatatgaatttcactggagtccctttaataaaataaatttcggagaggttccaagatggccaaataggaacagctctagtctacagctcccagcatgagcgacgcagaagacgggtgatttttgcatttccagctgaggtaccgggttcatctcactggggcttgtcggacagtgggtgcagcccacggactgtgagcagaagcagggcggggcatcgcctcacccaggaagcgtaagaggtcagggaattccttttccaagccaagggaagccgtgacacatggtacctggaaaattgggacacttccaccctaatactgtgcttttccaatggtcttagcaaacaatacactaggagattatatcccacgcctggcttggagggtcccacgcctatagagcctcgctcactgctagcacagcagtctgagatcgaactgcaaggtggcagcgaggctgggggaggggtgtccgccattgctgaggcttgagtaggtaatcaaagcggccgggaagctcgaactgggtggaacccaccacagctgaaggaggcctgcctgcctctgtagactccacttctgggggcagggcatagctgaacaaaaggcagcagaaacctctgtagacttaaacgtccctgtctgacagctttgaagagagtactggttctcccgttacagagtttgagatctgagaacagacagacagcctcctcaagtgggtccccaacccccgagtagcctaactgggagacacttcccagtaggggccaactgacacctcatacagccgggtgcccctcttgagacgaagcttccagaggaaggatcaggcagcaacatttgctgttctgtaacatttgctcttctgcagcctccgctggtgatacccaggcaaacagggtctggagtggacctccagcaaactccagcagacctgcagctgagggtcctgactgttagaaggaaaactaacaaacagaaaggacatccacaccaaaaccccatctgtacgtcaccatcatcaaagaccaaagatagataaaaccacaaagatggggaaaaaacagagcagaaaagctgaaaattctaaaaatcagagcacctcttctcctgcagaggaacacagctccttgtcagcaacggaacaaagctggacggagaatgactttgacgagttgagagaagaaggcttcagaagattggtaataacaaacttctccaagctaaaggaggatgttcgaacccatcacaaagaagctaaaaaccttgaagaaagattagacgaatggctaactagaataaacagtatagagaagaccttaaatgacctgatggagctgaaaatcatggcacaagaactacatgacatatgcacaagcttcagtagctgatttgatcaagtggaagaaagggtatcagtgattgaagatcaaatgaatgaaatgaagcgagaagagaagtttagagaaaaaagaataaaaagaaacaaacaaagcctccaagaaatacgggactatgtgaaaagaccaaatctacatttgattgttgtacctgaaagtgacggggagaatggaaccaagttggaaaacgctcttcaggatattatccaggagaacttccccaacctagcaaggcaggccaacattcaaattcaggaaatacagagaacgccacaaagatactccttgagaagagcaactccaaggcacataattgtcggattcaccaaagttgaaatgacagaaaaaatattaagggcagccagagagaaaggtcccgttacacgcaaagggaagcccgtcagactaacagcggatctctcggcagaaactctataagccagaagagagtgggggccaatattcaacattcttttttttttatgatttgcttttttttttttttttgaagtatttattgatcattcttgggtgtttctcggagagggggatgtggcagggtcataggataatagtggagagaaggtcagcagataaacacttgaacaaaggtctctggttttcctaggcagaggtccctgtggccttccgcagtgtctgtgtccctgggtacttgagattagggagtggtggtgactcttgaccagcatgctgccttcaagcatctgtttaacaaagcacatcttgcaccgcccttaatccatttaaccctgagttgacacagcacatgtttcagagagcacgtggttgggggtaaggttatagattaacagcatcccaaggcagaaaaatttttcttagtacagaacaaaatggagtctgctatgtctacttctttctacacagacacagtaacaatctgatctctctttcttttccccacatttcccccttttctttttgacaaaactgccatagtcatcatggcccgttctcgatggtcgctgtctcttcagagctgttgggtacccctgcagacaggctgtcacttcatgcttggaagattgcacagcggccaggcagaggcgctcctcacttcccagacgaggcggccaggcagaggcgatcctcacttcccagacggggtggcggctgggcagaggcgctcctcacatcccagacggggcagccgggcagaggcgctcctcacttcccagacgggacagctgggcagaggcgctcctcacttcccagacggggcgcctgggcagaggcgctccccacttcccagactggacagctgggcagaggcgctcctcacttcccagacggggcgcccgggcagaggcgctcctcacttcccagacggggcagccaggctcaacattcttaaagaaaagaattttcaacccagaatttcatatcctgccaaactaagtttcataagtgaaggagaaataaaatcttttacagacaagcaaatgctgagagatttgtcaccatcaggcctgccttacaagagctcctgaaggaatcactaaacatggaaaggaacaagcggtaccagccactgcaaaaacatgccaacttgtaaagaccattgatgctaggaagaaactgtatcaactaacgagcaaaataaccagctaacatcatgatgacaggattgaattcacacataacaatattaaccttaaatgtaaatggtctaaatgctccaattaaaagatacagactgggaagttggataaagagtcaagacccatcagtgtgctatattcaggagactcatctcacgtgcagagacatacataggctcaaaataaagggatggaggaagatcaaccaagcaaatggaaaacaaaaaaaggcaggggttgcaatcctctctccgataaaacagactttaaaccaacaaagatctaaagagacaaggccattacataatggtaaagggatcagttcaagaagaagagctaactatcctaaatatatatgcacccagtacaggagcacccagattcataaagcaagtccttagagacctacaaagagacttggactccacacaataataatgggagactttaacaccccactgtcaacattagacagatcagtgagacagaaagttaacaaggatatccaggacttgaactcagctctgcaccaagtggacctaataggcatctacagaactctccaccccaaatcaacagaatgtacattcttctcagcaccacatcacacttattccaaaattgaccacatagttggaattaaagcactcctcagcaaatgaaaaagaacagaagttatgataaactgtgtctcaaaccacagtgcaatcaaactggaactcaggattaagaaactcactcagaacagctcaactacatggaaactgaacaacctgctcctgaatgactactgggtacgtaacgaaatgaaggcagaaataaagatgctctttgaaaccagtgagaacaaagacacaatataccagaatttctgggacacatttaaagcagtgtgtaaagggaaatttatagcactaaatgcccacaggagaaagcaggaaagatctaaaattgacaccctaacatcacagttaaaagaagtagaaaagcaagagtaaacacattcaaaagctagcagaaggcaagaaataactaagaacagagcagaaatgaaggaggtacagacacaaaaacccttaaaaaaaattggtgaatccaggagctggttttttgaaaagatcaacaaaatagatacaccactagcaagactaataaagaagaaaagagagaagaatcaaatagatgcaataaaaaatgataaaggggatatcaacaccgatcccacagaaatacaaactactatcagacaatactataaactcctctatgcaaataaactagaaaatctagaagaaatggataaatttctggacacatacaccctccgaagactaaaccaggaagaagttcaatttctgaatagatcaataacaggctctgaaattgaggcaataattattagcctaccaaccaaaaaaagtccaggaccagatggattcacagctgaattctaccagaggtacgaagaggagctagtaccattccttctgaaactattccagtcaatagaaaaagagggaatcctccctaactcattttatgaggccagcatcatcctgataccaaagcctggcagagagacaacaaaaaaagagaattttagaccatatccctgatgaacatcagtgcaaaaatcctcaataaaatactggcaaactgaatccagcagcacatgaaaaagcttatccaccatgatcaagtgggcttcatccctgggatgcaaggctggttcaacatgcacagatcaataaacgtaacccatcatataaacagaaccaaagacaaaaaccacatgattatctcaatagatgcagaaaaggccattgacaaaattcaacagcccttcatgctaaaaactctcagtaaattaggtattgatgggacgtatctcgcaataataagagctatttatgacagacccacagccaatatcatactgaatgggcaaaaactggaagcattccctttgaaaactggcacaagacagggatgccctctctcaccactcctattcaacagtgttggaagttctggccagggtaatcaggcaggagaaagaaagaaagggtattcagttaggaaaagaggaagtcaaattgtccctgtttgcagatgacatgattgtatatttagaaaaccccatcgtctcagcccaaaatctccttaagctgataagcaacttcagcaaagtcgcaggatacaaaaaatcaatgtgcagaagtcacaagcattcctatacaccaataacagacaaacagctaaatcatgagtgaactcccattcacaattgcttcaaagagaataaaatacctaggaatccaacttacaagggatgtgaaggacgtcttcaaggagaactgcaaaccactgctcaaggaaataaaagaggacacaaacaaatggaagaacattccatgcttgtggataggaagaatcaatatcatgaaaatggccatactggccaaggtaatttatagattcaatgccaccttcatcaagctaccaatgactttcttcacagaattggaaaaaactactttaaagttcaaatggaaataaaaaagagcctgcattgccaagacaatcctaagccaaagaacaaagctggaggcatcacgctacctgacttcaaactgtactacaaggctacagtaaccaaaacagcatggtactggtaccaaaacagagatatagaccaatggaacagaacagagccctcagaaataataccacacatctacaaccatctgatctttgacaaacctgacaaaaagaagaaatggggaaagcattccgtatttagtaaatggtactgggaaaactggctagccatatgtagaaagctgaaactggatcccttccttacaccttacacaaaaattaattcaagatggattaaagacttaaatgttagacctaaaaccataaaaacccaagaagaaaacctaggcaataccattcaggacataggcatgggcaaggacttcatgactaaaataccaaaagcaatggcaacaaaagccaaaatagacaaatgggatctaattaaactaaagagcttctgcatagcaaaagaaactaccatcagagtgaacaggcaacctacagaatgggagaaaatttttgcaatctacgcatctgacaaagggctaatatccagaatctataaagaacttaaagaaattttgcaagaaaaaaacaactccatcaaaaagtgggcgaaggatatgagcagacacttctcaaaagaagacatttatgcagccaacagacacatgaaagaatgctcatcatcggagaaatgcaaatcaaaacgacaatgagaaaccatctcacaccagtcagaatggcaacattaaaatgtcaggaaacaacaggtgctggagaggatgtggagaaataggaacatttttacactgttggtggaactgtaaactagttcaaccattgtggcagacagtgtggtgattccttaaggatctagaactagaaataccattttacccagccattccattactgggtatatacccaaaggattataaatcatgctgctatattcatggaactagcccaaatgtccatcagcaatagactgggtgaagaaaatttggcacatatacaccatgtaatactatgcagccataaaataggatgagttcatgtcctttgtagggacatggatgaagctggaaaccatcgttctcagcaaactatcgcaaggacagataaccgaacactgcatgttcgtgctcataagtgggaattgaacaatgaaaaacttggaaacagggtagggaacatcacacaccagggcctgtcatggggtaggaggagggtggagggatagcatcaggagatatacctaatataaatgacaagttaacaggtgcagcacaccaacatggcacatgtatacatatgtaacaaacctgtacgttgtgcacatgtactctagaactttaagtatattaaaaaaataaaataaacttcattttttaattataaatattaaaaaaggttcaactgtcagtatactaattagttattttctgctgtctattagaaatgtatgaattttaaaaaacaggtatattaaagagttaatgataatatttcttagaaagtcagctcctctagtgcatttaaaatataattcagttagtctagctagtggcctatctatctcattaagtttttcaaaaaaacaactcctggatctagtgacctttcgaatggtttttcatatcttgatttccttcagttcagctctgattttggttatttcttgtcttctgctagtttggggttgatttgttattgctgctctaattctttcagttgtgatgttaagttgttaatttgagatctttctaactttttgatggaggcatttagtgctacgaatttccctcttaacactgccttagctgtgtcccagagattctgatgtgttgtaactttgttctcatgagtttacttgtgtaacaaacattcacgttacccgtgaacctaaaagtttaaaaattaaaaaaaatatataattgaacctataagtacctagtttatagcattttttgtcatgtgatttataaatactctatttatcaaccttttacagagtcagtctcctctagaaaatgagttttactctttgaaatcaggaataggtgaggacctgccacagcggtaactaaagaagaagtgaagtgttgcctcatttatgtttagaaactatcagaagtgcttttgttttaaaattacgtgcaaagactttagatcacacctacgtttcaaataccagaaattgaaatgaactgttaatgtattggagaacaaaagggcttagttttaggtaagaagtgtaggcaaaaaggcagtagtccattctgtgttcagttgtctttgaggtaataaaatttagtaacagtttgttagctaaaggatacataaaaagcacagtccctgttatgtaatgtttcgcagttataaaaaatttgattagccaatcttgctttggtttaaaaaggaggtcgttttgtgcttcataaaacatctcgagcagaaaatctttatgactttatgttaaatggcaggcaaatattaggaaagaatccgtcacttttgttaaaaattgtagcagggtaacatttaatcttgggactatctgcttagtttattaattacataaacaggtatccctgttgtactactaatgactaaattcatcttttaaagaataaagtaaggcttatgtgagagaacattgaaacaaagtcattgttggtccaaatgatttgcttcatagtttcttagtaattaaagctgtttcctttttggaagggagccatatttctaataaaagattagcttgtttctgcacagtgaaatttgaatatgagtatttgctttttgtagctgtgaaatgagactttttaactaagcatgattaattatgataggtgaataaactatgataattaaatctttaaatcagatacatgatgtataattccagaggtctgacaaaaatatcaagttgaaagaaaatactggcaaaggtcttggcttgtcatttataagctagaattaaaaatcattacacagatcacagatgttagatatctccaaagatgacttagaggaagataataaggatctgatcatttagatattttatttttcaagtagtcacttaaaattttaaatttttgaccttggggaaggggcagctgtgggcacagcttcagcaaacttaaatattcttgcctgccggctctgaagagagcagtggatctcccagcacagcactcaagctctgctaagggacagactacctccttaagttggtccctgaaccccgtgcctcctgactgggagacacctcccagcaggggttgacagacacctcatataggagagctctgctggcatctggcaatgcccctctgggacgaagcttccagagtaaggaacaggcagcaatctttgctgttctgcagcctccgctggtgatacccaggcaaacagggtctggagtggacctccagccaactccagcagaccagcagcagaggggcctgactgttagaaggaaaactaacaaacaggaatagcatcaacaccaacaaaaaggacttccactcagagaccccatccaaaggtcaccaacatcaaagaccaaaggtagataaatccatgaagatgaggaaaacccagtgcaaaaatgcggaaagttccaaaaaccagaatgcctcttttcctccaaaggatcacaactccttgacagcaagggaacaaaactggatagagaatgagtttggtgaattgacagaagtaggcttcagaaggtaggtaataacaaactcctccaagctaaaggagcatgttctaactcaatgcaaggaagctaataaccttggataaagggtagaggaattgctaactacaataaccagtttagagaagaacataaatgacctgatggagctgaaaaaaacagcaccagaacttcgtgacacatacatgagtatcaatagccgaatcgatgaatcagaagaaaggatatcagagattgaagatcaacttaatgaaataaagcaagaagacaagattagagaaaaaaaaaaaacaaaagggaatgagcaaagcctccaagaaatatgggactatgtgaaaagagtgaacctacgtttgattgatgtacctgaaagtgacagggagaatggaccaaattggaaaaaactcttcaggatattacctaggagaacttccccaacctatcaagacaggccagcattccaattcaggaaatacagagatcaccacaaacatgctccccgagaagagcaaccccaagacatgtaatcgtcagatttaccaaggctgaaatgaaggaaaatatattaagggcagccagagaggtcgggttacccacaaagggaagcccatccctgttagtcttaccagcggatctctctcagacaccctgcaagccagaagagagtgggggcctatattcattaataaagaaaataattttcaacccagaatttcatatctagccaaactaagcttcaaaagcgaaggagaaaatcctttacagacaagcaaatgctgagagattttgtcaccaccaggcctgccttacaagagctcctgaagaaagcactaaatatggaaaggaacaaccagtaccaaccactacaaaagcataccaaattataaagaccattgatgctatgaagaaactgcgtcaactaatgggcaaaataaccagctaacatcgtaatgacaggatcaattcacacataacaatattaatcttaaatgtaaacaggctaaatgccccaattaaaagacacagactggcaaattggataaagaggcaagacctatcagtgtgctgtattcaggagacccatctcacatgcaagacacacataagtttgaaataaagggatggaggatgatttaccaagcaaatggaaagaaaaaaaaaagcaggagttgcaattttcatcactgataaaacagattttaaaccaacaaagataaaaaaaaaaacaaggcattacataatgataaagggatcaatgcagcaagaagagctaactgtcctaaatatatatgcacccaatacaggagcacccagattcgtaaagcaagttcttagagacctacaaagagacttagatttccacacaataacagtgggagactttaacacctcactgtcaatattagatcaacgagactgaaaattaaaaaggatattcagaaaaaaaaaaagggatattcaagagttgaactcagctctggaccaagcggacctaatagacatctacagaactctccaccccaaatcaacagaatatacattcttctcagcaccacatcgcacttattctaaaattgaccacataattggaagtaaaacactcctcagcaaactcaaaagaatggaaatcataacaaacagcccctcagaccacagtggaatcaaattagaagtcagcattgagaaactaactacaaaccgcacaactacatggaaactgaacaacctgctcctgaatgactactgggtaaataacacaattaaggcagaaataaattagttctttgaaaccaaagagaacaaagacacaatataccagaatctctgggacacagctaaagcagtgtttcaccaaatgcccacaggaggaagggggaaagatctaaaatcgacaccctaacatcacaattagaagaactagagaagcaatggcaaacaaattcaaaagctagcagaagacaagaaataactaagatcagagcagaactgaaggcgacaagagacacaaaaaacccttcaaaaaaaatcaatgaatccaggagctggtgttttggaaaagatcaacaaaatagatagaccactagcctgactaataaagaagaaaagagagaagaatcaaatagacacaataaaaaatgataaaagggagatcagcactgatcccacagaaatccaaactaccgtcagagagtgttataaacacctctacgcaaataaactagaaaatctagaagaaatggataaattcctggacacatacaccctcccaagactaaaccaggaagaagttgaattcctgaatagaccaataacaggctctgaaattgaggcaataattaatagcctagcaaccaagaaaaggaccagagggattcatagccgaattctactagaggtacaaagaggatctggtaccattccttctgaaactattccaaatgatagaaaagagggaatcctccgtaactcattttatgaggccagcatcatcctgataccaaaatctggcagagacacaacaaaaaaagaaaatttcaggtcattatcactgaggaacatcaatgcaaaatcctcaataaaagactggcaaaccgaatccagcagcacatcaaaaagcttatccaccatgatcaagttggcttcatccctgggatgcaaggcccgttcaacatatgcaaatcaataaatgtaatccatcacataaacagaaccagtgagaaaaaccacatgattatctcaatagatgcagaaaagtctttcgataaaattcaacatctcttcatgctaaaaattctcaataaactaggtattgatgagacatatctcaaaataataagacctatttgtgacaaacccacagccaatatcatactgaatgagcaaaagctggaagcattccccttgaaaaccagcacaaattattcataaactctttaaaaggatgctataacatttttaaaaatattataagcatattctaagttacaactgtgtactaggagggcaccacacatctttttttttttttttacagactttaaaaggaaaaatattgaaactaagaatttttgtttttgttttgaaaaattacaggatctcactctgtaacttaggccaagtgcagtggtgcaatcatagctcaccgcaagctccagctcccaggctcaagggatcctccctcctcagcttccccggtagctgggactacaggtgtccactgccatgcctggctaatttttttcttttttaaagtagactgggtcttgctatgttatgtaggctgaagaatattttcttttaacaatggtaaaatacccataacataaaatttaccatcttattcatttttaagtatataaactaaaaatattacaactttataaggtaaggattcaattcatacaagtcagtagacagttatatatttatctttatataccattgagaataaagccaccatgaaattgtttacatttgtttttcaggtcattacttctttttatgtggagcgtggaggaaatgctatgtccttcatgggaaaaggtgttacaaagagcacaattctttgcttgcttcacttatcccatgagatgatggcccaggctgggagcttggtgagcgcgttaaagctgtctatcttctgaacatttgcttgaaagggaatgtgctgtgtccaacacatttcaagcatataaacttgccacatgaaaatgtctcttttgacttttctttttaggtaacgtgaatgatttttgactagaatatttcttagaagttgtatattaacaaatctgaatcttatttgaaattgattcaaatgtgcatacactggaaaactacattttgtctacattatgggaaaaatagcttctgtcaaaaaattgttatgtttaactttttaaagagaaacaaatttttttgtttgccttttttggctgaataatggattaaaaccaagtctaaaatacattttcacgttgttttcattaaaaattcttgttttaaccttcctgcattttatttttagaaacttacctcaaatatttctgtttcccttttttccctctaggagtggatgtcactttggttcttgcctttgggtagtcatagtgaagaacatattcctactcaacaaggattggcttggttgattccattatgggttgatcgggacccagaggtgagtgtgaaggagaatcaagtgtattgtgtttagattaaaaaacaaatgacacggggccaggtgcggtggctcatgcctgtaatcccagcttgttgggaggctgaggtgggcagatcacgaggtcaggagattgagaccatcctggctaacacagtgaaaccccatctctactaaaaatataaaaaaattagctgggtgtggtggcaggcacctgtagtcccagctacttgggaggctgcagcaggagaatgctgtgaacttgggaggtgaagcttgcagtgagctgagattgtgccactgcactccagcctgggcaacagagcaagactccatctcaaaaaaaaaaaaaagacacaaaacatatatacatatacatagttatattatgggattattgtagtgactctaccttatgttttatttaagccctgttttagcttaggctgccataacaaaataccacagactgggtggcttagacaacagacacttcttttctcatagaagttttggaagctgaaagtccaagatcagagtgccggcatagtcaagttctggtgagggctcttcttctggcttgtagacggctgccttcttgctgtgtattcacgtggcctttccttggtccatgcatgtggggcaggggagggaggggtggtatagagacagatttgtctttttttttttattataatgttaccagtcttattgagataggaccactcccttatgatctctttaaaccttaattatctcctagaaaccctgtcttcaaatgtagtcacttgagcataaagacttcaacatatgagttttggagggacgcaattcagttcatagttttccatccctgagcccctgaacttcatgttcttcttccatgcaaaatgcttttattctccctcaacaacctcaaaagtcttaacttattcccaaatcaactgtaaagtctaaagtccaaaatctcatctaaatgtcatttaaaccacatctgggtaagtctccagatataaaccctcctgaaacagaattcttctgcaggtgtgaacctgtgaacccatacaagttatatgcttccaaaagatgatggtagaatagacattcccattccaaaagagagaaataggaaaaaaaggaagaagtgatgggtcccaagcaagtccaaagcctagcaaagcaaatttcattagatgttaatgctcaaggataatgttctttggcttgatggtgtgccttacaggcccaccagagtgacagcatctgtctagatggctctgtgggatgaccccacccctttggctgtcttcaagagccccgcccataaagctgtcttcaagggcagccatgttcctgaagcactgggcagggtcatcattctggcccacagaaatcagaggtctttgaaaccaaggaggaaaagccacccttgagtcctgtggtgggattagcagcctggggatctctgaatcattttttgggtcattcttttcattgaagaatacagtagtcctcccttatcagaggtttcattttccaaaagcaccctgaagatcagtagtagccaaaccctccctcacaatgcctacatcattcacctcacctcatctctttatgtaatcattgtatcatctcacatcaatacaagaaggctgagtgcaatacaataagatattttgagagagagaccacatttatgtattttgtattataacatattgttgtaattgttctagtttatttttagttattgttaatctcttactgtgcctaatttgtaaactttaccatagatatgtatgtgtaggagaaaacatagtagttatagggctcagcactatctgtggtttcaggcatctactgggggtcttggaatgtattccccatggataagggagggaccactgtagcacatatttgcttacagaatccaggaagtccaacagctttccttcattctctgcatctttctctgtcctctttagttcaaactggcaatgtctttgctgatataatcccatctctattcctggcttctgctgagatgtctgattaagtccatgaattgcacccgtgatctttttcttaaatgggtattcagccacaccctccatgttctctttagaacaagctttctcattttttttgcacagataggctgagaatttttcaaatcttgttcttgtttctttttgcttacccattcttaattccttctttaattcatctctctccctttgcattttgctataagcaatcaggaggaaccaagccaatttttcaacactttgcttagaaatcttctcagctaaatatccaatttcattgctcacaagttctgcctttcacaaaacactagaacatgaccacagcttaaccagttttcttgctactttataacaaggattgcctttcctcaaataaccttttttaaataacactttcctcatttttgtctgagatctcatgagaattacccatgtctacgtttctggcatccacctcaaaactcttctagcctgtaacccattacccagtgccaaagtcactttcatgtgtttaggcatttgtttcagcagcatccccactccttggtacaaaaatctgtattagtgtgctcaggcttccataacaaaataccattgtctgggtggcttaaaaacagaaatttatttcttacagttatagaggctgcaagtccaagatcagagtgtcaacatggttggtttctggtagggcactcttcctgatttacagagggccaccttctcactgtgtgctcatatgacctctccttggagcacgcacatggagaaagatttctctccttcctgaggccaccattcctagtgcagtagggtcccacccttataacctcatttaactgtaatcacctaatagctctgtctccaaatacaggttggggattagggcttcaacatacgagtcttgaggagacacagttcagtacacagcaccctcattttcaatcaaatttgttcgagtatagattgaaaatataaaagagaaaaggttatagtatctattaccttcagaagagtggaaaattattggagaagcttagcaattttgaaaaaaataaaaaggatctggaaattatagacatgcaacacttaagtgtcatataatgaaattaaattaaatgcaaaaaattgcatttgcattacaatacaaaattttgtattatttctttccagttttagccagtttacttttttcaagtaaaatatgctattacaataaaatcttatttatagaaatatttgaaatacattttttagtcacattgaacttggacttactacttgacaattttatgactgcatttttaaaaaattctatagctgtcattgaaactatatttttggattcgaattcagaaatttaccaaaacgtgtggcttgaacagcagtggttctacagcaagcatattataccacatcaatcttatttgggaacgtttttctcttgaataacttttgaggaaaatacgaaatgccttgtaaaatgataattgcctctttgtttagaagttttaagaaagttaaaatcatttatttggaagaaacaataaaaaattaagaaaggtagaacaaagaatagctaccttttttaagaatgaagaattgaaattgtgttcataaaatgtaagtgccctatgctttccttagaaaaaggcttgcaaactataatttttatgcatctttttatacccagttttactttgctttgaaatttgcttatatttaatttttcctatattactgctttcttgaatcatggaatggaggacactgtcttctataggtgtctcttataatttaggatcataaaaccaatggatttttttaaagtgtgatatttatgtaccagaaaaactaagaattcatgttaggaaaaaggcttatttgattcaacaactttctctttaatttgaacaggtgagattcacttcactgggattaggatcagcactgaccacccttgaaacgggctgtgtggccttagcaaacagttgtcagaacatttccggtgggctctggggaactgtggtgaacattcttctggaccagtcagaatgtagtatggtgcgccgggaggtatgtctgtcttttctcctttttttccttagaaattctttgtgatggtatccgtaagcgatacttgactgccgctcaacatggtggactgaccactgaccatgatctcttctgtctgtgaacacccaaacaaaatgacagtagaggatttaaaaggtattcatgcacaggaaaaactggagtccttccttccgataagataaaatcggaatatactatattttaatgtgaactttttttattatgcattgaaaggtagttcacaggaaaaattacttttatattatctcagcatttatgggtctctgatatttatgaagctttagtatagataagaggctgtcaaaataactctttgtagtatttatcatataacatgagagggaaaaataaaccctattttaattctttctgaatagcttgtggtttttttttattgctgcttttgttaaagtaatgattcatgtaaatggttttaaaacaataatcaaattgtacttagaggcttatgaaaaaaaacagcagctcctgggtccaccattagcagtcgccagttccaagctcaaaaggctagttttgttgctgtttgccttcatgtttttaagtagtgatgtttatatttatggctgcttcttgatttatcaactttaaagcttttccatcacttctagttatcatggttggaaatgtcagtttcttagaatcctcttgttaatcctgtcattctcccattatggttatttcatctttcattaagcagacaatcaatgctcctatttgtatgattatttaatttgatcatcttcaggatctagtcaagttggacatttgtggtttgtatttctagttagcaagtttttattgaaaggagtctgtataagagaagggagaaagcggggcagaggggtgcgtgtgtttgtgtgtgtgtgtgtgtgtaatctgaaaggggatagtagaaacctaaaattatatttcttaaatgctaccagaagaatttatgttatacaaatcattttttaataaagctgaattctgaaataggaaaagatatatttcctgatgaaataatttcatatgctgttaggtcattacctaacaaggtcattacctaagaaggtcatcacctaacaagaaatacagtttgacaattctcataatgacctctcagcatgtgcagttgaccagagatgtcttttgctattaattacaatatattggttatttcagagatgaccacaagatggcagtattgacctttttttttttttttttttttttttttttttttttttttacattttcaggcggcatttattcttcagaatctccttgtaattccaatgcctacagaaattataaaggattatacttggcaggtgggtgattttaaacaattatcaacctagtagatgtttcaaattaattggtgataaattttcagtataagtagtatatttcattattgatgaaactatatacaagacagcaagggcctcttaaaatagaacgtagaatttgttcttatgccgaccagacttaaaaattcttctctatagtgttcacaataatttaaagcaaataataatagttaacatatgtttactatgttttaggcacccttctagaaatgtaagacatagtaacttgtataattgtttgagttgtgaactgttactatccttattttctaagcttaggaacttttgcatagagagtttaaatagtttgtcctaaatcacacagctagtcagtggtacgcctttgctttgagtctaggcagtctcttacccactttgctgtattacttctctaatttagtaataataaacaaatttgtagatagttaaatatgtgttgatgttaacatctttttttccttttctaggttagtgcacagtgcgggttatagtgtatcttgctttgttttctgttgggttaactttctttttcatgttctgaatatcacatcagtaaatggttacctaacatttttatagcttacattaaaaaaattctagcttcatgggatatatgtacatgtttgttacataagtatattgcgtaatggtggtggggattggggttctcgtgtactcattacccaaatattgaacattgtacccagttaggtaatttataacctcagccgcctcccccactccctccttgggagtctcagtgtctgttatgtctgtctttatgtccatgtgtattcattggttagctcccacttatacgtgagaacacgcaatatttgattttctatttttgagttagttcacttagataatggcctccacctccatccatgttgctgcagttttaggtaatttggaagatacaaaagtacacttattggggatataagatgtgctgtttctgtccttttacctatccatatattttcaccttatagggatatatttatcatattgctacacctcactcctcaaaatcctgtataaatctaaggtttatttttaagttttaattagactatactcttagaggagttagtgaaacaagctgaaccgtagcaagggcaagtttccgcacatgacccgaagcatgaatccaggtggttgtcaaggcccaggtagcatttaactcttggaaggcttacctctccaaactttacaaacccagggtaaccctaccagtcattgtaaatcccaggcttgtaatttgctcgtaatttctttaacattgccttctgataatggctgcttatctactttccatgttgtaataaaaccaggagacaaaactggagggaatatgcaggattaatagttatattaatagtgtagtagttttggtacctgttatccggagactacattttaaaacatgttgtttttggctcaaatacaaataatctctactcccattgttaaactagtgacccatgtacatggatatacttggtgatgtactaccaatgaatttttaattattgaaataagtataaaggcagagtatattaaagttcctgggacattatgttgtaatacagaaccgtatgtagctgttcatatttttctcttagaaattaaatagtaaagttcctgtttgttgctggtggcatgcttactgcagtttattggttttgttattctccagtcttcatcatggaaatccttttctactaaaaagtggaaaatagtgatttaagttagcttttggagttttggccttgctaagttggccaaaataaaaaaagttggagagccactgctgtcccaaacaatagttgattacaacttttgctagtcttaggaaaaattagataaataaggacaatcttgtatgctttttaataaactcagattttcttcctctcttttcagtctttttttttttttggttatttttgtttgtgtaagtgtccttccttggcagtgaaaatagttaactcagtatatctgtcatccaattttaagaaagtttagtggggtctgaaattccaaagtagaaacagcttctgcaagaaggaaacaagatggttgtctctgggtgcagctagtggggcacatggtcctttgcaaccatgaaaaaggggccacatagccagtattttaaaattcaaacagtctttggtagaattatgaataataatcttattcaacaaaatgtttcatttacttattttagtgtccctttcatagtgttgtggaggatatagcatgaaacagcatgtttaggagctttgttaaaattttattttggttgaggtaaatatttgattttttttttttaacaaagagaattgcttctattgctttgcactttgttttcctgcctgcagtctaaattaatgcccgctagtgctcttgtttcataggctttctgaagcattctctttataattactactccttttcctctccttcctctgcacagtagcataaattcctacttcatgtcatgacatagaattgttgtacttgtgaatagtaataatatgcatatatgaattatgaataatattatagctgagtttcccttttattgttagatgccagaaagtagagcccttttatcaattgtgactttttctgtatgtacttaaaaaaaaaaaaagatggggtctcactgtgttgtccaggctggccttgagttcctgggctcaagtgatacgcttgcctcagcctcctgagtagctgggaccccaggcacatgctgccacacccagcttaccttctaagctttattcatggttgcactttttccatatctctggcttttttctttcttttattcctgatatgcatttactatcatgttacaatttacctttccttgtaatgggccttaaatcttttctcggacaagataggaagtaaataatttaaaacaatttatttttttaaagtattaaataattttaccaaccactgcaattcccattttaatcttccttttaaagacactaacatttaatgtcttaccactaaattaggttattttccatatttgcattatttcttaccatttaacttaatcttcctgtgtagaatgtttgtttctgacaggactacattttttatattttaaaaaatgtttctcccaacccctaccacagagaaagtaagtgctccatctgtcttgactgattcattaaaatgtgcaaaacatttgagttatccttttggtcttaatatcataagtaaatacagttagaaataaagccttaattttcatagcataagtccccttttatttttctgtggatgcagaagcatactggaagtggggtggtcaccaagaggaggagcagatgaagtatctcggcctgtcttcccttgacatctagcactcctaccaggggccttgataccaggcccctgctggatatgagaacccagttcctgctgtgtcagtctttggtgtgtcacagctcttttatattcaggacactaacttttcagagggatatttacaaacattggtcttgttcttgagtcaaactcagcctcattcaaagctacatcccagctgggtgtggtggctcatgcctgtaatcccaacacttggggaggctgaggtgagaggatcacttgagcccaggagtttgagactagcctgggcaacatagtgagaccccatctctaaaaaaaattttaaaaattggcctggaatggtggcatgcacctgtagtccctagctactcaggagactgaggcaggaggattgcttgagcccaggagtttgaggccacagtaagctatgattgtgtcactgtgctgcagcctgggtgacagaacaaaaccctgtctctaaaaacaaaaaccctgcatactacattctctgccaagaagagaaaacagagccaatattcagttgacacgaaactgtattgtggctcccaactgtccagtgtttttcagaccagtttcccacagtctgactaggagttaagactcctgaatgtggatggtttcataactgggtttagtttgaagactagtgtcagaaatccgtatccctgaaactttaacaaccaattttagagttgattataacaagaaatctattgattagagatggattattgatgtaattttctcagttcatttctgtaaacatttgttgagtgtctaaatattggagattcacagataatccaatttagtattcttgggcttatggcctacaggggatgacatgtacccaggaaacattgttataatcatgttatgtatgatgatggtagcttatgcataattttaataatatttcagttctttccacttgaaaatgatctcacatttaaatgtaaagggtaatttcatgcacttaaataacataatgggttgtcagtttgtgatttaaataaacttgttcatgctctagttgctttccatgtttgtgacaggactttgaattggtacacagactttttaaactttattttgaaaaaacttagatttataggaaatttgtagaaacaatacaatttttatgtactcttcacccagattccccaaatgttattttacacatttacttcagctctgtctagtgtcttctttctaaactattggagagttgtagacataatgcttcttttcctctgaacacttaagtgtggatttcctaaaaataaggatatcctcttacataatcacaataataattatcataattaggagattactcaaggattttcagttgtcccactgctgtttttaatagaaaaaaaagaaaaaaaaatccaatcctggatccaagatccagctcaggaatacacattgcatatacttgtcttacatatttgctttcgttcatctgaaatagtttcaaaattttaaatatttatgatcttaacatttttgaagaatgcaggctacttatttgttgtaatatacttcaattagatttgtccttttccccaggtttagatttgagttacgcatttttggcagaaaaaccatagaagtgatgggttctcagtgcaacatgtcaagagatattatatctctctttcccattgttggtgatactaactttgattacttagtaaagatagaatctgcctgttttgtcctttgtaaagttacagttttttcttttggaaggaggtgctctgagactgtaaatatctgtttctcatcaaactttctttcactagttttttgttttgttttgttttacttttttttcccccataggttattggggaacaggtggtgtttgattacatgagtaagttctttagtggtgatttgtgagattttggtgtacccatcacctcagcagtatacactgcacacagtttgtatcttttatccctcaccccttcccacccttttccctcaagtccccaaagtccgttgtgtcattcttaagcccttgcatcctcatagcatagctcccgcttatgagtgagaacatttgatgtttggttttccattcctgacttacttcacttagaataatagtctccaatctcatccagatcactgcgaataccattaattcattcctttttatggctgagtagtattccatagtgtgtgtgtgtgtgtgtgtgtgtgtgtgtgtgtgtgtgtgtgtgataccacacacaccagtttatccactcattggtggatgggcatttgaattggttctacatttttgcaattgcaaattgtgctgctataaacatgtgtgtgcaagtatcttttttgtataatgacttcttttcctctgggtagatacccagtagtgggattgctgaatcccactggtagttctacttttagttctttaagaaatctccacactgttttcctagttttaaattccattcatgattcttacctgaaacagttattacagaattgttgccaaatgatttcctaactccatcatttctttctatgtttattacatgctactgtaaggaagaacttttcattcttccttgcttatttagtgattcacttatttacaccagcatggattgaagattcttaagtttgtttaatgggctataatctgtttctatcattatttgtttcaatgttcaaatcattcttgctttggccaggggaaatttcttcataatggttcttgtgtctttatcaatatttgagccatttccttacttctggtacagcaaagtgttctagactgtccagctccatcctggaatcagatatttgctccaagggctctgatttcttttcatggagaatggtatttagaaaccaagatctgcgttctagatgtattcattgttcctggggtgtcattgcttctatgtcctgtgagtgaacaaagctagtaattgtctgtgtatatgttttaaatagtcagctcatttatagttatatattattttgatatttgatatgattaatatgtattatttttatcttttgtttgttatgaagcatcatgagtatttccagaagacaatgagtacttggtaaactgatatcattgtaatgatattcatattttacatgtagttttggatttctaatgtatttagggtcatttttacagtctttggattatagcatttttgttatatatgacaataattcatttttctccttgaaaatattatatcttcttaaatgttattcttactttgcttctagtaccttttcaattatagctaatgggtatattagcactgacactaggagtataatatgcattttaaaattagtattctgatttattgcattcttgataaagatgttttcaaattaattggagcttgatatgacataattaatttgcagttttctttgtaaatgtatttgtaatggcattctggtgatttgaagagctttcttactttccttctcagctctctctggcaattcagcagacgatctggcagccccagaactcacctgagggcaaggctagtcatgatacagaagtcttgagacagagcaattagacctgattgctctaatttccccactatgctagaagataaccccatcaattactgatggatgtatggagcagagcctagtgtgtgcatgaaagacttcattgttctggcccttgaaccattagttatctgtgaaagcctgagcctggccatcctttgtgcatatcctgggcttggctccattataaagctctcttaataagtgtagagaatggggattcaggcttaatgcttagttaaataaaaaataaaataatttttatgtaatatgtgcctatttcagattactcggttttcttttgagcagttcaagaatattttgaatgcactaattgaactttttagaagaaatttttttttcaagtaataaatacatatggttaaaaaaaagctaatagagcttatagtgaaattcactgtccctctccattcactgagacagttttacctctgattttaattcttcagggagttaccactgtatatctaaatagcatgtttgcaataatatatttattcatacactactttagtacctaaggatttagctcatgtacacaatttcctgcagataccacagtatctcatagtaccatagtggtattactgctcttatttctccactggtcacacttgctcttcctggttttgtcacccatgcatcatatcttttgaccccaacccattttgagatgagtaagacatggctgagattgtacctgtcctttcttcagtctttcctctgccgtttctaatacccatctttaatagttttatttttactttttgctttgtgagcgttgattatgtttacattctcatctgcagtctcaattttatctgtaggttgcttctaaaagttgaaaaccgtaactcactacagagacacttagtgggctgtgattacactttcttatctcggcttccaggaccaactcatctaatactcagaggaaaagttttctggtatttgtatgtatgtatacatgtatatgtgtgtgtgtatatatgtatatataaaaatataatttaaaaattgatttgggtgatttattttcccttgaggttcctgtttgttttttcttacattgtgggtccatatcatgtctcatgtctaaagtttttctaagctcttaatcatcctttctcttctgttagaatttcttttcctagtcataattctcaaaatgattgtagtggtaactagtgacaagtgcatgagagataaatatcacaagttcttgcatatttgaaaatgtctttaaattgcactggattgatagtgtggttagttaccatatgtttggtgaagattgttcctcccaagaattttgcttcactgtattctagcatccagtgctactgatgagaagttgaattttcatctgactctttttacttctttatggctgatgttttctttcattatcatctctttgtcctcaatgtttagaatttttttattatgtaccttttttccatttttcttgcttgacatttattaagctccttaatttgaagatttggatcttctatatatttttttggctctgacaaatcttttcatatttatttcttttaagatgaatttcctttttttgtgtgttatattttatctttccagaaattgtaagtcccttattaggcctcttgaatttattttctctgatttccttttgtatttctatatcttaaacctttttgcactattttctatgatattaaattttttgttcataagctaaattagcttcttcaatcttggtaggctaaataatttttaccatgatttataaacagaggaaaaatagaacagattctaaactttatttgatagatttagttataaatttgtgtctcttattatgactttcttacctatattttctaagtctgtgtttatattaataggaactagaaaagaatttttaatttattgaagggaaaatgtgattaaactaggttctttatcactgtgacaattttacatatttagagaataattgcaagagttctaataccatatttacatgtgtaacttctcacttctaaaatacttaaaaactaaagaaatgttagattttagaagacagtgggtttgtaactcttgtcttcctaacagttggtatggccatcagcctcagtaggccttgaacagaataaagaatcagcagatttaagatctctcaaagagctgtagatgtcatttttttctgtttttaagatttatacagtttacattctcttctctattttcattaaaggtttgtgaattttgggttgtggtaactgatagaggaagcattcatgtagacataattttgcaaaaatatgaaaaattgcataattttatataatctgtatggcaaaatatttttaagtggttctttgtatcattataaaatatattttgaaaactagtttttgtacaactttgattaatcacttttgatttattgaattttttagatggagtgaagctagtaaaccctctacaattcttgtcttatttgttaattccttccctatattattataatgaggactctaatttgtgatgttaagcagtttattgcaaatctcttgggtgtttggcgtgttttgtacgtttaagtatgttataacttgcttaaaagatagaatttcttgaagctgtgaatgttaagattgactgtgattttgggtgaatacttcattctatataataaaataaggtaatgtattaaagggcgccagtacctgtaacatataccttggttaataaacaggagccacataaccccattcactttgtattactctctattttacctgattcttctagacctctgcatttaaaataacgacagtgaccaccatgtgctggctgttcattacagtagtcttatttcttatataaattgctctgtttaggacgagtaagctcacagtgttggtagatttattacaacacagcagtaacaacttcatagtcataaaagacattgaatattgaagaggtttaattataatgatgtatataaatgtccttaaaaagaagtgttaatagaaataaccttgttagtgtaatcgtgcctttaacttgtgaattcctttgtcttcctgaagagtaagttaaaatatccatcttcttttggtgatggggagggtgagagaacagacacacatacaaatcttatggttaaaggtcaacttgcaatatgttttgaacgtatctttcctgttggctcttagatttctgtttgctatcttttatttttctctctcttatggcctgttttgaaatcttaactttattatcatttcccagaaaatagaaatatttataaactaatggtaggattatttgcaaacttcaaaccaatcctcattgcttgctttttgctattagatactccaggaaaagtagtaagtcacaatgcaaaaaattgtttgggaaaaatgcaaagagaaaaattgtgtaatagcagattcttttcagcctcctggtggcagttcatgtgtgtgtatgtatacatgtgtgtgttttttttccttgtcaggattaattcagtgggaagtaatgtgacagattttgccatatggatattgatggaccttttcattttacctggcttagtgataggtataaaaaataattctgaacataatatatggaccaccttatttcatatattttaacacctattattttactattatatgtaggttgaaaaatactgcttttattgtgtttttggtgcaagtatatgatttcttggttaaagctgatcattccatagaaacattttaaatgaaatggcccctcaagagaaagatcagctttgtcccttcacgggggtgtttaggcagcaaagacctagagtattatggaataatttgtcctaggtcaggctgctataactgtgtaaggacaaaagcagagtggaaggagatgggagcatctgggacccatttgtttcctcgagaggagacaatggatctttttaaggaaattgttggataaatcagtgtctcctccttctttccctctcttcctacagggtccctgtgttcatgatgaggactctggcctatcgctcattggaaaacctgcccttcaggctcttttatatcactgccatttttatgaacatttgaatcagatggtaaagcattgttacctaggacggtgtatgtttgatttgaatttttctgcttttgatagaaattcagaaagcaatgatttaaatggtaagtacgatatctttgtatttttatttttgtaatatgtaacttgtaaaaactgttaaaaatacatatatttgttttaaaaatttgaaaaatgaaagtatacagggaaaacattcatttccagttctaccacccagagagatgtattttcttcccgtcttctttctctgtatagcctttgtttgttttatgtaattatgttcatatcttgtgtacatttttgtatttccttctttcactaaatattctgcaagcatttttctatgttataaattcttcatggaaattatttttgacatcttattaatactttataagttatgcccatcagtacagttttatagtttctttctctgttaacgtctcaaacttttttggaactttcacttctaggcaatgtacagtttttttatccttcttgtgaatgagactttttcccactatattttctaattcattttgctcatgtatcaaaaagttatttattttagtatgttacttatttgtcacaatattttcctgaaacctttttattccttttgtttgtaggttcttgtagatttgctaagtataagatctgagcacataaaaataattatatcttgtaataaatagtaatttaataatataaatagcttttatttttaaattcatttttataataattttttagaatcttgccatagtttcaaacttacagaaaagcttcaggaatagtacaaaagaattctcaaatgttaacattttacagtatttacatcttgccacatgtgtgtgtatgtgtgtataaataaacggatatgtatgatctatatatactctttttgagccatttaagagtaagttgaagacatgaagttcctttatccccgaattattaagtgtgaatgtgtgattcacttttctgtttacttcttggaagaatcaagaaaatgagatttgatgaagttttgaacattttaaatatccctcttagaaaagtgactcacttaattgtttagatttctctggatcagttacttagagcatggcccttaaactaacagcattggcatcttctgtgaacttgttagaagtgaacactcagggcttccactctgacctggggtattggagcctctggggctggggctgaagcagctgctttagcaagctctcagtgattcttatgcacattaaaaaaaaactctccttagatttttttttttttaaatagtggtctatctcagaagccagatccatataagttttttcctttctttagttttgaattggtttcctgtaatgcgtacccttttaattaattgttacagttcctaggagggtgtccatgttaacaattttctcgttgttgcaggtttagatgactcattcaagttttggagggctccatctaggacaagtcaggatcgagatccaagttctctctccacctcagaaacaacggtacttgcaaagaatgcataagtcctttattttgaatctctgaaaaaatttgagtttgcctagtgggagagttaagaatacaaagtgtaaggttataacagctatgatttattcgaagtgctttctgcagaattttgctaaattattgtattcaagctgcacatcagtcatacattatagatacttatcttgcttttctgtgtgcgcaagccactctgaagtaaagtaactttgtgatcattagtgctataggtagcagaactggagtttgaaccagggtgtgtcttgctacggtatagctacactgaatatccctttagttgagaattttcaacctctctttcctaccttttttgatagtacgaaagtgtgaaaatatgtttttcgttagtattagaagagaacaaatcctacatgttaaaaatggttgattaccctgaaattgtgcttaagggcagggcaatatgaagaacattcaaatgattctagtgtggtgctgacagctttaaacacacttctaaatacttgcatcacatagaagtttatctggaatacctgaaatttatatatgcctgtttgcatgccttctttccttcccctttcattcatgcattagttgctttttttgcagaaaagtttgaaacactgagtatttataaggaatgattgatactaggtttcagttatttacaaacatacagaatcatttattctcaactgggaaatgttacttttaattttaaagtgtttttgaaataattagtgtattatacaacatatcaggaagggaaagatttgatacacctgtttccaggaacaaaaataatatgagaataataattatacagacattataatgtaaagattatgtttaatctatctcctagtttctcaaaagactgatactttttgctacagttttaagtctttttttccctagattcaagagaagtatttgtgtttagtgctacattggacctttgtatggaaaagtaagataattacccgagttccactagatgtcatgctttcctttccaaggtggagatagtgtgtacctttgtctcaacaagagcagtaatatgataaatgccaaactgaattgtcttaattggttatttagttcacagaaggacagcatgaaagtgtgcttaaaagtaaattttgtttgttagcctatttgtcaaaagggctatagactagccttgaaatctttgtacatatttcagtttttttgcttttagtaggtactcagtaaataataattgctctaattaactttgagttatcttagctattttgtggtgagcactgaagtcatatttatcctatacaagaaaacctaaatacaaaaagcaaaagcatatcaaccttttgaatttctctattttgtaataacatttaatcttacaggttagaatactagattttctgagaaaatttggaaatatgttattaattgtagtcattattaaagaaagaagcaccccaattaaagtgaaggtctttaacttgtttgtgtttgaatgtaacacagacttttagaaatatataccaatggaatcttttcagtttttttaaaagaattttgtaatatgtgtaaaatttatttcttattattttctctaaaggctagtgtattctgttagaatttttacagaatttactttttactttctttttcgggaggtttccaaacaacttttagaatgggtgacttttagttacaaaaatagtcttcgtaccctaattctactagttatattttctttaccatacccaagatgatgtgtatctttgtcccaacaggagaaaaatctggagagtgttttcattctgccagtgttactttaaaccaaagctgtcagtacttcgaccaaggcatactttcttatgtataaaaaaatgttgaagttacaaattgaggtataagttgagtggatgtaaatcttattaatcagcttatctgcttatttatatctttgttttgtttatctcagaattgagaaaaaatgcaatcctttattggttagttggctggtttttccattttatctttccaaggaaagcatcatcttttgatttgggtcatgtcatccagcatgctctcctgggttactatccattttgtgctgttaatgccaagttagggactttcatgctgttacctaatgtgtattagttccgttgtttggcaagcttcgtaaggattgttgggtcctgtatgtttgataaactgcagatagagtaagcagagtgtcattgttagctttggggcatcgcccttgtaaatgcttcctcaggagtggcctctatcgaactcaatattctcctcctctggggtaggaggatgcagccattaggtggtgtttttcttctcgaaatcacgtttatatccaagatggatagctgtttgtgcctcttacacacctgtgtgcagcaacagctttatgaccaaaatttggtctcttctgttgttcctgagcagaactatgtctgtatttttttaaatttatcaattgtcaaaataaaatatgtgggaaatataattcctttctttttgagcctttctttgtgaaatatgtgatctttcaaacttttttctggaacacagatttaaagaaaactgattttagtttttctaaacatttaaagagaatttttacacttcatagtcttaaaacaactgaaaagcattgttactattttgcaaaagaggaaattagggcatggagtgaggtcccactccatggagtgcatgcttgttcaagttcctagcatggtaactggtagaccattcttttgagtccagaagtatgtttgcttcctccttcactctaaggccagatgtgattgatcccataaaagatggtgtagtcaagggacagtgaggtttctttagagggaaagatgaaatgaaaagtggttttgtgtaggaagtggccactgaaatgggctttacaatattatccccttctcttttatatgcatacaaacatttgcaagggactgaaaagattcaaatattccttaggattcagtgaccacttaacaaatgacaaaagtctacttgagaacataaagcatacttagactttctaactaaatatgaagttgtgttgtactgaaggcattaacattcagaaaatgcaagaggttgtttggagtagaatgtgggacggaaagctaaagtttgatgacctgactaatcagataggagttagttaagaaagctgaatcagcttttggatttgaagaggtaagatataagagctataaagataaagatgtaaggatatttcagcagcatggaatggcatgaaacattacaactgatatgagagaaataacgtattgacactcatttgatggtagttaaaattgttttatagaaggaagagtagacagaggatagtttaagcagggatggatccaagaggctttctaaaagaaaaatagttttgacataggcatcactgataggacatacaaatacctccagcatggtgaccccaggaaaacttgaggaggtggtagtttgtgtgatgatggagagagaaagaaaatgttatactctgtttaaataaatttcagctacctgtggattatccagagtctaacaacctcttatatttagttaggaggaaaatacaagtgagacaagctcttggaaatttgtgctcttagattacacacaggatggcacaggaactgtgactgtgttgtggtgatgatctgtctctttaagtggtcctttggttagacatgcaagaatcgtctatcatcttctgctcattccttcagaggacttttctgagctttcttttttttacatatattgtacataatccatttgaattatgaatctattagttgaaataatttaaacttcttgttataatttggttagaattaatgattacaaattgagaagcatgccaaagctttcctgctcctgggcatatagagaaaggtattatttattaaaatgaacacatgaagcttagaatctcttagaaacccttcatatcttatatttttccatgttttcaaaatgtggctagacttgtactttatttttttcacactacaatccttattttctccctttgtacctttttaaaaacaattaaataaacttttttggcaccagtactgcttttgagggaagttgatggaactattacaagatcattttggcaaatacaatattcaagttctgaattaactttcaaaaaaagttaaagtgtctagtgaaatcacttgcttctgtaaggcagatacaaagaaaatcatttttgtacattgatgcatttttgcttatatgacagaaattgttttttacattccagttctacttggatatggcaaatgactctgctattttcagtgatttcaaagggactttcttaattttagctgcttattttacactgaagcataatttagaaaccttctttagttaccaaatctgcttacaaacacactgaagaacaatttttttcagtttttataagcaagatttgagtccattttatttttttattttcccctagttttgagctaaaatgacaaataaaattgtatatatttgagatatacagtgagattacttgacatatgtatatgtgatgaaatgattaccacagtcaaattagttaacacatctgtcacctaagagtcaaccttttttttttgtggtgagaacacttaagaactactctctttcaagtagactgtgcagtgttattaaccatattaaccatattcaccatgctacacattagaccatattaaccatattcaccatgctacacattagatccccagaacatactcatcttatctgaaagtttgcactctttgaccaaacatctccccttttccccagctcctatcccctagcaacatccattacactaatctgagtctgttttaggacagtacctttaagtagcatcagcctgctctaaaaagcttgtattgtcttttgtaatatctgtaaagtaataaggctagaaatatattcaaattcagatttttttgtcttaccgagggattataaattgaagatctcaggatatgtcatgtggcagatgtgaaagcgagggaaaagtctagattgtgattttgcacttagaccattctaatgaattgagcaagtgatagatacaagaattagactctcgctgttgtaagaggacaaccctagttatcctacttactgtgaggtacagagcagagcagcgagaagcttgacaggaacggatgacttcagcagactaagtttgctcttaaactaagccaattcctcctccttcacctgggatggggcagctgaagttagtctagctgaagttccgcggggacacagggggatcagggagaaagaagcaagcctctcctcgcaaacaaggccagccagctttctcaagaggtacgtctgaggacttcctctgattctaacgaatttatgctgtcatgaatgcagttctggactgagaatcctagtctcaactcagacaaatcccttaacttgtggtccttttctctaaatgaggacgtggactaggtcaggctttttgtacctatagcttcgtaggctcatactgcaccttccagtagctaatacttaatgccaaaattgtctagttattacttggattttaaggtgaaaagtaacatgtttacatatcgatgtactttatcaaatgtaaccaaatactatcgattggagattatatctaaacaagcaaagatttgagcatagaactgggacaatttgctttaatacttttttgcttttagttattaaaatagcaatatattagtttagcacacttaaaaaatagaggctagtagaaatataaatcatccataatcaattttaaagcaccatataaagcaatcattgtgtttccccaaccacatggggtaagttataatacaataaggtactttctaaaagcatcttttctaaacttgtgtatcccttctgtggactatactaaggaaaatcacatctttattaatgcctgacctttgtcatgaatcacaactttgctttcttctaatgagccaggtatttagtgggcccttataagctttcttttcccacaccgatcgttgaaaccgcaaaccaggtacctattctatttatatcagtaataaggccttcttgagtctttatcagttgaaagaatgttcagtgaaatgataaaggatttcagcatcattatccccttaacttttcttatacaaccaaaagagttgtggcaggagccagatatattagcttgtgcatagtttgtgatatcagtcttggcataggattattttcttcacagaactataaatgttgtcttgatatctgttgacaggaacattttttcacatatctctcattgccaaattgtaggcaaatatatttttaaaaataaacaagcttgctgggcgcggtggctcacgcctgtaatcccagcactttgggaggcagaggcgggcggatcacgaggtcaggagatcgagaccatcctggctaacacagtgaaaccctgcctctactaaaaatacaaaaaattagccgggcgtggtggcgggcgcctgtagtcccagctactcgggaggctgaggcaggagaatggcgtgaacccgggaggcggagcttgcagtgagccgagatcgtgccactgcactccagcctgggcaacagagtgagactccgtctcaaaaaaaaaaaaaataaacaagctttaggttatttttacttagtatctggatctaatactatataaaataaggcatttgatgtttgtttatgattgacttatttagactgaacttttttccagatttactttttagattatgtgcttagcctacattttttagctgcagctttctcacttatttcttggcatcatgactgttatacttacttaatgtggtgaaagatggttaagggctcaagttaaaagggggatttaaaaaactgtatattccatttttagtaatttcttcaaatttatattctctttactattagaaactgcaaatgaaaataaccttagtttttgctttcatttcatcatggtaattctaaggtactctaagtgttaagatatatacacaatcaatgtacaaatactgtgagctatataggatctgagtctggaatgatggtttataacttctatggatagctaatgttgtgttgcatgtactgatatggaggctacccaggtatgggcacttcatgttacttcacagaagagaaattgatggtaaggaaaagagttatctgacctcaccacataagtgtttttcaactaagaggtgcttagttgaacacctcttagcgcaaacacatcactttgcgctttttcagtcttagaaggtcggtctgctcattataaacctgtaggtgaaattgtacttgctttccacggattttgttatatttaatgttgtattctgaagcaatctcagcaaactggcacaattttttagtgttcttccttgataggaggtgaggtagagaaaaatcttttaatacttctaattttttaggcactattaaaatttatatgtgccatttggaacattaaaaatatctttattgtcaatcaagaaatgcaaaatatcacaataaattatagttaaggtggtatattttagcctttctaacatttgggcaatgagggaattggccttatgggaaccttaaactcctaaatgggcctgaagtcaatactgctcctttgagttactgatttatgtaaatgataacaattcctttaagaagtggaaatgccatttaaaaaaactgctgtaactcccaagatatggaatcttttctagttatcctaactagtataattttgtcttaaacctccttgtttaaggatatcttgtgtgtatgttgcctgtgtttcattttccgtactgtaacattaataagtaaaataatttactgattcataggtggcaccttcattggggagtactgaatttcagccacttgtgcagtcaacaacacttctacctgaagcctcccatgaccagtttgtggctcaaggtatccttttagtgaagacattctaccttcaaaaagaaaaatgacaagttggtccagacagatattttgaaagtaaatgtctaaagaacaaaattttaatgaaataagttgtagaccattatgaaatacatttagaaccaatatatcagaaattaataaaataaatgctcttaactaataaatggaatttggctcttaaataaatagtccaattcctgtgtggctccttattaggcgctcgtaggtatttgacatttgaatttgggaactgatgggtataacttaactttattttttcccttcttttgagaaaacactttgctacaagtaatccacttgaaagtaaagcgattctggttttaagtattttctaaggctatgcttccatttaaaggcacataaaatgtattgagtctttattttattagaaatgcacaatatacaacttgggacttatttttattaatggcaatatataaattttgctccttgtgctgggaactgcttccaaccctgctgtgcttcaaatttgcaactttgctttttttttttttttttaaattctagagagtatataagccttattcagtagcattaaatttttgacttgaaaggactatactatctaaaaagaaagtaattttaaacactggcatacatataagtatatgcagaaaaaatactttctgaaacatttagaaaaacttgctgaattaaaactttgaactttcattacaatatttgttccaataatttcctaaacagtgttccatattggtttttagtaattcatgttcactatatataaaattatttaactgtagaaaatactcatttgatcttcttaagaacaaaaggagcaaactcagattatttaaatggctcaggacatagggcatgaaatgaaattcgatcatgaatttcatgaacatttatctctaaaagcatgttgccttactctgatttttaacatctttattgagatataattcacataccatataattcacttgtttaaagtgtatactttattggttttaagtatattcagagttgtgcaaccgtcaccacgatcaattttaggatatttccatcatcttgcaaaaaaaccctatacccattagcagtcactccctgtctcccccattcttggcactctacggaatcactaatctactttccttctttatagatttgcccgttttggacattttgtatgaatggaatcatataacatggtcttgtgtgactggcttctttcacttagtgtgctgttttcaaggttcatccatgttctagcatgtatcagaacttcatttatttattgacaaataatattccactgtatgaatatattacagttacccattcatcacgtgatataggcatttgtgtggatatacaggctttctgttttttgtttggattacctttgattttaaatttattttattttcaagtattaacgctttttttttttttttttttttttggaggcagtctcactctgttgcccaggctggagtgcagtggcgcaatcttggctcagtgcagcctctgcctcctgggttcaggagattcttctgcctcagcctcctgagtagctgggattacagaggtgtgccggtacacctgcctaatttttgtatttttagtagagcttgggtttcatcatgttgcccaggctggtctctaacccctgacctcagatgatccacctgccttggcctcccaaagtgctgggattacagacatgagccaccatgcccgtccacaaatagtatgctttcaatgtatatttatgcaattttactctttgccaatcatttcagcacatatatatgaccaaaaaaaaaaaaaaaagcatataaaagaaagaatacccacagaaaggggaggcatgaacagaggatgaatcctcacaattttttggtgatatatgacactatcaggtatattccttttttttcaaaacttggaaataagagatcagggtgtcaaatgtcctccttagttttacaaaataaattagcaagaaaattgaaaaaatatgtatcaatttatattctgaactagctctctttacagaaaaattcaaaaaaggtttctatatatgcttgctctagaagtgctgaagatatgtaatacatattttatgaatactgaaagatttcccttgaaattgtttggacaattttcattagaattatctcaatttaattttttccatttttatttccaaagatttatcattattttttaagagacagggtctagctctgtcacccaggctggagtgcagtggcatggtcatagctcattgtagtctcgaacacctggactcaagtaatcctcctgtctcagtttcccaagtggctgggattacaggcgtaatatttgaggggaaaagaacacaaactctcatgtaaaaatgagcagaaaacatgaaaagataattcacaaaggacctaaaagtagcctttatctttggaaaaatattatacaaattaatactacccgaagatacttttttatttattaaattgccaacaattaagtattggcagtacattcttttggcgaggctgtggaaaataagcactttcatacattgttagagaaaatgcaaattagtataattttggaagggaatttggcaatagataacaaaactatgtatttacctttgattaaacaattccacttctaggaattctcttttatttatctccagcaatataaaaatacatatgtacttgataatttagcaagcattgtttgtaattataaaacatggaaacaacacaaatgcctgtaagtagaaggatagtttttgatagatatataacaatatatagataatgataaacatataacaaaattacttataaataaaatttatttttaaaataacaatggagaactacagctattagaaagagggggctgggcacagcagctcacaccaataatcctagaacttttggaggctgaggtgggagatacttttcacgatagtgagactgtatctctacaaaatataaaataaattagccaggcatggtggcacacacctgtggtctcagctactcaggaggctgaggtgggaggagcacttgagcccaggctttgaggcttcagtgagccatgattgcaccagactccagcctgggcaacagtgagaccatttctccaaaaacgaaaaaaaaaaaaaaaaaaagaggggaggatatcttcaaacagatatggaccaaattttaggaaatattgtcaagtgaagaaagaagcacaatgataaagagtatttatagtttatgatatttacagttttctacttttgcatatgaaagaaggggaaatttaaaatacgtgtatctatttgtgtagaaagaaaacaggaaggaacagctggaaatgaatgagattaattatgagaatgggtgggagttagttaggaaataagagaggatgggaacagtgtagaagagattgaggggtgggatagtgacccttctctgcatgtatcttcttgtataggttgacttttataaccatgtatgttttacttgctgaaaaaaataaaatcaacaaaaatgggaaacaataacatggaatacaaaccaattaatccagctacatttcacatgaatagcattgaagtgagagaggaagtaaccccagtaactctcagacatatttttaggactttagtcctcagactattggcaaaatgaactgtaaccaagcattgaactctagttactagttttattttttgcagtattattagttagaaattctgaaactacttattgtgttcataaggcaaggcaaataagtaaatatattgtagacaatgaaagccagaatttttactttcacataacggaaattacaaatatggaagggaaggaagatgtttaatgttggattatatttggagtgttggattatatttggagctttcagtatgaatcaattattttgttttttaagagatgaggtctcattctgtcatccaggctggaggacagtgctgtgatcatagttcactgcagttgccacctcctgggctcaagcgatcctcccacctcatcccgagtagccaggattaaaggaatgtgccgccatgcctggttcatttttaaatctttttgtagagataggtttctgtatgttgctcaggctgatcttgaactccttgcctaaagtgatcctcctaccccagcctcacaaaattctggaattacaggcaaattaatgatttttaattcgtagataaaatatgtttatgtgcccaggggtatgtatgtgcatgcatacgtatatacacacacgttttctagcttagaaacaatgacactctaaatagcaatgtatacatttagtgcccaaatcttgctttccaaactccattctccactttagggaatcgacactttggaacaaatatccaattttagagcttggacgaggaaagaacaagatgaacctggaacatcttgctgtgccagaaagtaagggaatgctcaaaggttaatggaggtgttcactaatgtagggtgcaggtaccttattactgttctaaagtctaaaagtattttggagaaaagggagctctcatacagtgttgttgggaaccactgtggagaacagtatgcaggttcctcaaaaactaaaaatagaacctaccctctgatccagcaatccagctgctgagtatatatctaaaagaaaaaaaaagtatatcgacgagatagctgcactcccatgttgattgcaacgccattcgtgatagccaagatagggaatcagtctaagttccgtcagcaaatgaatggataaagaaaatgaaccatatatgtacacaatgaaatattactcagagaaaagaatgaagtcctgtcatttgcagcaacatggatggaactggaggccattgtgttaaatgaaataagccaggcacagaaagacaaatattgcaactcatatttgggaactaaaaaaaaaaaaagttgaactcatgaaaatagagagtagaatgagggttaccagaggctaaagagtggagagccagagataaagaagggatggttagtgggtacaaaatacagttaggaggaataagatctagtgttcagtagcacaacagggtaactatagttaacaataatttattgtatagttcaaaataactaaaagaatggagttggaatgttcccaacacaaagaaatggtaaatgtttgaggtgatggatgtcccagttaccttgatttgagcattgcacatagtatgcctgtatcaaaatatcatgtgtaccccataaatatgtacaatgattatatatccataattaaaaatttaaaaataataaaaatagtaagattttactctgaagaaaacctaaagattatttgaatttggacacacctttggcccctcgagtttcagaaaaaggattgtaaatcatctttttgttctcagtgtctgaatacgtggggcatgaagtcatgttctgccctttctgacctgtctcttctgcatacgacaatgtccgtgtgtacacatctacacatctacatccacacatggtggaaggtggaggtcaggagtagtaggggtagcctgacccctaacctcaaggttaagatgagccaagaagctaaggcaattccccaactatacattatcattttcaggaactttcctatgattataagaacttttgagtattgtacatagctgtaaggtaaataataattcttatgtttattttcaataataggtcaccaggaaagtacatcaccacggccacctcatgattcatctctttctgctcccctgcccaaactgtgtgtttttgttactccatctcttctttcagcaatgtgcagcctcttggacaacctcttgacgattgctcccagagacactgcaaaggcttttcgacaagctcatctcatagaacttctctgtaggtaagagataaatactcctagagaggcatgttagttgagataaatttacacaaactgtattcatgacttgatacaagatttcttgtgacctggaaatacagctttattcttttttaggctcattgaactctaggattttgcttttgccagaattgtcttggtggtttttattttacatctattaaagcacttgtattagtttgttatcttgactattaaggccaaagaaaaactcctgctttctaaaattcatggattctaaaccttatttatcctccagcacacttaaggaatatggtgctatcccctgttcttaatggatgtgagggactttgggaattcatctttttagtggtcatatcagaataatgtccctgggttgaaaaattattggttaaattcatttggagttattttgttaagggaaattaaacttttcatcaaaaagtattctgataaaatttagggaaattaaattcaaagaaaaattatttgaatttttattacttatttgatattaatcagtctgtaacataatttttctgaatttctaggaaggtatagtagaaaaggactagatattgaattcaggttgacctaaggtctaattatagttcattcactcagtagcttgcagccttgggaaattactccctactgtgtcattaacacctatttaatggggttagtgtgagaattaaaagtgatggtatctaggatacccccttaagtattacttctcttttcttctggtgttcagtttattctagccaaccatacccacctccttttgaccacatgtttatttgcatttctctgtctctctgtccctttacctttgaacatacaccatctgaaatgtcttgcatcttcttgccaaatcatagtgtcttctctttctttctgggatattaagaaaactctagaaaatataaactctaaaagaagtattccttgtttcacctcattcaattgtaattattcctttaacatgtatgatacgcaatggagtatgagtttgttctggctttaatatttattgatcatttttttactgtacctactcggattggaaaagtaactgctagtcagttggctttccttcctggatgctcctgcctgaagatgaccaaaatagagctctagggataggatcttctttgcttcttacgagtcagctaagagtctgatgtggcattgaggccacaggggcattaaaagaccttttatggcaaaggcttatcatatttccgtacctgtttttcatttttgactttaaaaaaatcctacttgttttactttatttttatttttttatttttatttattttgagacggagtttcactcttattgcccaggctggaatgcagtggcgcgatctcggctcactgcaacctccgcctcctgggttcaagcgattctcctgtctcaacctcctgagtagctgggattacaggcatctgccactacacccagctaatttttggtacctttagtagagacggggtttcaccatgttcaccaggctggtcttgaactcctgaccccaggtgatccacccaccttggcctcccaaagtgctgggattacaggcgtgagccaccgcacccggcctgttttactttattttgttttttactttctaaatatgaacagtgttcttgctattttagccagtatttttgctattttattaggaaaataaccaccaagtttcctgttactcatgggctgtattatattttattctgcttttaattaggtttccttagatattttcttcacagctctttgcttctcacttttctctgacaagatattttcctgtttgaaggtaacccaggatacaatttgaaattctttgagatatctttttataaacattttctttgcttataaagatcctttctcttgaattgtattcgagttacctttaaacttcaaattctgatttcttaatctttaataaaaagtatactaatcttctgaaggattttctttttctgatcgtcacagcattgcagatgctaccctcatacagacatgtgtccaggaactcagagccctgctgccttcatcacctccagctgaacacactcaggctcaggtaagcatctcaagtctgtttgtgggtttgtttacgttaggtgtcaaaaataaaaatcttgctgaggagatactagtcataggaaaaggatgaaaacctctcaaaatatacatggtatgatgagattattcgaaatacgttacttgaaattttaatatgggacatgtctggatgttagaaaagagaggtggggtttgaagacctagattctattcttgactccatcattaaccagctttaaatgtatgatcaagtgtctggatatcttggagcaccactttaataataaagagggacattggtatagttcacttcctgcttctgtgattttaggctatctctgttatttacaccaaagttaaagttgttaaaatatttggtggctaagttatgtgtattttcaaaacccaatttgataaaaatgatttattcttgttccttcacagatatttagttttaaattcttgcctatagctagaatctatttataaaacatgcttaacaattattcatgtagctgttgctaacagaaattttatttcaaaatcaaattttaagaagggctacaagatttatttaggaggtgatgaattaaaggtgaagtagaccaatatctcttgctttgagatgtgttctttgagctgaataagacagaccccattacaaagtttgggaatgctacacgcatggtctttgaagctgttgtcctggtgcagtgttttcacctgagcatgcctattgcataatgactgtctcctccatttttctgctctccatccagcaaatctttgttgagtacttgctgtgtgcctgaatcttctccaagtgaataaaacaaagacccttccctcaagttgggagaatagataattagaaaatccatatatgcctgaagatgatagacatctcagaagaaaaactaaagcaggggacaggaagtgatgtcagagttggaagggtagggctattccacttaggatgattaggcagtgtcgtgggacccaaagttagtgaagaagctagtcctatggtcattgcaagacccctgaggttggggtatgcttggcctatccaagaaacagcaaggagggtggagtcgctggagcagaatctatgagggcaagatgaggccagaggggcacagtcagctccatgaagtcaggaccttgctggctgttatgttccattgtgttctgagtgtctggcatagggcttgtctcatgacaggtgctcacttgatacttgtgggatgaatgaataatagcagtagcaaacatttatgggcatttgtttttgttaattcatgtaatcttcacaagaatcatgaagttatcattaatgtcattttataaaggaaatgcctgaggcccagagagatgagtgacttgtccaaggtctctgacatagattccaacctatgcaggtcagttccagggcccacattcttaaccactgcaccagctggccttatgtagattaaatgcttctgggctcttggtatttatataagatcattcactcatttcagaaaattcttgagcctctgctttaccagattctgttctaggtgctagtgatatatccttgaacaaagcagatgagcatctctcctcacgtagagtctgtgccataaatgcaggagacagacagtgaacaagtaaataaaatgcattgtatcagatagtcacaaatggtatggaaaaaagcaattgaggatgggtaaaagggtgtgtcagaaaggggaggggcctcctgaaggtgacacttaagcagaaagctggggaggtgagggagcaggctgcgagtgcctgcggcagatggggtggccagagccctgctggtggggtgatactctgctaaaggtatgatggattaaagtctgtggtcagttggttggtatttttttttaagagggccatacatagaaaaagagttactttatcaactactcttaagatatgaatattttatttaatcttgaatgtgatcatatacaaaagaatctttagcaattcagcgttttctctataacacttcttcttgcctcacctggcatggtttatctatttatggtaatatttcatacatccagaggtcagacttgctataatttcagtagtgtagagtatgaatgtaatatgaagtctcaagacttcacggcagtaaacaaattaaatttcacaaactgaagagtttgtgaagcctggagccacctacacttttatataaagtaagttggcagattagataaagggaggacgtattcatcaggagaagtagggcagaactatttgtaaatagtctgagaccattgacctcagagacacatactccacaaatttacaacaggctctcgactcttcattacactcttacaaccccagaataaggtgagaggaaaaaaagtgtgtgtgtgtgtgtgtatgtgtgtgtgtgtacagagagagagaatgactgatttcagaatatctttataaaattcacttatatgtaactggctcattgcttgagggtagtggacaaatgagacatcacagctcattctttaattgttacatattcagaggattatttttctgaaaagtacttttgccagttaatacttaacaatattagcatcaggcaaattccagagatggttttgttggtaatattgaagatgatttaattttttcttttataattaataatagtaattttatgctgagggcaaaaatagaacatatttgcattttatttgtagcaataactaggctagcttccccccacccctgcttatgcactttgaagggtgtttttgtaatctttctttctttacaaaattatagactttatggctttgttatacacttttccacttcttccataatattgatttcataatttgactacttgaaaaatatgggacttttttttttcttttgaaacagggttttactctgtcacccaggctggagttcagtggtgtgatcacagctcactatagcctctaccttctgggcttaagtggtcctcccatctcagcctcccaagtagctgggactgcaggcccggctaatttttatattttttgtggaaacaggatctcaccgtattgcccaggctggtctcaaactcctgggctcaagccatctgcccaccttggcctctcaaaggactggcattacaggtgtgttagctaccacacctggccaagactttacttctttaaatggaattcaaaacttgactttgaaaacattgctttgtttggtgtatagttgacagtattaatatggctgttaatgacatgcttatgagaaaaataatgctttgtctgctatgtgttaatttcagatcttgaaaaattatggttaatattttattttttattgtgttacaaaagtaaaatgctgtatcactgagatgggctttttatatggcatgtttgatttgaccctgtctccttttcaaacaggtttcctttctcctggaatacctatcctctttgtccaggcttctgcagtcatgtttattggtggagcctgaccttgtgattcaggatgagcttgtgaaacctcttatcaccaatatcattggaattctcaccatatgtaccaaagatgtattaggtaagcttaattgttttagtttagaatgtaagtgaataatactgaggaaaaaaaacttactctgtttcagatattcacttgaaggttactttttgagtttctttttgctagtattttggaaggctttgataatgtgttttatagtttggatgccttttaatggtaccaattaagacaagtgtgtagtataataaaggactacccttgagttttcagtttaaatgagggcaaagctctctgtgtgatgttagaaagtacagtgagttctgggtattaactattcttataaactatggctaaggccaaaagcttaataaaacattcccaataacaagtataagccaatctagaatatatcacaaatttcctaaggtcctaaattattgaaatgtatatatattttgtgatctaatgttatctccaggggaaaatattctatgatgaaaagttgaatgtaatgcttagtggagaaaattaaagcaaagtaggatctttgtcaaaatctaatataattgttttgaaaatgaaaacaatcatttataatgaagtaattgaccatttggtaattctctttgcctttcagttttatttgaactatggatttacttggttttaggtctggaaaatgaagtgtgttatgatacccagcaaagccagttctcagcatctcatcagtgttaaaatgatctcgatgttaaaggaatagtaattccttagaaattcaacaagtggcagtgataccctaactaagcttattaggttagactggacaagctcaacaaggtgatatcacccccagtctctaaggagtgaacattgattctggggagaagagggtgaggcaaaaacatcttagaaattaaaatagtttgtaggcttccaaagctcaactctacctgagacaatcttattactatttctcttcctggtttttcttgagaattccttgagaagcattgacgttgagttcatggaagatacacaagatgtatgcaagactagtgccacaaaactgtggtgaatagatgacagcagctggaggacctttggttgattgtttgatcccaaggtcatatagcaaaaggtggtctgtgtatcttggctgctattggctgccttgtgaatgctttttattgatcctcttgcttttctgtatgatttgagctttgaaaattaattgaaagtagtatatatttaattacataaaagttgtttaacccatcattaattatatcaagcgctgaaaggaaaaaatgtcaatatctgaatgtatatctattagctggttaaattaaaaattgttttctcatatctagcaaaaagttttaaaagttcactaagaatatttttaaagaagtttttaaaatttttttctgaaaaaaataagttttaaatgattttataagaatttattatattgctgttgtttttatatgaattgctaatttatgtatgtaaattgacacattgtgatgatatatatatataagtaaataaattacatgaaaagttattcagcaagtataggtgcaaagctaaatttggtattaataggtctttaatttttaatttaattttcagcttaaatgttttattcggctcttcttaagcctgtattgaataaaaacagtaagctctatacttagcctttttatgtacaaagtacagatatacatatagtacataaagagatatacagtatatgtgtggaattaaaatcttgtggggatggcaatgaggaaacattttctgaaataaactctttagagagccactaatgacaaaagggttgagaaacaccaaggattgccctggggaaggtgcagttttcaagtatctcataggtgctgaagtacacctagatggatctcctcggggttaacgtcctataaagtttacattatagtggaattagataaaagatgacagatccccctgaaggcatggtcagagagagtcctcagcgactgctctccagcttccatttacctgagtggagagaagggaaaatgggtcctcatcctagaattgctacatccttagccataggaaaagctgcagaatcttcttttgcgtcatacttttctttgtgggatgatacttttcttggttcttcaaagaaattctttcttttctaccttgaccttggcacactgtgctttcctttcacccctgcccaaagctgctggaggggataaaggaaataggggaaaacttactctgacaaaagtagcacaaacaatgacatatttttataatgtgccaatatgtagttctgcagtcatggcttaatatttagtttgtcacaccttctgattgttcttgagtatgctttaataagaggagagtttgtgagtgtggctttatatgcaggagggtggaggggagatatcttaagaagcaatggaaaagaagttaattgaaataaattttggataatgctgaattagatttgtcttcatttgataagtgcacacccctcattttaagtgtaatgaagcgtctgtggtaagttttatatcttgaaaggttcttttccttctttgtgttaataacttgaagtgttttgattaattttatagataaagagttaatatcagctttttatcacacatggacacatttatttaatcttctggccatgctcctgaggaaagctggtgccatcacactcccgtttgttaccgtggccctggccaagcactggacagcggcgattggtaagaagatacttgcataatcttgggggctttctgctaataaaacgagataatgattctgcctgtttaggtatgtaaattcactaaagttaagtaattatagcatggcatataaaagaggtatcagggtgcttgctttgaaaaatttgcagtgttcttgagccccccaaaaatgcatttttgaaaaattgaaacacattttgagataacataaaagcgagttaggaaagcctgtggttttattattttttaagctttttaaagatgtcatccctgaagctctgttttattgagaacattatattggccactgttggtttttttaaattttactttaagttctgggatacatgtgcagaacgtgcaggttttttacataggaatacatgtgccatggtggtttgctgcacctatcaaccgatcatctaggttttaagccccacatgcattaggtatttgtcctaatgctctccctccccttgcttctcatcccccgacacggtgtgtgatgttccctaccctgtgtccatgtgttctcattgttcatctctcacttgtgaatgagaacacacagtgtttggttttctgttcctgtgttagtttgctgagaatgatggcttccagcttcatccgtgtacctgaaaggacatgaactcattctttttttatggctgcataatgttccatggtgtatatgtgctgcattttctttatccactgtgtcattgatgggcattgggttggttccaagtctttgctattgtgaacagtgccacagtaaacatatgtgtgcatttgtctttacagtaggatgatttataaaactttaggtatatacccagtaatgggattgttgggtcaaatggtatttctggttctagatgcttgaggaattgccacactgtcttccacaatggttaaactaacttatactcccaccagcagtgtaaaagtgttcccattttctccacatcctcgccagcatctgttgtttcctgacttttgaataatcaccattctaactggcctgagatggtatctcattgtggttttgatttgcatttctctaatgaccagtgatgatgggttttttttcatgtttgtcggccgcataaatgtcatcttttgagaagtgtctgttcgtatccttcgcccactttttgatgcggttgtttgtttttttcttgtaaatttgtttaagttccttgtagattctggatgttagacctttgtcagatggatagattacaaaaattttctcccattgtgtaggttgcctgttcactctgatgatagtttgttttgctatgcagacgctctttagtttagatcccatttgtcagttgtaagcctgtggttttataaaggtacatatgatatgattataaaacaatgagataaattttactgtgttggtatagaaaccagtatcctttctgacatatgtacattgtatgtggatacatcttcatatataaaatctggtatacatgataacatggaaagttaggatacaaataactttctcatcacatcagaattttcttatagtacagaaatgccaagagtatagtataattatttttatgtttttcatgatagttgcccactaaaataaacatgattattttaaaataactaatctttaatttttcatgaagcctcctaaattttagcatagaaaaaagctgttttttaacataaatattcataactgacatttatgtaacctttttaaacaacctacttaaatgtactcaaaattgagttattttaagcttccaaagtacctgctaattcaactgaccgattttttttaacatttattttatcatttgatcattcagtaaacttaaatgcatgatacaatttttaaccaaagcgatagtaagaattatggcaaatgcatgtttaacaaggaacagaattgttaattttctggatgtaggagttctgagtctaccatggagtacagtgtccacgtaggatatcattattttgtttaaaatataataattgaaagagattgactgattaagacattgggattttcttcttgtatttattgggggaaaattagtttatcacctgaatcaccaataatatcaatagaaagcatgatgctacccacattagataaatctggcctgcagcttgttttggtaaataaagttttattggaacatagccacactcacttacatattgcatatggctgctttcatgctacaaaagttgaggtgaatagttgtgaaaaagccagttacctgcagagtataaaatacttactacttggacctttacagaaaaagtttgctgacctctgacttaaacttatttatctaacactatttctttagtgataaaataaatacatattaaattcaaaaccttccttcaaaatatgtgtacagttttatgtaataatagtactaatcaaaagtaacttactgcataaatggttttcataatagtaatgttaatgaaaacattaataacaattatcattttttttgccatggttttatttttgtttatttttatttttttaaatcaattgccatctcatatgcccatatacatttaaaacatgtcgtggtcactccgtaacttgtgttatctataagagtcttttctcgaacttgactaatatttggacatcatttaaatgaacataattctcatgaaaccctactgctgactactttatttttcttatgtaactttaatttgtacaagccaaaatctaagtaaaaatttttatggttataattatcacacaagcataaatctaaaatataaaatcaaacaaaattataaatccaatttttcaagtttataaaatgtaaaacaacacatgtaattttgattaaacaaaatcagttctcacaacaggaaattaataatgactgtttcagtgtaaattcctttcagtttggtctgttctttccactctgtattaagtttgtgaatcagttcatgaccactcatgtgctgtctgaactgctatgaaatatttgtttgtacattgtgccaacactgcatactaagtcttgcttttaagttctggttggcaccagctcctttaacagttgcaacacaatcacacaagttggtaatctagatgatccagagtatagttactttaaaatcaacttgatttcctttttgttgaattttgaagaaattttcaaacattcacatctgaaattattcctttagatatgttctgcacatgtgcaggcttgtctgccacgtgtcctgccctgtatactgccagcttgcaattcctttctgttctcttgaccgaagaagcaaaagggcatctccaggctaagagcaaaacacatttatgctgtagtccaacagtggcttcacttcttgatgactctcaggaaaatcagaaatctctagaacaacttagtgatgtaatccttcaggtacgtcatttcttggtttttcaaaaactttatttagcgtttaaataaattgactttcagtcatggtcttgttaaaaactgtctcagtcatttaaattaagaaatagtaatgcttattatgactgtttaaatgatacaaaagtttataaagttaaattaactatctcctccttagccccacccgcttatgttgaccagtttcttcagtgaatatgatgtaaagatttgaagtgaaatattactaatctaaatctaacagttgatcaaaacagtgtttcatatcatgaccaaaatggatatatttcagaaatgcagttatggttcaaaatttattgtaattttaaagatatatctacgtctctgaaaatatattctaagtgacatttgatttctagaaatggaccacagatttttggggttggttacatgtataggtaagtggacttgtctggcacatttggaagaaaatgccccctttccaagccctgttgcctgttttatcttataaaattatgtttacagtctaaaatgtgaatcaagaattttgttaatcagaaaacattctaaaatcactaaagtattattttataagtagatgagtaattttttaaaaactgtgtgtttactaagttaaagttgtacattgttttttacaaataggaatatttttagatttttcagtatttagaattattctttttaatcatgtggttttatgatttttgtcttctcactgaaaggcagaaaagtagtagaattgttgattgaagaatttgcttcagcttcccaatcagccagccacgtttggcaaagatagaagattgtctgtgtgctggtttgttataattcctttgttgcttagaagattgttcctgtgctgatttgttatagtccctttgttgcttagaatttggagatttttacccacttctttgcctgtgagagtcatgatcatgcagatatttctggtatgactgcttgtgcattttgggcacaaggcttgatgatgttgagatgcagaaaggattgccagtaagaagaaaatgcttcctggttcacccaggagctgtcctgtggagagtgtcacagggtcctcaggggactttgtctcccttgtgctacaaaatctggttacctttccagcatagataagaagcctgttaaggcatcccccattttctcatccatctccagcagcgccttcagaagcctggatagagctctaggggagaagcgttcctcaaagcatttctctaaaagcctcttattcttgggaggccatagctttcctgtacctactacctcactgtcagttcactcaaattttcttagttgaaaacaaaaactggacgttgtcccagttttctcattccccatcagaacaacagactttatttcccaatgattaactgagtctccagttttgcactttaaagaatgttgtaaggaggaaaattcaaaccttttcaaaagtctcccaaccacaacccctatgtaatttaattataaatttcccaactttggctttggttggagcacggtactgcttggggaaaggcttttgctcttgctgacacacttggctcgtcagagaatttcagtgacttcactcagaggactgagtgcagtgagggcagtgtgctgggccctgccctccctgctgaggccaaaatggcaataggtgtgggagcctggctctgcatggatgactgtgggtgtcctgcaaccaatcctcctggacctgggaaatttaaagacttccagccaggcaaagccagggctattttatttcccaactctttaatgttgtttgtggtgctgtgtttgaagggtctctgatgagactcatgatgcatatggatccatgtagggtaatgaatcagtttataatagtatacgcaggaaaaaaaaaatctgtgctagaggaatttgtgaaatttaccttgcccttatttttacctaatactttgtaatattattcattataaaagcttttgtttataatttttttgttacctttttggacaaagaaaatgagatagcctacagtcacagaatatctcaatgattttcctaatgactagctaattttcctctttatttctctaaattacaaatcacgtattttgtgagggtatggatacattaaccaattatttaaaccatgtttcctaataaatcatactctttgtgttcgtgtaagcagtagaatttggatacatgacatctgttagaaaggcacaggcaagtttaagacaaagaaagtgaagagaggaagtatactcctggcacactcatgacaaaatgtgtacctaatgtaagttgggacagttaatgggcctattaaattacaaacactgttttctttgccttatagaaataggatatgtgaattaaaatattattagaatacattcaacagcaacacgttttgataagtaataaatgtagcttactatatgtccatggaggctgtggtttgggccaggtgctgtatgaagcaaagtaaattacagtctttaaattatctgaagaaattatattctaaaattgatgtctttcaaaggtctaagttttctgtaaaatcatactcaaaaaacatttgatatgggaccttaggcaaatcacttaacttcttgggattcagttcttcaagtgcaaaatgataggcttttattacattattactaagtttcagctgcctctaaaatctccatcctcctaacaaatcactgtattggaacttcagttaaatgtctggtcagagttatcttttaaatggtgctttatagcagtatcccataggggatacatgttgaaagtattcatacttacatcttaagtcatgtgtaagtgtttttttctaagtccattttgaggtggtttcagactttgagcattttctaagaaatattcagctgtcttttgtccataaaatactgaacacatttgacttagcagagattttaccttccctagtttatgaagatacagtagtctcctcttatctgtagttttgccttttatagcttcagttactcatggttgactgtagtccagaaatattaaatggaaaattccagaaatacacaatacttaacgtcttaaattgcatgccattctgagtagtatgatgaaatatgctctgtctcccctcaggacgtgaatcatgctatgtctagcttacccatgctgcatatgatacgtgcccattcatcacttagtatagcaatcttggttatcagactgatgaatcacaagacgaagaaggatgagtgcattgtagtaagatattttagagagagagacagagaggccacaatcacataatttttattatactattctgttattattattgttagtctcctacctgcctaatttataattaaactttattgtagttacatatttataggaataaaacttagaatatatggagttgggtactattcatggttttaggtatccactgggggtgttggaatggatccctcaaggataaaggggcctactgtgctcaatatgttttatttgcaaatacatatagataacaagatcaataaaaatctctctatatgtagtagattttgtctataattgatatattaatcagttgagataatgaattaattttgctccttatatttgatctgatatctaaaagtagtaatgcaaatgaggaactcttgtgccttattttagatgtattttgtgctcacatttagtgaatggtaaaattcaagggtaaatctgttgaaaggaaggcttatatatttaagatcccattgtgttgatgaatgttcactgtaattaaaaagcctattttttacattaagtaccttttggaaagaaagcaagaaagtcttgacctagaataccctacatcacttaaatgtacagaagggattaatctagaaagagcatgacatttaaatgaattttggttgatgaaaagacattatgtcttgctctgtatatcgtcttgatttctttttctctttttgtgtatttgctagttatctgttgcttgagtttattctcagccttgctgcctccaggctcctcacacttccagtcgtgtccacttgctctttgcagtgatgctcagactgcttttcagtctgcagtaagtactgtatggaaactgatagaaagtcagttcttcactccagcctttccttcagtatatgttggaaagtatatgaatttaccatagattaattctgtttgtttcctttttgtctgtttggttttggtttggggctttgatttcagttttaccatgtacacattttagagaaccaaacagttgtatctgtaagtttttactaaaagtaggagatttctgccttcattcctcatattctcagaggtgaccacttatacctcatttagctactttttatagcttctctttcatgtctctaaataacatgcttatatttttttgtcttgattattcagttttaaatattatctgttgaattcctactatggaaaatgagactttagcttttttttcatgcctcacccacctaccctgccaaaatgggttcccttctcattctcctaatattgatataccataatgccaattagagaataggcagcgtgaatggtattaaatttatgacagtgttatacacagttgaaccgtgttgcagagtgtttaactttcttttcttgcacagcttttgtttgccttagaggtaattattgtattattttaaaacgtgctgactttcctgttatcacttacaagctccatgctctttgccagaattaaacatcctctcagtgtgttcagaattgtcagaacttcatcgcttcatcttttggaagaaatctcttcccaattccttctaacctacttggtgcctgttttcatcctgggatatccattcaccagtttctgggaattcctttacctctgtgctaggtgcagtttcctgtcatcctgggatatccattcacctggttccaggaattcctttacctctgtgctatgtgcagtctcctgcatcctgcatgctgtctcccatctcctgtggccttctctcctggttaatgctcttcatttttgcgtagcgtctcttctcccttagctttcagagaaaaggtactgaggaggtcttttgagatctaaatgactgaaagtcttttatcgcccttacatataatttatagttaggctagtgagaattctggattggaaatcatttacttcagaatttagaagccatagtctgttctttttaattccaaatgttactatagagaattctgaagccttggctgggcgcggtgctcatgcctgtaatcccagcacgttgggaggctgaggcgggcggatcacgaggtcaggagatcgacaccatcctggctaacacagtgaaaccccatctctactaaaaacacaaaaaaattagccagacatggcggcgggcacctgtagtcccagctactcgggaggctgaggcaggagaatggtgtgaacccgggacggggagcttgcagtgagcagagatcacgccactgcactctatcctgggcgacagagcgagactccgtctcaaaaaaaaaaaaaaaaaaaaaaaaaaagaaaattccaaagcccttagaattcctggtttttctcttcctggaagtttttagaatctttattttttctcgtattctaaaatgtttagatgaagcatccaggtgtggatctgttttagccattgtactgggctctcttggggattctttccatctataaactcatgctttctaaattacttcagagacattccctgtactttgtatgctctgtacatttggaactcctgtgaagtttttttttttcgctatgtaatctctctttgctgtcttttcctctatttattttagtctctcttttctatttggcagcttttcttggtgtctggtaatcttgattatgtgctgtatttaagactgggaaactcaaagcagattgacatccctgagcatatgagtgcaacttgtcaattgctgtccaaggggaccaatgggggttattttgtaggcttgtcttctggggcttatcagattccctggagaatggtcttctgatctctttcctggaggtgaaaacccaactgccaaatgttatgtagccaagtaggagacgacagctgaggtctcagaatttagtttgcacaatttcacttaatccttcaaaggttttagtagaatacccttgcccacaaattttcctgtctctgccagttcagaatcctaatttatcctctccagagactaagcatccgggattttgcaagggctgggaggaagagtggcttagttacatagaaactggtggctggcgggcaggatctgggcatgtaactgcattttagagacttgaagcaatccttcatcctcacgtccagggatgcctggtgctaaatttcttcagccttgggcacttcagtggatagattggggtagttttcagctttccccactcaccacttagaattcaagtttcccaagcctaatacacttgcctctcatccatctgctttctcgttttcaggcttgtgtgtgtgtgtgtgtgtgtgcaatcccatttttgtcattttaatgggatttcaggagggaataaaagacatatctgtgcacacaactatttccttaggagtcttaactccgacccaaccctgctcccaattgctagtgagcaattttttatttttattttattttttatttttatttatttatttatttttgagacagagtctcactctgtcacccaggctggagtgcagcgtggcccgatctcagctcactgcaacctctgcctcccaagttcaagtgattctcctgcctcaagcctcccaagaagctgggattacaggcgcttgccaccgtgcccagctaatttttatatttttcgcatgtttgttggccaaactggtctcgaactcctgacctcaggtgttccgtccaccttggcctcccgaagggctgggattacaaggcgtgagccaccacacctggccccattatcatttgtttcaagaaatttttcaattttcttcttaattttttcattaacccactggacattcaggagcatattgtttaattttcatatgtttgtatagtttccaaaattcctcttgttattgatttccagttttattctactctggtcatagaagatgcttgatattatttcaatttcttgaatgttttaagacttgttttgtgaacctaacatatggaatatcctacagaatgatccatatgctgaggagaagaatgtgtattctgcagccattagatgaaatgttcggtaaatatctattaggtccgtttggtctttagtgcagattaaatccagtgtttctttggtgattttctttctggaagatctgtctgttcaatgctgaaagtagggtgttgaagtctccagccattatcgtcttgagatctcgctctctctttagttctaatatttgctttatgtatctcagtgctccagtgatgggtacatatatactcacaatcattgtatcctcttgctgcattgactgcattatcattatataatgatcttctttgtctgtccttacagtttttgttttgacatctattttgtctaagtatagctactcccaattttttttttgttttcattggcatggaatgtctttttccatccctttattttcagtctgtatatatttttattggtgaaatatgtttcttgtaggcaacagataagtgggcattgttttttcatcccttcagccactgtgtgtgtttttattgtagagtttagtccatagtccatttacattgaatgttgttattgacaagtagggactgccttctgccgttttgttatttgttttctaattgttttgtgatctcattctttaattccttctgtctttcttttagtgaagatgattttctttggtggtatgttaatttcttcttagtttttgtgtctccatttgtatcctttttggtaaaaggttaccatgatgaggcttgcaaataccttcttatagcccattattttaaactaatgacagcttagtactgatggcatgaacaagcacacatgcaaaagaaaactaataaaaactctacactttaactttatctcccctgctttttaacttttagttgtttctctttatgtcttattgtactgtctttgtcttaaaaagttgctgtagttattattttcgattggttcataatttagactctctacttaagataagagtagtttacacaacaccattacagtgttacaatagtctctgtttttctgcgtgcttactattaccagtgagttttgtaacatcagatgatttcttcttgctcacgaacatccttttatttcagattgaagaactcactttactatttcttgtaggacaggtctagtgttgttgaaatccttcagcttttgtttgtctaaggtttttatttctcttcatacttgaaggatagtttcatcgtatgtactattctagggtaaagtttttttgttgtttttctttttttttttccctgcagcacttgaaatatgtcatgccactctctcgtgacctgtaacatttccagatatattggaggtccattgtatgttgtttcttttctcttgctgcttttaggatcttttctttatccttgacctttaggagtttgattatgaaatatcttaaatgtcttctttgggttaaatctgcttggtggtctctaaccttcttgtacttgaatattgatctttctctaagttttgtaagttctctgatattatccctttgaataaactttctaccactatctctttgtcttaaatttgccctttcgaggctattttttaggttttataggcatgcttcattcttctttattctcatttttcttttatctccttcccctgactctgtgttttcaaatagcttgccttcaagtttactaattctttcttttacttggtcagctctactaatatgagactgatgtatttgtcagtatgccaattgaatttttaaactccagaatttctgtttcattcttcttaattatttaaatctctctgttaaatttatctgataaaattctgaattccttctcttattttgaatttcttttgagctcccctaccacagcaattttgaattctctgtttgaaagttcacatatctcttgtttctccacgcttggtctctgatgccttattttagttcatttggtggggtcattttttcctggatgatcttgatgcttttagatgttcgtcaatatctggacattgaagagttaggtatttgttttagtctttgcagtctgggcttgtttgtgtgtgtcctccttgaggaggcttcccaggcattccaagggaattggaccttaagcccaataacacttcgtttcttgcagacttgtagaggtactgccttggtggtcttggataagatctggaagaattctccagattaccaggcaaagactcttgttcttttaccttactttctcccaaacaaacagagtctctctctatatactgagcagcctggaactggggatgtggtgatattagcatccctgtggctaccaccactggaactgcactggattagtcctgatgtcaacacaacactgggtttctctcaagcccactgcagtcgctacctgcttacctgtgttcactcaaggccctaggacttcataatcagtaggtgacaaagccagccaggtttctgtccttcccttcagagcagtaagttcccccagaccctgagcaggtccagagatgctatctgtgagccagggattagagtcaaaaaccttagaattttacctgatgttctattctaatgtgactaacctggcactcaaaccacaatactgggtcctttctgctcttctctcccctttccacaggaaaaggagactctccttttggccaccaataccacggtcccatgggagttctaccacgctgctgccaatgttcacttagagcccaagggcacttctgtcattctgtgacgaatgttgccagacctggggctcacccttcaggacaatcagttcccctctggcccagagatggtccagaaatactgtccaagaggctcggcctggattcagggagcccaagagcctacttgttgctctacccactgtggctgagctgatacctaagatgcaagacaaagtcccctttactttcccctctgcttttctcaaacaaaaggagtcttttgttgtagccaccacagctgcgaatgtgctgggtcatacctaaagtcagcacgtcccagagcccaaggcctgtggtgtactatctggatattgctgctggttattcagggcctgagggctctttagtcagcaagtaatgaatcctgccaggactggtttcttcccttcaaggcagtgggttcccttggcccacattttgtctattttgtcatccaggaatgggcctggaatggaggtctcacaactctgcccagtgccctgttctattgtgactgagctggtatctaagatgcaagacaaagtcttgtttactctcttcctcaagtagaaggaaggagtcacttttgttgctgcgagccgcactgcctgggattgagggagaaatggtgtaaggcctcccttagctgccctggctgttgtctccctgtgtcacatgccaccatagtccagtggctctaagcccagcctaatactaggagttgcctaggaattgcaggccttgtgtccaagactgcctttcaagtttacctaggaccccagagcactggctttacggtggcaaggcttgccaagaaactccacttctgactgctggtttgggcagttgatctaaatgatctctccatgcatgggtgttggctgagcccagcacagctttgctctccactgtgacagagcagcactgaattcagtgtgaagtcccccagtcgctgctctctccctcctccaagtgtgcaagttagctcgccataccaggcagctgctgctgatagataggggaggggtggtgattcaagactatatctccgacacttttcagttcctcttttagccgtacacattaaaaccaggtactgtgattgctcacctgatttttggttctcgtgacggtgcttttctgtgtgcatatagttgttaaaatttggtgttcctgttgggggaggacagacagtataggcttctattctgccaccttgctgcactcacccagccgattcttttttaactgttaggttcggggtacatgtgtaggtttgttatataggtaaacttgtatcatgggggtttggtgtatagattatttcatcacccaggtactaagcctggtacccaatagttattttttctgatcctctccctcctgctacccttcacccactggtaggccccattgtctattgttcccctctttgtgtcccggtgctctcatcatttagctcctacttataagtgagaacaagcagtatttggttttctgttcctgcattgtttcctaaggatcatggcctcgagctccaaccatgttcatgcagaggacatgatctcactcttttttatggctgcatagtattccatggtgtatatgtgccacattttctttatccagttttccattgatgggcatttaagttgattccatgtctttaccattgcagatagtgctgcagtgaacatttgtattcatgtgtctttatgatagaatgatttatattcctttgggtgtataccctgtaatgagattatagggttgaattgcagtcctttttttagcttgttgaggaatcaccacactgccttcccaatggttgaactaatttgcactcccactgtgtataagcattcccttttctccacaacctcatcagcgtgtgttattttttgacttcttagtagccattctgactggtgtgagatggtatcttactgtggctttgatttgcatttctctaatgatcagtgatgttgagctttttttcatgtgcttgttggcaatgtgtatgtcttcttttgagaagtgtctgtttgtgtcctttgcccacttcttaatggggttgtttttttcttgtaaatttaagttccttgtagttgctggatattagacctttgtctgatgcatagtttgcagatattttctcccattctgtaggttgtctgtttactctgttgatagtttcttttgctgtgcagacacgctttagtttaattagatttcatttgtcaatttttgcttttgttgcagttgcttttcacattttcatcatgaaatctctgccactttctgtgtccagaatggtattgcctaggttgtcttccagcgttttaatagttttggggtttatatttaagtctttaatccatcttcagtttatttctgtatatatgtaaggaaggggtccagtttcaatgtatgtatataattagtcagttatcccagcaccatttatcgaacagggagttctttccccattgtttgtttttgtcaggtttgtctaaggtcagatggttctaggtgtacacccttatttctaggctctgtattctgttccatcggtctatgtgtttattttttataccattaccatgctttggttactgtagccctgtagtatagtttgaagtcaagtagcttgatgcctccagcttttttctttttgcttagaattgccttggcgatttgggctcttttttggttccatatgaattttaaaagttttttctagttctatgaagaatgtgattggtggttcgatagggatagtattgaatctacaaattgctttgggcagtatggccattttagcaatgttgattcttcctagccatgttcatggaatgtttttccattcattcgtgtcaccactgatttctttcagcagtgttttgtatttctccttgtagagatctttcacctccctggttagctgtattcctaggtattgcattttgttttattttattttgttttgttttggtggcagttgtgaatgggattgcattcctgatttgcctctcggcttgattgttggtatataggaatgttagtgacttttgcacattgattttgtatcctgagactttgctaaaattgtttatcagcttaaggagcttttgggctgagacgatggggttttctagatataggatcatgtcatctgcaaacagggataatttgacttcctctcttcctatttggatgccctttatttccttctcttgcctgattgccctggccagaacttccagtaccgtgttgaataggaatggtgaaagagggcatccttgtcttgtgccagttttcaaggggattgcttctagcttttgcccattcagtatgatgtagacagcaggtttgtcatagatggctctcgttattttaatatatgttacttcaatacctaatttgttaggagtttttaatatgaaaagatgttgaattttactgaaagcctctgttgagataatcgtgttatttttgtttctagttctgtttatgtgatgaatcatgtttatttgtttgcacgtatgttgaaccaaccttgcatcctagggataaagccttcttgttcgtagtggattagctttttgatgtgctgctggattcagtttgctagtatgttgttgagggtttttgcattgctgttcatcaaggatattgacccttttttttgttgttgtgtctctgccagttttgggtcaggatgatgctagcctcatagaatgaattgaggaggagttcctacttctcatttttttggggaacagtgtctgtaagaatggtatcagctcttctttatagatctggtagaatttggctgtcaatccatctgatccatggcttttatggtgtgcaggctatttatttctgattccattttagagctcattgttggtctgttcagggattcagtttcttcctggttcagtcttgggaggatatatgtggccaggaattcatccacttctagatttttagtttgtgtgcatagaagtgtttataatcgtctctgatgtttatttctctggggtcagtggtaatatcccctttgtcatttctcattatgtttatttggatcttttctcgtttcttcattaatctagcctagtggtccatatattttattatttttttcaaaaaactggctcctcacttcattggtcttttgaatggtttttcatgtctcagtctcctttagctctgattctgattatttcttgtgttctactagctttggggttggtttgctctttcttctctagttcttttagttgtgatgttaggtgcaaacttgagatcttcctaacttttcaatatgggcatttagcgctcaaaattttcctgttaacactgccttagctgtgtcccagagattctggtatgttatcattgttctcattagtttcaaagaacttactgatttctgccttaatttcattatttgcccaaaagttattcaggagcaggatgcttaatttcaatgtaaatgaatggttttgtgcaattttctttgtattgaattctgtttttattgtgctgtggtctgagagtgtggatggtatatgtattagaccattcttacattgctgtaaagaaatacctgacacggagtaatttataaagaaaagaggtttaattggctcatggttccacaggctgtaaggaagcatagtgctggcatctactcagcttctgggaaggcctcaggaaactttcaattatggcagaagggggagcgaggcatctcacatggtgggagcaggaggaagagagaggggcaagatgccacacacttttaaacaaccagatctcacgagaactctgttacaggaacagaaccaaagggacggtgctaaaccattcatgaaggatctaccccaatgatccagttcccaacattggggactacagttgaacatgagatttgggtggggacacagatccaaaccatatcagtacaattttgatttttttgaatttgcggaaatttgttttgtgtctgattgtgtggttgattttagagtatgtgccatgtggcaatgagaagaatgtatactctgttgtattctggtggggagttctgtagatgtctatcagatccatttggtccagtgttgagttcaggtcttgaatatctttgttaattttttgcctggattatctgtctaatactgtcaatggggtgttgaagtctcccacgttaccctatgggagtctaaatctctttgaagatctcttaagaacttgctttatgaatctggatgtttctgtgtttagtgcatatatatttaggatagctaggttgccttgttgaattgagtcctttactatttgtaatgcccttctttgtcttttttatctttgttggtttaaagtctattttgtctgaaattagaattgcaatccctgcttttttctgtttttcattgcttggtagcctttttccatccctttattttgagcctatgtgtgtcattgcatgagatgggtgagtgcctgcaggcaaggcggcatgaaggaggctgcagtgggggaagaatgctggtgcgtgtccactggggtcactctgctagagcactctgctagtcaggcagtctgccagtgcaggagctaccgtatgggcccgtacctgggagcttcactccaagcaggtgtggctaggctcgggctctgggagaagccagcagaccaaagggtggaccagattggccccatctcatgggcaagaccaccctgcagagttgaggtcccacagttcccctagggataaagtctcctatgggagcaagtctagcctaaggggatgggcatccttggccatgctccgctatagacactcccataccaaactctctgggctctgccccagctggagttctgcttccactgcttccctaagcagctttccctgacaactcaaatgtccatggtggtccaggggttccttcctaccaggattccagcggcctgtggggagagcgaattttgttccttgccttttcaacttccccctctgcaggagttgttgggggccaggaacaagttgtggtgcttggtagccccgagcagggtccccagcttcctcccccttcagccccagctctgtgttttccctccatctgctctcgatgccctccctctgaagatctgctaggagtgtgccagtcttcctggtgtcccagtccctcagtgggagatgttcctcctggctgtatctagttggccatcttggagcagaaatttctagttttgatttttaataaaaatgtatggaatctgttattgtgtctgcttttgtacatattagaaatttttaagtgaaaatttttctagctcataaatttaaatgtataaaggaaatatacagaaatagtagtttcggaattacaaatgattttccatttctctgaaagtcaaaaaagttacacactattttttgagaaaatgttatatgacaggtgcatgttaccatagaaacgaaagatggaaagaaccaaatcacctgagatataggggtagtttagatagaaatggagagaggggaatgtgtccccagaaggagaaaggaggaaattgatgacagttctcctgttcagcagttttacaaggacccattttaataaggtacacacatatatatacaatatgcgctggtgaatttgagtaagtatatgagcttgctacgtgaaagctaaataaagcttttttctgtagatgatgagtctttaagaatgattgttgttcttttccatattataagcaacttatacagtcttatccacgcagaacattctcaaatattaatgatttatcaaaatccagtgaatttcacatgatagttgaaacctagcaatatcttttaagtagaaaatgttctttattcacaacagttttgctccagattaaatatttcttcaaggcagtttgatttatattctctgcagtgctatgaagggaaatcctccaaagatatcctgaaaagagtagctgcaaatgcattgatgtcactgctggctgtcagtagaagagcacagaaacatgctttgaaaggtgagccacatgacacatcagctgttttgatggcattatcaattcatatgttttgttgcttgttcaagttaattttctttggactcaaaatgtaaaaaacgtatagtataatctcagtgtcactaaaaataattttttttcccatacagaagcagtaaatatgcattacttttcaaataaaaagattagacatagtttgtttttgtttgtttaatatgtgatggttcttgctctaaagaacctatatgtaaatattagggaagctaaaaggtaacacattgagtttcattataattaaatattactatccagaagcactcactgcatacctgaacaaaacccacatagttttgatggtaaaaacagcaacagatgattccatattttcgtataaatttccctcttgagtgttgtaatttctcatttgggaatcggagaatgtagatctgagaattaaaagagaataatggcaacatcaagtccattaatatcaattgtgatttgcgactacaacaaatgatgtattcctcaagttgtaaattggatttgggtagtatcttactaaaaactgaaaacaagtggacttcagcattttagttctcttacttatcccccctctgattcattaatctctgactgaaaattctaaaatgaagtgggtcagaaatagaaaatgttacctttttgagaatctgattggtatatgtggttataacttacttggaaatagaatatccttttgactactgcagattttgtctttcagccaatcttatagacaattgcatggagcagatgaaacacataaatgcacaactgaacctagattctctgaggcctgggaaagcagcattgaaaaaaaaggtaacattctgggataaatgaatggctatatatagagaccattctccagtcctcttgtgcctagaaatgagcacgagcttgaaatgagtgtctcatttagaagaaaggtacagatggataaattaatgagacttctacattagcagattgttggctttttttggtcttaattcttacttgaagatctttagacaacatctgtctattatgtactgttgttattataaacattggaaatatccacatatacatgatactatgccagataaattttttatactacaaaaagaaaatctttatctcaaaacaagcataggttaactaggaatgagatctgtaacaactataatttattaagagttttctatatgtcagccactattgaaacatttcatatttattatctcatgaacaaacactcattacagcatagtcacacaactggtaattgatggagctaatatttgccccaaatctgggtggttgcagagctggtattcctcatctctgtttatctcctcctgtgccttctgaatatctcctctagcattgaatctgctggactcatgtttaaactgcatgctcaggtaaactgaaaataacatagttatataataactactgtggttaacaagatctgccacccacttattcaacaaatgaaagtgtgtgaatagtataaatatataaatatacatatatgtgtgtaggtaaggccgttatagcagcactctatgtaataactagtttctactgcatttaagaaaccaagacaaagtcttatttaataatgtaattgatgcaggagattgattgtatgtttatcagttctttttttttttttttttgcctcttttcctccctagccaaaggcccttcatcattgagaaagtcagccaacacctgatattattgaaaatctctcagtatctgcctcactttattgagatgaaacatggaggctatcatatatccgagttcctccatgcttgatagaacagaaatagctttttcatggtgaatgtgcttcttgagatatggtcatctttcagagatcgttagcctgtcagttccctcaaagttacagtggttgggcatgattagagcacacctgcattgtcccgtgacccaaaggggagggaattactatacacaaaaagtgaagtatgctgttgcattcacagttttcaactgctttttgtttaaataggaggatggtgttattaaagagttaagcattgccatgcagctcctaagaaactgtctttatcaaaatgaggaatgtaaagtaagtagaactacttttcaaaattttaataggagtactggtattaagcagtttaatttttatgtgagataatgtagtaggaaaaatggaaagctctgacttttaaatttttagacacacagttgattggtccttaaactcagtgttaattgtcagaaatgtgtgtatctaatcattattcatcgacactgattacatttcttcgcaaacttcagcctcattctgtactcttaggtattttaaatgttttacatatggaatgaatggctggatgtgttttataaggtagattctttcaaaacgggttgtcaaaacaactcttcaaggaaataagtgaagctatctgtatctataaggaaagaaaatgaagagtttcctgcttcaaaggagaagatagttagagctgctacctagtgtggccacatccaccgagaggaagtttcttctagctctgctgactccctgtgaccatttacatggcccttctgtctaaaaatcactgagatgttttgcttcgtctgtaagcactgatgatgttttaaaccattgtatcagtactactatagaggatataatcttgtgaacactctgatttgctttgtctatagttttacaacacttttgaaatactagattgatgctttaatgcagaaatactagattattctttataaaagctggccacgaaaataaaaattttaaaaaatactaaattaaagctttaatatagaaagcaaagataaattatggaagcttttattgccttataaatttttacctgttttgctcttacttgtggtaagagcacaactggaaaaaccataccacatctggaaaatggacatgttgaacacacttactccttaagcgatgttaaaaagccagatacatgactcacaatttatatttcaaagtagtttgatggaaattaagtatttatttatacaatttattaaaattccctatatatgaatttatatgaactttttctcaagacaaaagtgccattaataaacttaatgattccttcatgcttatgatattatgcttgtgactggatgtacagtcagtatttgtgtgtaaatttaaatatataaatttcatgtgtatgtgcagttaatattcattcatgacaccttattcagggaaatactctggaatactttacatgtgggatctacctataaagatttatgaagtgctaacctggctactagttataaatattgtgctcaatttgtatcacattagccatttacaaaagtgtgatatctcaataagtcaaagcatttctgtatttctaagttgtttaataagaagtaaatccaaagaatattaagattatccttgagtataaatataatattatggaggtagggattgttaatttcaatttcagcttttatcaggtgtatggcatgttctcattattaatagttggccactattgggtaattcaccaggtcacccactgccaccccaccctgctgtttgcatatgcataacattaggggttttcatactggaaggagcatggtggctgtgaggtaaatgaattaaacagtggacaaggttagacggaggggactgtcatagtccagacaagagatgatgacaccttaacttgagcaggtagaaaggagaaggagggtagggagtaaatttgaggcattgagaagaggaggaatgtagaatgacttccaaactccagtttaagccactgcattatcatgcattaagagtgcatgatagagcagagcacaggtgtgagagacccgatattcatgcttgcacgtgctagcctcaagagtctttggggcatccaggtgaaaaatggcttgtggcctgtagattttatgggtctgggactctaaggagtgatacaagctggggatattaggagttatcaatgtgtagatggtgtttgtggtcctcactattgttgaaatttcccaagaaagtatgtaatgaaaaccaaggtcatatctttggaaaacaggaacatttaagagggggcagaaaacaactgagaagggaatactggagaaggaatttggagattgcattaggccgttcttgccttgctatgaagaaatatctgagactaggtaatttattaaagaaaagaggtttaattggctcacagttctgcagggtatagaggaagcacagtggcgtctgcttctggggaggcctcaggaaacttccaatcatgacaagaaggcaaaaggggaacaggcacatcacattactagaactggagcaagagtgagagagctggcgaggaggtaccacacacttttaaatgaccagatctcatgagatcactcactgtcttgaggaaagcaccaagccatgaggaatccgcccccaagatataaacacctcccaccaggcctcacctctagcactggggattacaattcaacatgagatttgggcagggacaaatatccagactcttatcagaaatgatccaggatagagcagcagcggggaaattaagagacatatagcaaatgccaccgtgcttaagcgttgttggcaaccacaaaagtagaagcggcctcaatagaatcatcagggcagaaaataaacggtaatgagctaaagattaaatgtgaggcagggaaattacagcaataataatgtagaagtttggtcatgaatagtggcattaataatttaggacatataagatgaaaggaaatgagtatgtttgtttctcttaacacgtaaactacttgaatacaggcacagaaatgagcaaattggggacgagttgtttaagagatagcaagaggagaactaactggtggattaagatccctgaggaggcaggaagagctgtgtttcagaacacagatggatgtatcaatctctggcaggcaagaagtggaacacctctttgtcactaccgggcagacaggaaggatgaatggatgaaaatacagataaactatgtggacagaatggcagagtagataaaggagtttgtacttaatcgtttctgtcttctctgtgaaatagtaaacaaggtcatctgctgcagatggagggccgtgtgccacagagagtggtgaacaagggaagaactttagggagagcactgggaatgacttcagtgcttacggagagtgttgaacattgggaatcacttctcttctgccacttgatgctatgtgaaatcgtatagggtgtgtgtatttatgtgcatgctcacgtgcataatcatgggtctacaaattacctcggaattcttgttcatttaaaatagatattgctgcacttaaacagctatattttatctgcaatattgtcccagggtaactgatctttgtaataaagactctgagttacttcagaatttttcaatttatcataatatttagactgaattttatatattcaaattactcaaaaactgtaatttactttgagtatatacacacatacacagagagagagaaggagagggagagagggtgggcaaagaggactcagagttgatcagaatgtttacttaaccagaaattctcacttcttggccagttcatagcatttacaggaatttattcagtgttgtgagatatcactttgctgtttaatttacatgttacacaggctattttctatgcttcctaacttagtggtacatcttaaccaccctggtgttgaagcgacgtcctgagattggtcaggctcgtggtcagggcagccatgtgtggagcccaatggggctggggcaggatgctgaagccatccacagggttctccttgggtcttatgttgatggctttctgttgttgttttgattttaatgttatattttcatatattcagactaatgctgtctttttcccttccttcaacaggaagcagctcttgaagctcaccttgtccctgtcttgcactctctctggccttggattttgatggatgattcattgatgcaaatttctctgcagctcctttgtgtctatactgcaaattttccaaatggtaataggatccaatactgcctttcaataatataccaaaatactagttttataaatgttgttaaggtggactggaaaaactaatacatattttgaagtatttctctgatttattgaggatatgatgggcaaaggcaagctttctcgtaggtattatgagagcagacagatattttagtgtgtttgttgacatgagagagtcattggcagcgcagggaatagagagggaggactggtctgattatctggcaatgggaaattgagtttagtaggaaaattgagaggataaaaattatgatgtaagacctcaaaagccacgtgaaggttagaacttctcatagattctagagcaggagactggcatgttgaaagttctcataacagttggtctggtgatacttgatatcactagggctcctctttcgctcatgcacttgatagacactttatcaagagcctgtggtgggccatgcattgtgagttctggtgagagtgatctgaaatgagataggaggacaggtcatgtagggcctcagaggccagagtagggagtttggatttttatgtgagtgtaacaggatgacattggcagttgtaagctggtgagtggcatgatttaatttgtgtttaagaaggattaggctgggtgcagtggctcatgcctgtaatgccagcactttgggagacccaggcaggcggatcacttgaagtctggagtttgagactagcctggcaaacatgaggaaaccctgtctctactaaaaacacaaaaattagccaggcatgatggtgcatgcctgtagttccagctactcaggaggctgaagcaggagaatcacttgaacccaggaagcggaggttacagtgagccgagatcacgccactatactccagcctgggcaacagagtgagactctgtctcacaaagaaaagaaaagaaaaattgccctgggtggtatgtggagaatgaatgattgggagcaagtctagaagcagggagacttgtcatggagatataatggtggcttgggcttgagtggtagctggagagattgagagaagtagacagattcagtatatagctcaaaggtagagtcaaggatacctgttgtgggaggtaggaaggaaaaaaaggtgtccggggtgaacttcatttggagaaatgagcctgagtgcacagtagtgccatttactaaaatggggaagatttaaaagaagcagacttgaagtgagaaagtagtaggaatcaagagttctgtttggtcttgttaagtctaaggtgttgatgttcactcaagtgaaaatagtaagctggagttgaattcaatggagtgtagagataagtttgaagatttcaaatgttgggaatattattagttatttattgctacaaaagaaattactctaaaatttagcatctgcaaacattaatcatttcattatgccacggcttctgtggctcaggaatctgggcgtggctaatctgggtggtcctcgctcagagtctctgcaatcatctgaagtcttgactgggatagaggatccagtgtgactatgggagcctcaattccttgctacttagggctgtctcaaacgacccagaatgagtgggctgagggcagaagttatagtctcttataatccagtctcagaagtaactgaacagcactcctagctcttgtgggtcacacataccaaccctggtacagaggcaggcgccactgggaccatcttggaggctggctaccacaggagtcattgtcatgtagattgtacttaaagccacgtggctgtttgcgattacccagggagaatgtgtagatggagaagcagaaacccatgaccaagttctgaggcacatcaacatttggagttaatcaaaagatgagaaaccagcagaaaaaaaagagaaggagcagccaatgagataacagtgcacagtcacagaaagtcagagaagggcatgctcagttgtgtggaatgctattgaaaattctgctaaagtgaggatagaaaaaatggctgttggacttagcagtattgatgttcttttggaccttgagggtaattttagtgcagtgccagaacagaaacctacttagtgtgagctgaggagagaagatgaagaagtagaggagacagcttttccaaaatgtactactcttaagaggacaaagaaatggagcaacagcaagagacagatgtggagtcaaaggaggagtttttgctcgtttttaaagatgtatgtttttaaggcatgtttattaacttaagggattgggagaatgaggtgcaggaaagagtgcaggtaagagcccagcctgagagggtaagagaggtgagagctagagcacagctgacaacagaagcggagggaaggctgagaggaaggatgtggatttaggagggctggtagacttgatgggaatgatgagaaaattcccattttgaatacttctgctttcttcatttaggagagaacactgaccactaagaatgagcaaagacaaggagtagaggtgatgtgagaagaggagaaagtgtgaagtagctgtttttagaggaaggaaagtaaacacaccagagaagcaaagtaggattgctggcagtgttaagtaccacttatggtcataaatttaagaaaataaattagaatttatggtcataatttatggtcataaatttaagatttaaattttattaaatttatggtcataaatttaagatttgactagcaagtttttgtactttcttctaacaacactcagtagcccagcaactggggtctctgaatatcaaaggttatacagagaagggactggaactcacaacagttaaggagcccatctagttactgccagatgctgttgatggcttattcctttgaataatctgccagatgctgatgatggcttattcctttgaataatctgacacctctggagctgtccatttcgatacccaactcaggttgtctccagtcagcacaaagagatataaacagaccttcaagctcttgaacttgaactgtcattgaagcatatgtgtacaggattgtccttgccttcattctgtgctgttaactttctccattccttaggtctggtgggaatgtctcctttcagtgcattttccagctccactagtatatcttttgtttgtttactcatcttttatgagtttcttttacagaatgtatttgattctgatcagtttatacttaagttggcctcctcgtatgaactttcacaagtcaattataccttaggtttatgtataatacagtcttattgatttaacattaaaatatatttctaatttttttttctccctcaataagtctcattcagttacttaatttcctgagaaacactgaaccctggaaagcctgtagatgccacttttggctcctgctatgctaagctgtatgaccttgaacaacaaactggcttttctgagctccatatctttgttgaccaaatatagaaaatagtatttgttttgtccgctttcccagggatattatgttccttatttgtatgttatgtaaaatgaaggcattagacaagttatctcccatttctaaaattctgttcctttacacaggcctttatttagatgttttctttagcaactattaaaaaccctagtatgtttattttattctttttttaaaaataaacctggtgtcttaaagtgctttagtgagataattaggccctcagtgaggacagtatatctattaggttgactgtagacaccaacattagcctccattgctaatttgcagttcacaggttaatggcctagtcattttgttagacagatatgctttgccacttagtgtcttcaaaaactaaacagggaaactgagaagacattgtgataggctgttatttttgaaggttgcagttctctttgttggtcaagttgtggacaacaccctgttcaagctacacatagaggagccgtgagcaactctctgatgctgtgtatcctaaagttggcttcccagatgccactggagaacaccacggttcagcagatggtttttatgcttctttcaaacctggccttgtcgcatgactgtaaaggagtaattcagaaggtacgcacttaaactccccacatatcttaaaagggtactcagtgaaataatctttccaatcaaaagtttacaactcaatttctaagattattatgattttgaggcattttattttaaaggattataaaagggttaagaggttcactttgtttaaagccagttgatagatgacacgtgcagaaggacaggagctagagtagagtcataccatttccttctcatttatcttcttagctttcggattgtattttatcattctcaaagatgagggttttagaaagatagccgtcttacatttattggaaataataaaagtaatatattggtctttaaacagaccaaattgggcagtaacaatttcagtttaatttcattgacaaaatggtttatgaaatcacagcccacttcccccagttagacttaacttccttatggcatgttaagcaattttatgagttctctaggattccagttcccaatctagacttctcatcactgattttaacttaaggtaatttaaaagggatgtaatgagttaaataaattctagtacacatgtgcacttatattctgtatttagatgtgtataaacagaatccctaattgggaaaatcccttcaaatttgaatgtaatcagattatatactacttactagtattgtaatttgagtgtttccatttcttttacttgaaggccaagataaattgcagaagttgagagcatttataagaattgagtctccttttcctctactgtttcttctccctgaactcctcagaagatactttgttatcaccacataaatagaaagttcggtctttctaaggaaatggaaagatcaatcttaccaaggaaagatgttttcagtggcacgttggagccagcctcctactgactcatgagtgtcatcttaaatttgcaggaattttataaaaattccagttgatgttacattgttattttgaaatcagccacagtgggcatatcacaccacgtaattcagcgaactgtacaaatcttggatcttttctaccctcaccacaatcagttgtttatttaccagcacatggctggatattttcttcatgtatatgttcatgtatgtcatatatgtatatatatttgaatatattttcttcatatatgtattcatatacatgcatcacttccaaaatgagacattctcttgaactggatatatgtgattagcatccataagaatgagagattctgcatatgtgagagcagagcgggggcagtgctttccaccacttccttatagagcatgttggtgggaagctaagtgggagcacccagaaggaatgtaagtgccaatctcgagtctggtctgtgactttgagctggagacctattctctttcagcttcatttgggtttaacaaaataatctctaagatatgttcaactcttaatctgttattctggtgctatacttaagaatattttgatgaagtgtgatcagactctctttccagggacggattaatcaagtctttttcctctgctctaattaggaaatgcctgagacttcctctgctgcattaagtaataatgagcccagacacttaacacttctacttcttcattactcatctgtaggacatagaaaatgcagcaggtggtattgtacaactcaggctccgaaatatcctgcttgtttgtttttttttctaccatggtatacatctctacatattctacctggtgtaggaaattgtctgaaaacatctttagaagcagcaaaaaaaaaaaaaaaaaaaaaaaaaaggagtgcccacagcacatttatatttgagagcactgacatctgctttatcacccttgtcagtcccaaatccagcaagggttgaatctaaaaactgtcagtttggctgacagtaggtgtgagtgacagcacatgcagctgaaagtgggcatgtaattttacagtttacttattgtgtgggtaatgttgataatatttctgtagctcatttcattcttaacactcagagtccttttgtataaaaacgttaagtttattttatagattaaagccaacatcttgattttggtctaggaaaacctaagagataaactggagtagatttaaacagagagagagaagagttattctgtgcaatcataaaagttaagtgattgcatttcatttctaaaatgtccacctaactgtggtttccatgctgccatgggctgcagcttgatgcagcacttttatactttgcatatagattagtctaagcaataatttattatctttcttatagtgaagggtttggtggggttttttggaaggggctttatttggaggttgaaaagactcttacagttcaaataatagagctttctcatctgtaagcataatagaatgacgtgtagccatcagaaattcttacttgtaatgataagtacctgggataaagtgaatgtaagatgtatctatagatttgataaaaacaacaacaacacctgtagctataatgattcaaaataccctcactacttccagagttgttaactagtattcaagactgatttggatttttgccttttttccttccatagggtagcttttaatagcaaaatcaccagaaggcagagagaagagaaaactcaagagccctgaaataatctccaaacttaattaccaattctaaataattaagagttaactatagtatacttcatccatcatgaggaaataattagcaggaattaaaacttgagcactattttgttcttcttacctttttcacttatgcttggaaataatatagatggaatattcagaagctattagaaaggagaaattaatgtagagggagagtatatcagaatgttagttaattggtcaccaagggactaggaaaataatgaaaaagatgagaagaaaataatattctctctatttatccacagagtaacttcttacagaacttcctctctctagcattgccaaaaggaggaaataaacatctaagtaatctgactattctttggttgaagttactcctgaatatatcatctggagaagatgggcaacaaatgattctgaggcttgatggctgtctagacttactaacagagatgagcaaatacaagcacaagagcagccctttattgcctcttcttatctttcataatgtttgcttcagtcctgcaaataaacccaagatcctggctaatggtaagttttcacacacacatacatttatatatgtagttattcatagactgttcaggtcaacaccaaataattttataaataattttctaggcatttattaagcacccactgtgttcaaagcactgtggaaggcatgggaatgaatcaggcatggcttcagccttccgtgggcttccaggagtctcctgaggttagcaaatcatgtcattccagtgcacatactggacacctggaggaaggggagccgtggacgagggctccctggccttaccttctgctccctctcctctctccttgctcttcctctaactccagctcccctcttctgcatcttcaagcaaatgctactatgtcaatgaagcctctcgggaaccatgtgttaatataatagccccgcacccagggggccttctctttcctcctcctcactatttcctttcctggttttgtttccctccgtagtattatcgccatctgatagattatgtgtttcatgtatctgtctattcctagtcttcccacactagaaggtaagctcttatggggtcaggaggcttttgtctgctttgtttatgtgtagcacctagaattgtgcctgcaactagcgagcactcaataaatatttgatgattgagagagatcccaagcagaccggagagagttcagggcttgagatcagatggtgcagtgagcctcgcagagacttcattctctgagatgtaggacagatggaggcgaggattggtaaggattcagaaaaaaattgaagcaaaaagaatcggaaagatctttttctgcaaccatgtgttatctctgtgaggagtatgtgaatttcgtggggagtgagttttataaaagacatgtgttctagtgaaaaacagaaggtgggctccagacccctacacacctggtcttgaatgccagcactagggcatcactccagcgtcgcctggtgcagcctcgctgggcccagcttcttcatctataaaagaagcccactcttcttggtttggtaagaatcagtttataaacacacataaagtgcctagcgctatttctggtacatgataaatgtttaagatagattcattctcttgtttttttcatgtttttcacttaaacttttctcagaagcatttttctgtgaaatcaagggttttctaagtgtacgaaaatgattcttcttatattttgtggtgtatatagttgtgattctatttttctgataagcattctgataatcaactgctagatatgatatagaaggatgtttaaagttcagttagcttgtagcagacctaaccttactgtggattttgcactctgccttccggtggctgctgtgctgatgctgcgttctctgttgctgcgtgatgtacatcactggttttatttccatcctctcccactgtagctgcttcagccctcacatttgtaaaatgagggtgatgataatccctcctcagggcaatgagagagcctgtgaagtgtttgtgaccattcttggtatatagcagctactcagtaacatctgttattgtttattcacctttcttagaatgattttttttttctttgagggctacttactccagtttattattgagagttggaaaaaggtcaagctttttgagaagtgaaggagagaagtctgcattttccacttctagacccctctagaattatttttagcatttctttgtagtcagcaatgctttttctccttcattagcttaaagcagatggataaactttggtgagaagcttcccctagcccacagactagagatcagtgggcttttcaggcaggggtaagataagagacatcagctgtgcagtttctgtgtggaactataaagggatgtcacagcctatgcctcgctttccacttggggatttatggaggaggccttagcagagtcagccagcttaaaagtctcccaggaaaggctgcctctgatcggtagcacccacacatctggtttaaatggtcaggagtggagtgtgcagtggagcttgaccttgctggtaaaaatagatctggggcttggcatggtggctcacaactgtaatcccagtactttgggagaccgtggtgggtggatcatttgaggtcaagagtttgagatcagtctggccaacatggtgaaaccccgcctctactaaaaatacaaaaattagccaggcatggtggcgggcaccttgtagtccccagtagtagaattgcttgaactggggagacggaggttgcagtgagccaagatcgcgccactgcactccagcctgggcaacagagtgagacttcatctccaaaaaaaaaaaaagatctggaacattccttgtttctggcaatgccagactaagtctcttctgaaaacgacaataacatgctagacaggctgtattaaaatgcacctcaaaataatcacaaaaactgaaaagatagaaactcccagtccagttttgattgaaagtcttgcccagacaagtaagaagtatatagaaaattattttgccccaagtgcatttgccaaggttgtatgcttggcttttgttgaggagtatcgaggggtgagaggacagaagccgcgattccccaaagtggggattcttactggctatcctgcttgtattaagctggacctccaaagaaccattctcttaatagatggatgggtcaaaaataagttggtttcccaaacttcatgaaggagactgtaaagaaaaggaaaaaaaaaatgtgagaatgggtactacagactgcttctgatagggctctgcacccaaagttggccgtgaacttggcttgaggtgtcttcgattgatggtgcctgtgggtacttagcagaaagcaaactgccttggtgatggatgaaagacaagttcatactgggcctcagggaacctctacaaataatttttcaaaagcattaaccagtacaaagttagagataatcaagcacattaggagacatggcaacatgtagtaagaaacagcagaagaataaaaataccagcttatctgcccagactttgaatatgggaattacaaagcatgggtttaaaaataactttaattataccatatttagataaataaatgacaagcttgaaaattttaggaaatgggaaactgacaagttgaaatatttgaaaagaaccaaacagaacttcaagaactttactgtgcagtatgataatcagccacatgtagctatttaaatttaaactaattaaaattattcagttgtactcactacatgtggctagtggctatcttattaaatagcaagatataaatatttccattattgtaggaagttctgttttacaacagtaatctagaacttcagtggccaaaattgaaaacttaatatacatgtctgacagcaagttaggtatagcagagaacttaggaattagaagatagattagaaaaatattatccagaatgcagcagagaaagctaaaaagatgagaaaggatcaaaagaatcaaaggtaagtgacacagcagatatatcaagacagtctttgtgtttaatgaagtgtcctaggagaatgggagaggaaatatttgaagaaatgatgggtaaaaactttaagaacttttctaagacattaatgtcaccataactgacaactcactgtaattaccaaactgacatccctaaacttatacttaaaccaattgtattaagaaggtaatattcaattattatattaaggtaacattcaattattatattaaggtaatattcagttcaaatattcaaaaatactgtctcattatttacattttactactgtatattcactttaggttatttaaatgtttatatgagagttcagacctacttgttgaactcaaaattgttttattgctttgttatatgcatgtttcacaataacatttgttttgttaaaaaagtcgatccacttgcattatcagaggggcccaccacattaattcacacacacacacacacacacagacacacacacacacacacatatgtatatatacatacacacacagtactttattaaaaatgctttaagggatagctggttgaaggagttataaacttacttagatcagaggagttatatattctgagtgtttgagacaacatttaaaaacatcacttgatgctactcagatggaacataaggaagtcaccctcccatttaataaggggacatttgatgtgccctaatgagtagcacttgcagccataacctcacgtgataaattgcatctgcaagctatgtacatggcttggttctgggtaggttatgatacacgacaaccaaagggcatcagatagtgcagatgaggtgttcagggagtcggctgcagcgtgcccgaaacatcactgcacctgcctttcacattgtcctgatgcacatttccagttcactttagggagcagctttttttgttttgtttttgttaaatatttaaaatcccttaaaataaaaaaattgaattatgtagacaaaatttttgtttattctattctggaatctttcacacaacgaatatttattgagctcctaaaatacactagcattgtggttggtctaataccagtgagtagacactgccatctaactaataccagtgagcagacgttgccctgtaactaataccagtgagcagacactgccttctaaccagtaccagtgagcagacgctgccctgtaactaataccagtgagcagacgctgccctctaaccagtaccagtgagcagacactgtgctgtaactaataccagtgagcagatgctgccctctaaccaataccagtgagcagacgctgccctctaaccaataccagtgagcagacgctgccctctatctaacaccagtgagcagacgctgccctgtaaccaataccagtgagcagacactgccctgtaaccaataccagtgagcagatgctgccctgtaaccaataccagtgagcagacgctgccctctaaccaataccaggagcagacgctgccctctatctaacaccagtgagcagacgctgccctctaaccaataccagtgagcagacactgccttctaaccagtaccagtgagcagacgctgccctgtaactaataccagtgagcagatgctgccctctaaccagtaccagtgaacagacactgtgctgtaactaataccagtgagcagatgctgccctctaaccaataccagtgagcagaccctgccctctaaccaataccagtgagcagacgctgccctctgtctaacaccagtgagcagacgctgccctgtaaccaataccagtgagcagatgctgccctgtaaccaataccagtgagcagacgctgccctgtaaccaataccagtgagcagacgctgccctgtaaccaataccagtgagcagacgctgccctctaaccaataccagtgagcagacgctgccctgtaaccaataccagtgagcagacgctgccttctaaccaataccaggagcagacgctaccctctatctaacaccagtgagcagacgctgccctctaaccaataccagtgagcagacactgccctctaaccagtaccagtgagcagatgctacactcacagaccctgccttgaaccttttcctattttagtacccttatttatttatcttgcctgattgccctggccagaagttccaatactgtgttgaacaggagtggtaagaaatggcatccttgtcttgtgccagttttcaaagggaatgtttccagcttttgcccattcagtgtgatattggctgtgggtttgtcataaatagctcttattattttgagatatgttgcatcaatacctagtttattgagagtttttagcatgaaagggtgttgaatttttttgaaggcctttctgcatctgttgagataatcatgtggtttttgtcgttggctctgtttatgtgatagattacttttattgatttgtgtatgttgaaccagccttgcatcccagggatgaaacggacttgatcttggtgaataagctttttgacgtgctgctggattcagtttgccagtattttattgaggatttttgcatcgatgttcatcggggatattggcctgaaatttcctttttttgtgtgtgtctctgccaggtttttgtatcaggatgatgctggcctcataaaatgagttagagaggattccctctttttctattgattggaatagtttcagaaggaatggtaccagctccactttgtatgcctggtagaattcggctgtgaattcatctggtcccgggctttttttggttggtaggctattaattactgcctcaatttcagaacttgttattgatctattcagggattcgacttcttcctagtttagtcttgggagggtgtatgtgtccaggaattcatccatttcttctagattttctagtttatttgcatagaggtgtttataatattctctgatggtagtttggatttctgtgggatcagtgctgatctcccctttatcattttttattgtgtctatttgattcttctctcttttcttctttattagtcaggctagtggtctatctattttgttaatcttttccaaaaaccagctccgggattcattgattttttgaagggtttttcgtgtctctctctccttcagttctgctctgatcttagttatttcttgtcttctgtaagcttttgaatttgtttgctgttgcttctctagttcttttaattgtgatgttagggtgttgattttagatctttccccctttcacctgtgagcattttgtgctataaatttccctctaaacactgctttagctgtgtcccagagattctggtatattgtgtctttgctctctttggtttcaaagaactaatttatttctgccttaattgtgttatttactcagtagtcattcaggagcaagttgttcagtttccatgtagttgtgtggttttgagtgagtttcttaatcctgagttctaatttgattgcattgtgctgtgagagactgtttgttatgatttcaggtctttggcatttgctgaggagtgttttacttccaagtatgtggtcagttttagaataagtgcgatgtggtgctgagaagaatgtatactctgttgatttggggtggagtgttctgtagatgtctgttaggtccacttggctcagagttgagttcaagtcctgaatatccttgttaattttctgtcttgttgatgtgtctaatattgacagtggggtgttgaagtctcccatgattattgtgtgcgagtctaagtctctttgtaggtctctaagaacttgctttatgaatctgggtgctcctgtattgggtgcatatatatttaggatagttagttctatttgttgcattgatccctttatcattatgtaatgcccttctttttcttttttgatctttgttggtttaaagtcttttttatcagaggctaagattgccacctctgctttttttttctcccctgcttgccatttgcttagtaaatcttcctccatccctttattttgagcctatgtgtgtctttgcacgagatgggtctcctgaatacagcacaccgatgggtcttgacgcttcatccaatttgccagtctgtgtcttttaattgtggcatttagcccgtttacatttaaggttaatattgttacatgtgaatttgatcctgtcattatgatgctagctggttgttttgcccattagttgatgcagtttcttcatagtgtcaatgttctttacaatttgatatgtttttgcagtggctggtacaggtttttcctttccatatttagtgcttccttcaggagctcttgtaaggtagggctgctggtgacaaaatctctcagcatttgcttttctgtaaaggattttatttatttttcacttatgaagcttagtatggctggatatgaatttctgggttgaaaattattttcttgggccatacgcagtggctctcacctgtaatcccagccttttgggaggccaaggtgggcggaccatgagatccagagtctgagaccagcctggcccatatggtaaaaccccgtctctaataaaaatacaaaaaaattagccaggtgtggtggtgcccacctgtcgtcccagctactcaggaggccgagacagaagaattgcttaaacctggtaggcggaggttgcagtgagccgagatctcaccactgcactccaaacctgggagacagagcaagactgcatccccctccccaacaaaaaaagaaaagataaattctttaagaatgttgaatattggcccccagtctcttttggcttataggatttctgcagagagatctgctgttagcctgatgggcttcccttggtgggtaacccgacctttctctctggctgcccttaacattttttccttcatttcaaccttggtgaatctgatgattatgtgtcttggggttgctcttctcgaggagtatctttgtggtgttctctgtatttcctgaatttgaatgttggcctgtcttgctaggttggggaagttctcttgcatttaatatcctgaagagtattttccaacttggttccatttttccccatcactctcaggtacaccagtcaaacataggttgcttcttttcacacagtcccatatttcttggatgctttgttcattccttttcttttttttttttctctaatcttgtcttcacgctttatttcgttaagttgatcttcaatctctgacatcctttcttctgcttgatcgatttcgctattgatacttgtgtatgcttcacgaagttctcatgctatgtttttcagctcccatcaggtcatttatgttcttctttaaactggttattctagttagcatttcctgtaaccttttatcaaggttcttagcttccttgcattgggttagaacatgcttctttagcttggaggagtttgttattacccaccttctgaagcctgcttctgtcacttcgtcaaactcattctccatccaattttgttcccttgctggtgaggagttgtgatcctttggaagagaagagttattctggttttgggaattttcatcctttttgcactgggttttcctcattttcgtggatttatctacctttggtttttgatgttggtgaccattggatggggtttttgtgtggatgtccttttggttgatgttgatgctattcctttctgtttgttagttttcttcctaacgggcctctctgctgcaggtctttgggagttggctggaggtccactcctgcccctgtttgcctgggtatcaccagcagaggctacagaagagcaaagattgctgcctgctccttcctctggaagcttcatcccagagggcaccccccagatgccagctagagctctcctgtatgatgtgtctgtcaacacctgttgggaggtgtctcccagtcaggaggcacgagcgtcagggacccacttgaggaggcagtctgtccgttagcagagctcgagcactgtgctgggaggtccactgctctcttcagagacagcaggcaggaacatttaagtctgctgaagctgcacccacagccgccctttcccccaggtgctctgtcccagggagatgggagttttatctataagcccctgactgggcctgctgcctttctttcagagatggcctgcccagagaggaggaatctagagaggcagtttgggtacaacgtctttgctgagctgtggtgggctctgcccagtttgaacttcccagtgccttcgtttgcactgtgaagggaaacaggctacttaagcctcattaatggtggacacccctctccccaccaagctcgagcatcccaggtcgacttcagactgctgtgcaggcagtgagaattttaagccagtggatcttagtttgctgggctccatgggtatgggatctgttgagctaggccacttggcaccctggcttcagccccctttccaggggactgaacaactctgtctcactggcattccaggcactactgaggtatgaaaaatctcctgcagctggctcggtgactgcccaaatggctgcccagctttgtgcttgaaaccctgggccctggtggtgtaggcacccaagggaatctcctggtctgtgggttgcaaagaccatgggaaaagcgtagtatctgggccggaatgcaccgttcctcagggcacagtttctcagagcttcccttggctaagggagggagctcccccaccccttgtgattcctgggtgaggcgacaccccaccctgctttggctcgccctccatgggctgcacccgttgtctaaccagctccagtgagatgagctgggtacctcagttggaaatgcagaaatcacccgccttctgcattgatctcactggaagctgcagaccggagcttcctattgagccatcttgccagccaccctagtcatttttaaaaaacatcaagcagtgtgatatttgatgatcgtttttgtatagtagctcatgctactgatgtgtttgtatgatagtctttataatttatcatgaaagcagatctgtttttctgcctgccagaatgttagctgtaattgagtaactcattaatgtacctaattgtatacttatttttacacacttgtggtctttaaatgaatgtgccttttcttgaattctggccaaaaaatgaagcagcttcagtgtctttgacccttctatgcctgacatgaaaacaatgttttgaggttgtcctcccatataccacatggcataaaagattggttttgccatagtctagtgataccaactttatgtatgcattctaatgggaaaagaggggggtgtctgactagtccaagataagaatacaatgcagtgtctgggactgaacttttaaaaaatatatgttcatttttagaaaaagtcattactgtgcttgctgcctgtctggaaagtgagaatcaaaatgctcagaggattggagcagctgccctttgggctctgatttacaattatcagaaggtcagttttaaaaatcattgttacacctggggagcaaacaacaaggtataacccaggtataaactcttaggatacatccaaaggtgtcaagagttacagcaaaagaaaaaagacaaaatcaaagatccatgttccctttgctgattcatacaattagtaaaccatcagttgaaatctttttatttaatcatttcaacagaatgtctcagtttagaagagaatctctgaactgactttttcctcttaatttaaattgatttactttattattgcaattttagtatagattgtttcttctaaaagacgtatcaagggaaaacacatcttaaagtaaaactgagtaacaaaagttttatccaattgtacaattcccctttatctagctcagttcttgtacgactgcagcccaaagcctgctctgagaaaagggcaggcaacgtggagatttgtgttctactctttctctggcctttggacttccactttattgcagacatgttgttcccaagagaaatacccataagtatctagtgattaagtagtagccaagtgacagtgttaggatagacagccatcctagaatggtgttctctcagctgactgtctctgccggggctagttttctccctgctggccagagtcacgtacacaaggacaagagggtgttgttttctttctcacctgggtatccccagagcttagcacaggatttggcactttgtagtcactctgtaaatatttgttgaccaactgctaatatttggtatatgtgatcagaaatctgaggtttgagggagtatgaaaaactgaaaccaaggatgactagtttaaaatagcaaattgagattaggggagaaggagtaaaagagaagggaagaaagaaaatgggaatagagaaagaatcaagttagataagaggatatgggcaagacttcagaatgtgcaaggggattggctcaataggatgtattatgctaagatggaactctctagttatattattatatttcataatattctgtttaatactgtagttagcaatgggcagaattagtgttttgctatcatgatccataacacatggcaagaaacctaattaatggattgttctaggcaaaaacagctttgaaaagcccatcagtaaaaagaagagtggatgaagcatactccttagcaaagaaaagtaagttgcaataagaaagagattatagttaaactcagaagctattaagtggattttctgattaatgagatatttggacaggccacagcaaaatggcattgtaaaatgtgccaatattcagtatgtgctttaattatatcattttttaaaataataaaatagatagatgaaggtttaagatgtgattgcttctaaaaatgcatctgtgatcttcgtcttatttttgtactaaattttctttgccaacagtgaccactgtgctgaagtatgttcttagtgataagaactggcccaattagaattaactgtgagcagaaaacctggatctaacatcagggagctggaggacagtcttccaagaattgatcctgttacccttatatccacgtttccctgtgatgtggtcacaatactagagacggttttcttttcaaagcacattattcatttttagtgacaccaaatttcagtgagcgttattctctgaacattttttatgctaaaacactgaattgtgtctttcctgtactgtaatatatctgttggttatttgtgtttttatagtctgatttttttttttaagcaggggaggttttagtttgttttagctgcgaccatgaatttctggagctagtgaagttaaagattatgctttaggaaggatggtacataaaaaaagattaatggcattcatttggaattatagttaatggtatccattatggggggtactttttaaaaaatactctgggtaagctgttaatttaaaaaaatattgattttgtaacttgtttattttttaaaaaatgcaaaatattctggaatgctattacatcaagaacttagagctttaaattatatataaatcctgttcatatgtatttgtttatgtgtgtgcctcctaagtatagtaccaagtttcataaactagtatttctgtactcttatttttctatctcagctttcccaaactcagaagcaaaccctctaaatgcctattatttgaaatgtcttgaaaacctcgtgcagctccttaattcttcctgagtgccatgggatgctacaccttgaagctgacagtcatcaacaggggagctaaagttgaagccagctgtgtgtagcagctgttacctgaagacgtgctacctctctacaaagtgttgatccccttctttcccatgagagagagaactggtgatactccaacaccgtccagttgtggcagctctccagaagtaatagcagctgacaactttctgtgccttttcctttctgttgaaaaggcatagaaagttctgggaacataaacatttttacccttttctatgccatttattttgtaaaaatcctatttaacagttatttaataaaacaatatttttagaaactaaaaa

SEQ ID NO: 15786 - DNA, 139819 bp, Homo sapiens
gagatggtcctggcagggctcatcaggaaactcggtaactgtcagcttgcccctcgcccaaggcaccccccgcgctctggccacttgctgagaatggtcgtgtcacgtttccgcggccggccgctccgcgaccgctccctctttcacccccgctttgtcaggatagcccccggggacccatctcggactttgtgtaaacttcgcggttcgcgtcccgaaggcaccagtggcctgcttctgaaaaaaactggtttattccgtcttcacgccgctcctgcccacagcataaataacgtagtctctttgcagtcgggaaataaaatagttttgtgccgttcgttgacaggtcatcagctggccgagatcagggagcgcgctctcaagagtattctctgcaagattgagcacaacttaatctgctacgctgatctcattcaggagaggcaactttttcttcatttgctggaatggttcaatttcccgtccgttccgatgaaggaagaggttctgaacctgttaagcagattggttaaggtagggtcattttgaaataaagaaaataatcagacgagtgacttgtttcttagtcatttaattgtagcgtttattgaaagttaaataattggggttaaaagtttttttaatcaaccagagatgtttaattttaattaatctgggtatatggttcatcttttatttgtgatactgaatcccacatggtctctgctgtgctcagaagtaacacagaacttcttttgagttttggtatgttctgtgtttttgagttatctttggaggttaatatttgtattctgtttttgttttctgacatttacatcttaaaaactagatatgtcagtatgaaagggagcactttaaaaataatgttacataaccgtgattcataaataccaatgttaagttgcttgcccatatgcttttagattggtattcttatgcctacctcaagagtagttagttatcggggtcagatatcaaagtgtaagtttaacctttcaaaactaaatcactgtacaatggtagaggaatcttaaactactttgacatcctgttgaccggttggggctgggaccataaggtgagtgtcagtggaaaaaagtaacccattaaaaaaataagagtagggattgataatgtgcatttctagcgttcagtgtgttggctcatctttcataaatgttatcaagtgttggatgtatgtctctataggtgtatgtgctcctcatggaagtgccttacttcggggcagagccatgaaggatttgtttttcagaaaaggaacatctgatataccaaaaataattttatgttttgattgctgtaagttatagagattttgatacagttattctcaagatcatcctcttcttattttagtatcccccagcagtccaacatttggttgacgttggtgcagtagagttcttatctaagcttcggtctaatgtggagccaaatctgcaggctgaaattgatggcattctggatggactttttcttcttccttcggaagttcctgcactatcttctgcctcataccaaaccaatcaaactggtaactctttggaatctgttaaatacaaatatattaattctaatggtaaattttaaggaaagggagattagatttttttaaaaaggatttctcccacctcccccaaacttatttttcttgtgttaacttacatgattttgacctttttcccctcctctactgttagtcaaaggatggtacatttgcattaattgctttttgggtcaggcctaaacgatgccagtgactttgcttttatgaggccagtttgacagattatttttttggcaataacaatgtatttttattgagcacatgagtgctcattgttcttagtgctttatatttgtatttttgaccttgttcgtcatattggagtataatgatatctgtcctagctcatgatcttgttgtggggaccaatcaaaacgacataatgcaagtatttttatatgctgcagtccatcatgatatacttgttaaaatccaagtcaaagagacatggatttaagtctcagttctgctgctagttgtgtgaccttggctaaggtaattaacccttccaggcttcagttttctcattcaaaaactgggataataagaaagaacaccgggctgggcatggtggctcacgcctgtaatcccggcactttgggaagccgaggcaggtggtcagaagttcaagaccagcctgaccaacatggtgccccgtcactactaaaaatacaatacaaaaattagccggacatagtggcgggcgcctgtaatcccagctagtagggaggctgaggcaggagaatcacttgaacccggggggcggaggttgcaacggtgagctgagatcactccattgcactccagcctgggtgacagagcaagactccatctcgaaaaaaaaaaaagaacactttctcatagaatcgtcatgagattagatgagacaatgtctgtaaagtgcttagcacagggcccagcatgtatgaaatgtggctgtgttggctgctgtgctgctgctgttgtgttgttgttaatgcctagtatagtgccttgcacatggaatgcatttgaattgatttgaagaaaaacatcttcatgcaatttatgtgactgagtagtaaaagtaaaaaaaaaaaaaaaaagttttgatgcttaacctgttagaccatattttcttctctgccagtactgttacagcttcagctgtgggtactgcggttcacaacaacaatagcagctgtcatttattgagttttgttgtgggcattgaatacattgatttaaacacatcatcttgttaaatcttaaagcagccttttgactgagatgttattagtcttactctatagctgagaataaaagtataaagtaacttgccccacagtaccaagttttctaacctgtagcagatgcaggattctaacattgctttatctggctcccaaacctgtgatttttaacaatatattttacagtttcgaagacatcacaaataaagtagagtcttacactgtgaatttttaatctgattccttgcgggtgaaagtagaggaatggtttagggctaaatgttatttttctttattagtgttaggaactattgccatgaaaacttaaaattacaaactatagttttagccttttcctcattttcattgcagctgaactgctgaacatataatcgcatgttatagggaattgtaaaggtattgaaagataatatttgactcctttgtttttgacaactttctttttaaggtatgaatgaaaattgaagtgatcaggaactatataattggagtcaagggagagggagatggattaggaagtagagagggatagtccttgaatactttgtagcagattcttcgtgtacattctaacaaataactgtgtttggctaacagtaaaagtgagagggaaaaagcttcttaactggaagtgggctcaatgtgcacattttttcctctttagcaagatagatcattcagaaaaaaaactggacttttttttaatttttaaaatgattccaatacttaagagaaaacattaccacttaaagaaagtaagtttcacttttagcaaataaggaatcgacaatacagtaatgtttatttccttttcagaattgtcaaaaaaccctgaaatcttaacaggatattttccccaagacaaaagtaatttccagcagatggaagtgccgccacgaccagtgggtgtgtatatgtcgggaagtaaatcctgttgacttgggaagttgaaaattaatgtacttttttcgttattgtgaagatgtatttttaccaaacttgaatgtttcagcaccaaactatcattaaatgttttagttgtttcaagttagtttaggatatcgagtagaaatgataaaattttgtgttattctaaccatatttgaacaactgtgtagatggatggtattaatggcagtagtatgtcgtactgaatgaacatgagtttttttttttttttttttttttttttgagatggagtctcgctctgtcgcccaggctggagtgcagtggtgggatctcggctcactgcaagctccgcctcccgggttcacgccattctcctgcctcagcctcccaagtagctgggactacaggcgcccgccactacgcccagctaattttttgtatttttagtagagacggggtttcaccgttttttttttagccgggatggtctcgatctcctgacctcgtgatccgcccgcctcggcctcccaaagtgctgggattacaggcgtgagccaccgcgcccggccgaacatgagttttttgaggcattgtgccctgcactacacatgtcatctcatttgttctccagcttaacgatggcaccatctatccagttacgccagccagaggctgaagatcattttagtttcttttcccatttcctcaccacccagttaattaaaaagttctgatttagaaccctgtttctggaatctggaatctcatctccatctttttgtatctggctgtgttcagcctcagctcacatgccacctcatcagagaccttcctggtgattctagccagtgatcacttcctatgtgtagttttcttcctaacacattattttttattatttttgttttaagtttgataatagccgtgaacattgcattattttcagtgtctggaacaataccaaaaaatgtattaggcactcagtatatattctttgaaggaatgaatgaatcctcctggagtgtctttgagattggtattattagtgaccacattttactaataaagacactgagattagaaaggttgaaaactttgtccttggtgaggcagttaggaagtagttaagtaatcacgtacttaccattttcttgcctgcacagttaagttgaaaaggatatgttcaagagtatatctgctgatgtcacatattcaaatgaactccatttggaagcctctgttattaaaaagctttcatggaaactcacaggtggaataacaagaaagaactgaaaacttgttaagccattagaatactttaccttttcattcattgttaggcttgtagcaagctttgtttttgaggccagatggctgagaggcttaattccatcaagatgagagacatctgaagggagggggaatctctagggttggtaaaggatgggtgtctgaatgaagccgatgaaaacattaagggggattgagattgttacacttttatgtgagttgcagtttgtcttgattgagggtctggcttattttggacacatttttactgtgtggtgtaagcctgtccttccctccacccacctctccttatttccttagaaagtaaatcctgcttttatgttagcaattttgaaagaagtaactgtgctatgtttgggaatttaataatactgctatccacatttagcgattccatgctcttttcaaagcacttggcagaaagactgccatttggaaggacttatgtagatgctatttctcagtgttgccaccttaacttgtactatataagatctgttaaaaataacttgcatggggatagtttaaaactgttgctttctcagatttcttttaatcttgttcgaacactgatacttgttttttgaccttacggtcttcaagtcatcttcgcagaggtttaaaacacctgacaccatataggatatttgaacatggctagatatggtatatcattatgttttatcatttttaattttgaaaagttaaggttttccctaaatgtcagttccttttatgttgaatttaagtttgatgttctggtcagccacagggtaaaatagaaaatttaatggaaacttcatatgtcagtctgtattggattgtgtttaatgctcttcttctaatacttattttgatatcatatgagttctgtttaaattatgaaaagagaactctcttatttatcctgtgatagaacaaatttgcagctgaccttgtttggtatattttaggttactgtaagatgcagcctttattttgggacttgttttaaagggaaaacttactcttaacattgtgaatctgtcatctctttattctttgataccataagatttgctctttcactgacagtaaatcagactgtgaagtgcttgaagttttctacatttccttggctacccctgaccaccacagacagacatgtcctctcctctaatgaaaggtacggtgcttgatgtattttcaggtatttttgttcacttatagtcattaagtttgatagttattacaatatgttttaccaggaaaagatactagtggcagtgaaaggtagtaatggtcatatttaaatgatttttatttttcaaaaagctagccagaaaaaaattcctatttgcttttaatcaatctacacatcaagtttcttttatttatttatttatttatttttgagacagagtctcactctgtcacccgggctggagtgcaatggcaccatctggctcaatgcaacctccgcctcctgggttcaagcgattcttgtgccacagcctcctgagtagctggaattacaggcacgcaccaccacgctgagctaatttttgtatttttagtagagatggggtttccccacgttggccaagctggtcttcaactcttaatctcaagtgatccgcccctcttggcctctcaaagtgctgagattccaggtgtgagccactgcatttggcccacgtttctttttgtggttggactcttgtgtagtccttggtgacaggagttttctcttattggccagattctcttattggccattgcttatgcccttgattgataaaaatggaaaattgaacataaatgtagtctttttggcagaatatatttcaaaatgtgggcttcattaggagacaaattaaaccatgtggataaggttgggtaccactgatccaatctaatgtaatgactgttaattgattgctacccacaagagtaaatagctgatatatagagatttagagagtattttaatgtccagattcactttgtgcagtttcataaatgccacaatacacgagttatctgcttttttggggtataaatctggaaaataaagaccaatttactagggctaagtccagattacaggtggatgccattaagtgatttttaataatgacatgaattctcttggaacaacatattcgagaggcaaagtgcacatgggaaagggttaggaggttgtatgatctctcagttttgagtcagtcccaaaggcagagatggcgataatttctaatgcatgcctgtagatagtgaatggtggatagtataatggaactgggctgagagaaggggtgtgatttttttggggtggggagtgaacaactgccaatcctaggtgggcagaagttgataggtgtcctctgtatgggataagaggggagtcctaatctgattcaccttgagtggggaagatcagtaaggactttaattcttagaatttgcctctgtacttttgttctgtctcatttcttaatttatttggcagatttcctagaattgtgtgctctttgacctcattgaactcgttttgcagacttgtgataatctctgagggtacagtgtttagtatgatgtcgttcctgctcttgagagggtctagtggggaatgcaaaatcaacaggcagttaacaatatcacaaataatggacaaacggaaggagcactgccctagagttgtttattggttagggaaaagatctaggaaggcttttctggagaagtgatatctcagctgagacccaaaagattgttaatggagtcattgtgtcagtaggctacttagaatctggaatagatgaactcttcttaaaaatgattaacgctatgttttgtagctctttaagaagtagtaaccacactttaatctggaacacctgtgaactattgaaggatgttatcatgcaagattttcctgctgagattttccttcaaaggccaaaaattgttcaggtcagtgccctctataattgttttagattttgaactagagaactttttgcaataaagcaaattttgcagagtaggagttcttgggaaggaactttgtactcatgtttttaaaaagtgaagtatttggctatttaaagcacttattcgctaacttgggtggatagttatagttcttccaatagtagtagtttcatttgacacttgcagtccagtctggccaccttgagttaccatttatggatcacctaaatggtagagtagactttggacattgagattgtgcaggagcccttattaaaagtaagaatagcattgcttcttgagtatctcgtttatttaacgcacagtgctacatgctgggaaaatacagtagcggtgagtaacgcagatggattcttttctttttttctagtttattgcttgtatagtagagagagagggatccagggtggggaattgcaacatcttcacagcagccagtaatggctcagcattctcgctccacactcccagggctgaaatggactccagtgggtgccaactgttaatacctaggatcaaagctggcaaatgatcgcagaggaaagctgttaattactaaaatgtggttaaatggtttagatgcttgagatgaaaagggcttgctgtgatttttaaaatgttctctgtaatgtaatgtcctgagtggggaataatttctgtcttctctcagaatggttactcaactaacagattttagaaataggaaacactgactattctatttaaatgttgttgtcttattttattttgacccatctccttgctttatgccaagtcatatttgcccatttcagtttcttatgtcttacaaatatttggcaacttattttctcttgattattcacttaggcttacttacttaagctccacattctgctttgaagttgagctctttgttcccttagtaattttcacggctcttcttgatttcagagccttttatctctgttgaaactggcctttggagatggaaagcatcgcctggcattacagtcggtgtcctgcctgcagcagctgtgcatgtatttaagaaacagacttaactttcaccgagatccaggttttttctccaataaacacggtatttatttttatctgttcattagccactggtgttatttgtagattcttctgggaaccttccattatagttactgttagggtttattgtgtacgcattttcacaacataaactccccactcctaaatgtattcaaatgattatctttacagattgcgtgaatgacagaaactgccatgatctcttgagcctttttttttttttctggataagagatatttacaaggtgtttttcttttttctcccaaacttgcagagattctatatagtgttgttgggatgtagtgactcggatatttggtatggctattcatgtaggactttggacaatttagcaagttacatatagtgttaatacattgttttgtttgaaaaatattgatttgaattttatgaagagtatttttatgcaacttgcaatgtagtcaagtgttgcagcaatgtgagacttcagagaaaaagtgccacctaatggccaaatagagtaccagcctggcttcgacaaaaccagtaccatttaggatttttgtgagcttaatgcaacctgcatcgaaagtcaaatattatagtcatttgtcatcatgtttcatagttaatccctatttcattgggagtttcactgatcctgtgctacttgaatatttatgctttaccttggttttattctagatcttagagggtatggcattgtacaaatgactggtaatagagaacgtctgggtaccccatacttcaacagaaaaagagttacaatgttgatttaaaaagttgatatctctgaagaattgttaatgtatttaataagtatgtatttattacctgttttatgcccctgatattctagcctctagggaagtataacactgaacaaacgaataagatccaagcccttatgagcttctattttaaaaggctgggcacaggtgataaacaatcaagtttgcttgagataaggagaagtacttgaaggaaataaaaagggtgatgtgacagaatgtggttgggtaaacatagcttcatttaggatagtcagggaaagtccctcagaaagcttctattttaaaaggctggggacaggtgataaacaatcaagtttgcttgagataaggagaagtacttgaaggaaataaaaagggtgatgtgacacaacgtggttgggtaaacatagcttcatttaggatagtcagagaaagtccctcagaggaggtgacctgaagggtgacaaggaatcgtcactcgaagagctgcaagaagagtgttccagggaaggccaggcctcaaggttagcactgagggtgatgtccttgagcaactgaaataaagcccatgagagtggactgcagtgagctgggcagaagaggagaatgaggtgacatcagagaggtagttaggggccagagtatattggggcttgcagatctttttaaagattttatattttctttgaagtgtagtgagaagctcttggagagttttttttccccctctctctgactgtaaatgcttttattacctaattctttttttaaattggggtaaaataggtataatataaaatatgccattataaacatttttaagtatacaatatagtgacattaataacattcacattgttgtgcagccatcaccactatctgtttctaaacctcttcattatctgaaacagaaactctaatcattaagcagtgattcctcatttttcctttccccaaagctggtaaactctaatttactttctgtctctgattttgtctattctaggtacctcatctaagaggaatcatacagtatttgtccttttgtgtctggtttatttgtaatgttttcaagcttcatccacattgtagcttgtatcagaacttcattcctttatatggctgaataatattcctttgcatgtatatcccacattttattcatctatgcatttgtcgatggacatgtgggttgtacccacatttggcggttgtgaataatgcttcagtgaacattggcatgcaagtatctgtgcagtgcctggtttcaattcttttgggtaatacccagtgaataatagtgaaattgctgcgtcatatggaaattctatctttagctttttgaagaatcaccaaactattttccacagcagctgtaccatttacatttctatcagcaatatataaagcttccagtttttccacatcatcactgacttgttcatttttttcttttttaaaaataatcgtagtcatcctagtagatgtgaagtggtatctcatggttttgatttgcatttctctaaagacctaataattaatgaccaatgaatctctaataactttttatgtgcttattgtttgttcatgtatcttctttggagaaatgtttattaaagttctttgcccattttaaaaattggactggtttctttattgctgggttttaggttacttatatattctgaaaattaaacccttatcagatatatggtttgccaatatttcctcccactctataagttatcttaacactttcttgtaatgttcccttggtgtaccaaagttttagattttgatgaagtccagcttatctgtctgttccttggttgtttgtgctttcgatgtcatagttaacaatcgattgccaaattcaaggtcatgaagatttattttttccgctaagagctttatggctttagcttttatatttaggttgttgatccactttgaattaatttttatgtacagtatgaggtagccattcttggagagttttaagcagacgagtgcatgatctagtgtttttctgctttggtagtctctaatgttgtaactgaatgccattgactagaaggtcccatgtaatcaagtcagttagatataaacctaaatgtactaagtgaatacttatagaaaagtttgatctttgcttttgtttttacccctgtagaaggattcctactatcttaatttgttaatgtttttggaagaatgatacataaataccacatagtcagaagtctgtttctactaaagaataattttattttttctttgtttccccagacacagtttcccaaaattcttctttgtcttattgtcatgaagcaagaggtactcatcattcccagaatccttccccaggaagcagcagccctcggccttctgtggttgggcgcacaggccagcgacccagaggagatggccaggactgggatgcagcgtcctctaggtgactgctagcagtgtctctggggaaatgagaaatgccggttaacttgtgtgtgtgttaatttcagaaggagataattatttttctgtccttttttttttttttttttttgaaacattaacacaggtataggccttgtgttaaaccctggcttcatactttttttgaccatgatccacggtaaggacagataaatattacatcgcaactcagtgctcagtacttgaacatatgctctgtttatgtatatatatgtgtgtgtatgtgtcccccaaaacaaaatgttcacataatagtattctgatactatgtttgacacactgaactatattttcagttccgatttcattagaaaagaaatgattctgacccaataaattgtttttaccagctgcaaacggaatatgatcaagtttaaaagaatagctttaaatgatagatacattgttgatagtattttacacatatttttgtaagtcttataacaaatggataagtgtttactgttaaaaggaatggttggagaattttataaaataaggactccttcaaggtgaacaatttatggtatttgtttgtgtaaatacagatttttttcttttttttttttttttttttgagacaaggtctcactctcttgcctaggctggagtgcagtggcacgattatagccttgacttctgggctcaagtgatcctttcgcctcagcctcctgagtggctgggaccacagatgtgcactaccatacttggctaagccttttattttttgtagagatggggtctcactatgtttcccaggctggtctcgaactcctgggctcaagtgatcttcccatcttggcctcgtaaagtgctgagattacagacatgagtcaccatgcttggcccccagtgcttggcacccagattttcatacaccaactctgcttaaaaggattggtgtggtatttgtatgttaccttatccttgggtgcaaatgtgttagaaacatattagtctctttagtgtcattctaaaaaatgttcactaagttaagcattggtctgttggcttaattattttcttgcaatactgctactactgttaacaagctaatactgattcatacctgctgtgtgtatggtgttatgccctgtgctttgcatactttgtctcctttagttgtcctagaataggattgatattatatatagcattagtattattattatcatcctcattgaggtttagagaggttaagagcataacagttggtaaagagcagagctagggttaaataaaatgataggagagtctatgctcttagtccttatattgtagttggttgttcagccatgtttttctctttctcctgaagcctttctgcctcattctcttgtgtgcttcatgcttctaagttttcactcctgagtgaacagcttcctcactgaaacttcctttcagagttacagagaagcccgagttgtttccatattttggggtgcttggtatcttgaaattgaagaaacgacaaagttggtttataatttgggcaaatttaaatgttccatagcattaatatgtctcttgtgatccagcttcggttgtggataacatcaaaagacaaaattttgaggctctttgtaagtgtgaggctctagcctttctacactttttaaatccttactccagcactttacatccgaggtaagaactttttaatgaagaaagccaaggacaatgggatgttccgtttttttgggtgcatttttgaagtcactacatgatgtcgaatgtactaagtgaagtaatacatttcccatgaggtttttctagaaacatccttcatttactaacactggcttactcagaacagtggtgaaactcagaaaatctaggaaacggtatgaactattggttttgtctctacacgttgattacagaagagctttcctataaatctgcttatttccttttggaaatgaatgggttatcagtgctaatattgattcctactataggaatgttgacatgttttgagatatcagcctgacaagcaaaatatagatgcatttttggcttcatttacaatttagagtctttttttttttttgagatggagtcttgctctgtcgcccaggctggagtgcagtgtcgctatctcagctcactgcaacgtctacctcctgggctcagaagattctcccgcctcagcctccccagtagctgggattacaggtgtgtgccaccatgcccagcgaatttttttttttgtatttttagtagaggtgggatttcaccatgttggccaggctggtcttgaactcctgacctcaggtgatctgcccgccttggcctcccaaagtgctgggatgacaggcatgagccaccactcctggccttgagtcatctttatggaatttaatttcgtaaatttgtcaaagtttctacaaatctgaccagagttgaatgaagcagtagagttgtgacttgtatgaggcttctaatatgcgaggcagcagatatgcagtaaatctgtttggggattgtttctgtatgcaaggtttatcatttgtttatcttgcagtggaagtagtagtcatgctcatgtaaactccaggatatccgttcattcacctttggatatgggacacatagatctgccagagctggaaactgaagacacattggaactacaattccagcagctcagtcttccccagttttgtgtctccattctggaatcagctgttcctctcttaagaacaggttagttgttttagaaatcgtaattctgatataatttgtgtctgttttgtatttcgttaggattttcctttttttctcttctatgttagggcctttggaatctgtatttacttatcttttgggatataaatttctaaaaacctaataaggtctttattatttttaaattaaatgtggatgccttggagggctattcagcttgcccttccattttatgagtttttattggcacaggctttcatgcttattttttttttagaatttttatctattttttgcatttattcttgctgtcatctatttttttcttttttttttggactgtatggctattttaaatttgagcagtgacaacattcagcaactggaataaggtataaaaggtggactggcatgaatagaccagaataaaaaaatctttggcttttgctctttggaaactttttgattagctgtcagttgtttactcttcccattcatttcttgctacttaagccacttaacatgttaaaaacaaaactccaaaactggattcttacctttgtagtaatttttcttaaaaaagccacaaatattttgagatcccatttttgttcagatgtactaggaaaatttgaagaggttgactgaaatatacactggtatttaattgtaattgtactgaacaatggtaacagcaataacaatatgacagaggtctgctgagtctagtaatgaaacaacagttagcacgtgtccctactgggttctgccttcatacttggttttgtgtgcattatttcgtgtatttttcatatcaacccattttgttttttcactggtagttaactaattttatctccatttttacaaatgatgaagctgagtttttgagtggtttagaaacttgcctgaagtcaaacggctaaaagcagggacttgaaccacgattcttttgaatctaaagtccatgcttttaaatactttagcattttgcaaggtgtaaagaaagttttagaaagaaaacagtcatgatttttattctcaaaatctatacattttcaacgtttgataaactcatcaggatataaataagataaccaagttttgccctttttactttatactggcaaagtaaaaatatatattccaagttaatggttctttaagtcccatgtctattttttgccacttggaggtgatggaggagaaagaagcaggaaggtatatatttggaaaacatttaaaatgtttttatcctgaggaaaactgtgtactcatactttttactcagtaagtgcttctactagctggaactatatattaattcatatactaataatgtgaaatgaagaaagatctgaactttggcatcataaagtacatatgtttatctgtctggtaagctgagaagaacagtcttagactttaatgattttgcatttaacctttccttaatttgctttaaaaagtcagattgataattataaagctatatcttggtacataaaaactaaatgttctcctgcccttttgtggtaaattatggcatgatttgtaactgttcaatatcgtaagagatttgtaagagaatttggtccagctcttctagtgaaaaaattaatctagatccttccaatctggtagtttgttttactttgattcattagaacttaacctttgggatgcggggtgggaaagtctcgtgtgaatgttcgtctcacacaggataatggaagtggagtctttgttattctgtctctgtggagaaaggaggttgctctggtgggtgtgactttgggaagtttttttgagtttaaggtgagtacaaatagtttctttagcaaatgttagcatgttcatttattcctttagttgctccagtccaagcttagcttcccaggcaactcctgtgtgggaaaatactaatttatgagaaggctcacgccttctagtactaagtagaaattattggaatacgttttctaaacctttctggtgctttgtcacatattacgtgtaaaatggatggtccctaaattcgaaaaattattttaatctatctcacagtacttgttagattattgctactttcaatatcttttccaattataaatgtatttgatttgttatgtagtaaagtagtactgtgactggaacagaagccttcagtgtgattgtaaattgtgatttctctacagttctaagaacattagaaaaaaagagaaaatgttggagcatgactaactagaaaattgagcaatatgatattcagctgattattttaaagttaagtaacttcttctcctttacttttttctgtttgtattcctaggtagcagacaagtgataataagagttctggaattgcttacagaggatatgacacttattggtgaagcaatttcaacagatatctgggatgacagcagcctttttggtatagatatggtaagaatcaatgttttctttgggatatagggaatagtattttttaagattttggttcttttaagccggtttcattgtctcattcgtgttcaaaatcttttttctttttgactcaatatgtcccaggcttatgttataaatagcctggaacaggcctatttttccaaaggttctggttacttctaatagtggaacgtatattaagaccaaaaccaggccattagaggtggttatagctactgtgatatcattcttttctttcaggaacaattaggaaatacgtatttttaaagatcgtgagtttattgctatttttcttattttaaatttgtatttcttatccttgcgcttgtagaaagtcttcgttcctagcaatatcagcataattgcttattagctttgaccttaaacatacataagatagtttcagaacagcaatattaacattgctatgaacaattctaatgaaaagttcaagatttcctggcagttctttttgagatagactaatctcactaaggatatacagtcaaaatactgtgccttaaagctaccgttacccattcagcatacagttagatttttttttgtttgttttcactattgggaattgttttttcttcataaaaatgtagctcagagatgcctctctcccatccagttacctttaagatgttttccttattggtagtcatttttattttctggctatttttttctatttttattttatttttgcaaatgtaagcaactaagtatgtagattcttatcctctccccatcctgcataaaaggtggtatattatagacactgttttgcaccctgtttttataacttaaaaatacgtcttatgtgcatagaatagtaggtatgaggattattccctatctatctatacgtgagattttctcgttcttttttataggtagcaaatgcttcgttgtgtatttgttaacctagtctcttgatggatattattgttaatataaattatgtacaaagaataatgggcttatgctatttcataaatgtgcaggtatgtctctagggtagatttatttaagtgggcatgctgtttttctaaaaaacttttatttagcttcagcggtacgtgtgcaggtttgttatgtaggtaaactgtgtcatgggggtttggtgtacagattattttgtcacccaggtaataagcctagtacccgataggtaatttttgtggtcctcctcccactctctgccgtcgagtaatccctggtgtctgttattcccctctttgggtccatgtgttctcattgtttagctcccacttataagtgagaatatgtgtatttggttttctgtttctggattagtttgcataggataatggcctccagctccatccatgttgccgcaaaggatatgatctcatgcatttttatggctgcatagtattcattggtgtgtatgtaccacattttccttaatcagtctcccattgataggcatttaggttgattccatgtctttgctattgtgaatagtgcagcagtgaacatacacatgtatgtgtctttatggtagaatggcctcaagtgatctgcctgccttggtctccgaaagtgctagaattacaggtgcgagccaccgcgcccggctgagccatgttgtttatgtagtagtacagcagttcctcacttggcatcatagataggttttcggaaactgtgactttaagcaaactgacttataacaaacccagttattttttctcatcagcatttagtgaaatggcatggaacttgtaatgctgtttcattaaagtcagtttccaagaacctgttgaccaagttaagtgaaggcttactgtagtttattcattttatttctgagtagtattacattgtgtggacataccacaatttgtttatccattcacctgttggtggacaatggggttgtttctagttattacaaataacattcctatggacattccagttgttccacatcttcaacatctattatgttcagttttttttttttttttgggggggagagggcattctgatagatgtgcaatggtatcttagtgggttttaatttgcatttccctagtgactgatgattatgagcatcttttgtaatttttagagagcaagtctaggtttttttttaaaaaaacacttattcttaagtattcttttcaatgccattgtgaatgaaaattttaaaagtttttggattgctcattgttagtatatagaaatacaattgatttttgtgtattgatcgtctatttggtggccttgctgaacttactagttctggtagttttttttgttttgttttgttttctggtagatcccttaggattttctatctataaaatcttgttatctgtgaataaaaacagttttaagatcatcttatctgtgaataaagacagttttatttctttctattcactctggatacctttaatttttttaaattgcctaattgccctggctagaagccttagtataatgttggatggatgtggtgagagccttcttcatgatttagagggaagcattcgatctttcaccattaaatacaagattagctctagtacatttgtattttgtagatgcctttataaagttgaggaagttccatgtattcttagtttgttgaaagttttgatcatgaatgattattgtattttgccaaatcttttgtctctattgagatgatcatttagctttttgaagagcagaaaaacttaattttgatgaggttcagtttcttagtttttcttttatggatcatgcttttgatattttatctaagaaatctttgcctaacttggaatacaaagagtgtttcctatgctttcttttagaattattacatatgttttaggttttatatctttgattaattttgagttgatttttgtatctagcacaaggtaaggaatgaacttttttttttatgggtatacaattattttctcagcactatttgttcaaatgactgtcctttctttcctgaattccttaccaactaactatatgtgggtttacttctggaatctatttgatcggttttctcttatgatgccaatacccaactgacttaattattgtagcttatagtgaaggcttatagttagctatagtgaagcttattgtaagtcttgaaataaggtagtataagtccttcaactttgttcttgttttttttttctgatatgtagtcctcgctctgttgcccaggctggagtgcagtggcgccatctcggatcactgtaagctccacctcccaggttcacgccattctcctgcctcagcctcccaagtagctgggactacaggcgcccgccaccacacacacacacacacacacacacacacacacacacacacaaaaaaaaaaaaaacctgctgtggttttgaatggaattgagttgaatttgtagatcaattcaggaaaaattgacatcttaatagtattgaatcttctgatccatgaataccatatatatgtcttcacttgtttagctcattatttatttttatttttattttttttaacatggaatctcattctgtcacccagactggagtgcagtggcatgatcttggctcactgcactgtccgcctcccgggttcaagtgactgtcactacagcttcagcctcccaagtagctgagattacaggcatgtgcccagctaatttttttgtatttttagtagagacagggtttcaccatgttggccaggctggtctcgaactcctgacctcaggtgatctgcctgcctcggcctcccagagtgctgggactacaggcatgagccactgtgcccagccttatttagctctttaatttgtctctgcattgttttgaagttgtcagtgtataggtcttatacatttgagtatttcagttttgggtcttgtccactggctgacttttctctttatggatcttaatatttgatatgtgtagtaatttctgattggatgctggaccttttcaatgttaccatgttgagtgtcttgattttttattttacccttttagaagcactttgggagggttctgaagcactttgggaggccagcatgggagcattacttgaagccaggagcttgagatgaacctgggcaacaaagtaagatcttgtctcttcaaaaattagtaacattagctgggcatgtaggtgcatacctatagtcccagctatttggaaagctgaggcaggaggatcactcgaacccagaagtttgaggctgacaggtggttatgttacttgtagagcagtttcattttctcaagactttaaaaaattttgctagaatgggtctaaaatagtggttttcaactggggggtaattttgcttcccagaggatgtttggcaacgtcgggagccatttttgattgtcacacctggagtggtgctgctggcttctagtagatagaagccagaacagctcaccacaacaaagaatgttttagctcaagatgtcagaaaaccttgaggaagtgttaaggttgagaaaccctgatctagaagaacctttgcttggggttaaactctgctcctgagatgtgatcctttgggacctctattgaatgtccaaagtgatgattgatgactgtctactctgcctggttgaagactgagttttattgtcttgtgtgagccctgggagttgttcaatttaaatctcagtaatcatctttggcctgtatttacagagtatctacctataatctaagccacctaatctcagcatggtctgggtggaaacttgtttaggtctctgaaattctttctttgcatagctctcccacaattcctaaccatgtcagcttccacaggcatcttcatctcctaaagtcatcgagactgtcagactctttggatttctcttgcctgtgtttgctgtacagtaattgttttcaggtatagtaggactctcattgcttattttccttctctctggcatcacagtcctgcaatgacactatgccactttctagttgatttctggggaaggacaggagatgtccttgttattatttcatggccagaattggaagttttacgtaaagtttttaattatgtcatttaagcaactggcctatctgtgagttattaggagcttaaatgtacatttatctagagtgaaaattctggatcaactttagaataatcattcaaagtgtggagagttcaggataccttgttttttgctgtttgtatttcagtagagtagataattttagaaaatatggaattaaattttgttttttttgtaagaagtgttttgataagtaatattttgcatgagtaatcaacatgtgtacagtagtagccttaagaatgttatattacaacataatatttaagagatctatggaataccagagtatgtctccatgtaactggaaaacatatcttttttaacatttcaaaatatcataaatcatttgtcatttaatatctttcattttgaaattgtcatctgataaccttgccttccttgaagatttggcattctatctcttctgttaatgtgaattcctaatgtctggtcttccttcctctccctttcttccttcccctctcccttcctcccttcccttttgctgccttgtcagggcagtagaatcaaaatttattagtcataaaaatatatattgactcttacgtttatcagttttttttctctttatgctattttgatgtaagtcggtctatatttaattaaacattgttacaggctgtctgaaatccttgtgaatagaggtctgaatataaaaaaataaattacagatatttacataataacaatacccatgtaagaaagaaacccaaacttttatttttttcataacacgagcctcttaaaaagagaaacaaactgcatattttaaaatgggtgtattttcaagtctttcattttctgataatagttctgaatcttggtttttctttagtccttaaggttatcacactattttgtagtacttttaggagatttttcacatattgaagattttcaacaagtaaatttttcctttgaagtgtgaggaatgctttatcagttgtttcttaaattaacttaaattttcttggccagaacatttatctgtaaaagttagtcattcacttttaacttttggctgctggtactttatgattcaatgaattatttttactttaaaggttaattctgttgtacaagtgccagttggtatgttacaaatgctaaataaaacagaagtacttcaaattatatttgatttacttttacttgtttaaaaagaataaatgtctcttttctttggctatattttaaaagaagcaaacaagtaaaatttcttaatgttcatacttttgccagttttcaaaagaaagacggaagcagtatttttgttgagtcattaaaggaacaaaataataaatgttgctatcaatttagaaattaagtacctgaggatatataatcaaatctctaggtatttccacacagtactaatatcagtaacatcaatcatgtctggaaccctgtaactcagcatggaagggaatttcaatttccccccttaattgaatatttttatattactcgaagtaaataaaagaaaaaatattttcaccaaaattagttatgctgacctaaagtatgtcatatgtcattccccctagtcctccatcatcaaatcaggtctattttttccctatttacatgctaagtcaggttcaagatgcaaggagaaagtagctttcacctcctgccagataacctagactcttaggtctatattctgtttcttttccgcatttcttctgtgtcattcctgtcattgcagtcattggaaagcagtcttttcatctttatgactcattgcttctaaattcccatctgacctgctgtgaactggtaacttcaacatcaaggcatgttggtagaattgtagaatgttggtaggacttcaagaggggctaagaggattgtgaaagaaactaaagatctttgtatccagtaagggctcattaaggatatttggaccagattgtgaattgataactggtgtagtgggatctctaattacatagaccttccctgctgctgccaccattccaaagacagttattttaactcacatttcttgattgcccgttattaatatatgctaggcacttgggatatcaaataagatgtagtgctttttatgcctatgggtgatagatacttttaatatgacattagtaaaatagagataagcataaaggaataacacgtaaactaagatagtttaaatatagcacttactgtatgtcagacactaagcactatttatgaggtcatttaattatcatgaccctgcaaactccataactgaggcacagtttatttttcagggtcacttgtggttttgtatttatagccattatgttttattgccaatggtgctttgaaaacactatgaactatgaacttgggatgtcagtgagggctttttttttttttttttctcttccccagactcagagtctcactctgttgtccaggctggagggcagtggcgtgatcttgactcactgcaacctccgcctcctggattgaagcaattttcgtgcctcagcctcccaagtagctgggattacaggcatgtaccaccactcctggctaatttttgtatttttagcagagactgggttttgccagattggccaggctggtctcaaactcctgggctcaaggcaccactcctggctaatttttgtatttttagcagagactgggttttgccatgttggccaagctggtctcaaactcctgggctcaagtgatcctcctgccttggcctcccaaagtgctgggattagaggcatgagccaccgtgcccggcctcagtgagggctttttgtagatctgaatgaactgagttttaaattataggtaggatttggccaagcaaataaaatagcattttttttttttaatctggcggagcgtgagaatgaaccatgagccatgacaaagaggcatggatagttctgatcggagataaaggataggcctggtagtagatggaacacaagcacctagaccatgaaatgtgaggtgcaaatagtggagagagactggtgggataaatgagggtctgctggtaggggtcttttggcatgatgctgagtagtcctgcctttcctctgaaggcatgatgagattgcttttaatcagagaagtgccttgtgagactggcaggaggaaccgtgactggctgcagtgtggaaggtccattggaagcatgtgaggggcagagcctgctgcagtttcttactccaggtgccttgtagaatccacaacccattgtatattgcagaggtagtgtgtaagttgtgtttacactataaaatctgttttattggtaatatttaagacattttgctaacctggtatttcaattttgtaccttctgttgtaaaaactatgagtatcctgtgaggacgggtcttttcccccaccgtcaactcctttagggttgttgcttaaacatctttagcccaaagaattaaaaaatgtgggccagttactattgtttttcaatcctttcctacaaaacaaaacaaaacaatacaaaaagccattttttttatgcttagaagaaatgttggaaatagaactgtaaaactcattcctaaagtattttctttttatgatattttgagaagtactcaattcatcattagaattagcaagattattttaaacaatttcacaagtaaatagacttgaataatagagatgttgttcctagtactgttttcatggagaaatactgtatggaggaattaattgcctgtcaatataataagactgtcactgtatttccaatttgttttctctagaccagtagttgtttgtatgagggcgttttactttttctgttttaattttgtaaggattgttctactttcggtttaaatatttattgctttttagttttatttcttggggatcagagaaatatagccttaaatatacactgaagttttctttgtggtaaagtatgtttaaagttaatttttgtcagtgtttcttggaaacttaaggagaagttatattctttgcagtgttcaaagtttatgtctattaattttaattatgttcaaaaagactgagttaaaatttataagtccatatcaataacatgttttgttgatgtcctgttttattcagatcacagactcatttttattgagtctttattgttaaacatgtcatcagtagaaaattactctaatttattttgccctaaattattcactattcatattgcttagaatttttgttttaattctactactcattgaacttttaaccttttattcacaaagtttttttagaattttattttctttttttacttataatcccatgacagttaaggatttatatataaatttttaatttttgttttttacttcaatatgaaattgtttcatttataggaaaatttaaactttttatagtatagttatgcttggtctactctcaaaagtttttgccttgttttgcttatgtagatcattttgtcttccttttacttctgcagtgacattgttgtacaaccattatcattatctatgcaactttttcatcatctcaaatggaatctctgtacccattaaacaataacccctcattctgcctatccccagctcctggtacctcatataagtggaatctatatttgtctttttgtatctggcttattttacttttgtatttggcttattttattttatgttttaaaggttcacccatgttgtagcatgtatcagaatttaattccttttgaatgctcaacacccttttctttttttctttgagacagagtcttgctctgtcgccaaggcctgagagcagtggtgtgatcttggctcactgcaacctctgcctcctgggttcaagttcaatcctgctgggattacaggcgtgagccatcgcgtccggcctccttttcttgcatgtatatacaacataccacattttgtttctgcatttattggtcagtggccactttcattgtttccaccttttggctgttgtgaatagtgctgctgttaacctgggtgtgtatacatctcttttggagaccctgctttcagttcttttgggtatattcccagaagtggaatttgctggatcatatgataattctgtgtttttttgaggaactgcccattatattttccacagtggctgcaccattttacattcccaccagcaatgcacaaggcttccattttttccatattcttgccaacgacttgtgctttttgggcctcataccttttagttgttccctgtatagtcatccttgaattgaagaaattctggtatattagatttttgttcttagtttgcaggtatttctcattcttcttttcatatgttttcaatggaaaattgaaagttaagtacttcagttttttttttctttcttactgagggtgtccttttacccgctagtttatgggggcatatcagtatatctgggatatactttgtctatattgatgtgacttacaagacagtctactatgcatagattcttcttcatatttaatgtataccttttagtttaaaagatatgatttctcttgaagtagtaaattatttaaatttatgatggcataacattttccacttgaaaccttattatctaaagagagtttataaaatttgatatttaattgttttttaattatttgactttccttgatgcatttctttagaaatgttggtatcaatttgaggacagagatcatcatgtctcttgtactaatgcattgttctttcattatgcctgccactgtgttaggcgtatagtaagcataagaaatacttgacgaggggtttgcgtgttaacgttccaaattggaacaattaggcactagaaactaggaggaaattatggttcatttaccttttatattctattgtttgtatttattcattgttaagattcatcatattaaatacttaaaagattattgtatttttaaaatgtaggtggtttatcattcttttgtgctttttaaattatgtcagcaggcattggtaattctcacaggaataaattctgttttgatttgttttcctatttaatgaaaatgataatattttaaactgttctccatggcttttgtatactggcccctaaaattggttgttttcttctgtttcatgttgtgtaaatgttttcagaaggagaaactactcctggtgttgggagcccttggagaaaccatgtgctaccataaaagtagtatcagtttggagcagccagaggtgatgcttgtgcaccacagaatggcctttatcagcatttccctgtttgcagttcgactgctacaaacgcttctccctgttgaaaaggtaaggcaggcaatgctgctcatttgtactttacagactattataaataaatgctctgttgtaaatttcttctgctcttttcatggtgtgaaggtattgtgctttaggccattttcaaaataagtgtaacaggttatatgggaaatgtagaaattgagaaatggctaacattttgaacaattttgacaaatcatttgatgggaaattattttttaatcgtgctgttgcttttattgcatatgttttattgcagtctgtacgtttgtttattccttgttcattcagtgaataatttattgattgcttacagtggactaacagtattacttgctggatgtaaaactgaataggttagaattagtccctggcctcatggaacttagttttgtaaaagacaagacttggctgttatctatacatatacatatacatatacatatacatatacatatacatatacatatacatatacatctacatctacatctacgtatacatatacatatacatgtatatgtttgacttctttggtttctttaataactttgggatcacttgagggaagagattatgtcttaatatacgaatacatttttccatacatatatacatatataattggtacacttgtatcttttaattgattggagggcattgaaagcctactgatcttatctctgcagtgtgtgtcttggttcttatcattaatatcaagagtagcctttccttctcttcagctaggtacgtgttgtcagagttctttacttattcactatttcccaggttccttgacacacagaatacaaacaatagtttccattgctgctccagaaattattttatagttagcatatcttaatgtcatggaaccttttctttttcttgttttatctattcaaaatactgttagcagtgctttagtttctaagtattggtcaagttggtttctgaggactgtcctatttcttgtatttgttgtactttatgtatattgctggtgtgttgcatattttagtaacttaagggattttttttttttttggtcccatgcatttctcttgaaggtatcccactatttcctttctgtcagcaacttaattgcttaatatttttattttagcacctgatcaaaagaatttcagaagtcatctttggtaggattaaatatcctgatttttatttgattcatctagttaatatttggtaacttgttttatgtctaaaccatatttgtagtttgagttacgtaatatatgatttcataccttagtatgtcttttgaaagttgtttttttaattaacgtgttgctttaggtgtctttcacaaagctgcttttctgcccatgatagcaataaactatcttctgtgctagtctttattctagtacttttctttttcctacttttctattttacctagacctttcttttcttaagctttggtgttttcagtttttaacttttattcagaaaataaaatgttcatttaaaaaacattttgatgtacaaagaagaataaaaattcatttataatttcaagttagttttgaggcttttttcttttctgctttaagtccaattgacagcgtctataaaagttatttattctttttttttttttttttttttggttttggttttgtttttgagacggagtctcactctgtcacccaggctggagtgcagtggcactttcttggctcactgcagcctccacctcccaggttcaagtgattctccttcctcagcctcccaagtagctgggattataggtgtgagccaccacacccagctaattttcgtattttttttttttagtagagaccagatttcgccatgtttgccaggctgatcttgaactcctgacctcaggtgatgtgcccgcctcggcctcccaaagtgctgggagtactcgcgtgagccactgcacctggcctgtttattctcttttttttttttttaaccatttcttattatctaacatacattttccatttaattaaacacttcataaattttaatgggtactaatattttaccagcaagatgttctatgatttccacaagtattccagaaattaagcttttaggtttctttttttctttttttggtattttgataaataacactatgctgaattgctacttacgcatgtttactcatattttggattcttaaattcctagtggcattactagttcaaaggctgaatgcttaaacatgtttttattataagcataatttaaaaatattatagtttcacgagtttcattgtttttaactaaagaatggataaaaagagtagtacacggaaaagataattgtgagaatatatggccgggaaattactaaaaagaagcactttttgaaagtgcctaaggctggtgtctcttctgtgtgtttgccaattacagtttctgaaattgtgcactgttagtttaactagaacacttaaatttttaaatgatttttaaaatgctatcagaaaaaaacattaattctgtaaaggcttttttttttttttttaaactttcatatacattcagaaaagtacatagttcagtgctttttctactaagtgaatgcatctgtctttaaaaagtgaccacccccataacagaaaatagaatgttaccagcattccaaagaccccttctctgttacctctccctccttctccaagccacactcctttctgacttctgtcactatagatcaattggcctgttttgaatgttgtttaaatgaaattataaagtatgtactctctcaactccttcttgaggttcataactattgttgcctatagcattaatttgttaacttttattacaaaatattccattgtatgaagtctgttaaaagtgattttaatatgtgtaaatatttctttaaaatcttcttactgactgtatttttaaacgtgaggttatctctgaatttgaatgttagtggtaaaaatatctcagatcattcagacatcagtgtttcgtggtgtacttattaccaaaacaaaggagtgacacactaaaatgcaggtatgggagaaattatgaaaactagaaaactattccttatgcctctttgttgcccttagttattaaacatttgcagctttgtttcctagaattctgtagagcatatagtccaaactctattttcttttttttttttttttttttgagttggagtcttgctctgtcaccaggctggagttcagtggcgtgatctccgctcactgcaacctccgcctcctgggttcaagccattctcctgcctcagcctcccgagtagctgggattgcaggtgtgccccaccatgcccggctaatttttgtatttttagtagagatggtgtttcaccatgttagccaggatggtctcgatctcttgacctcttgttttgcctgccttggcctcccaatgtgctgggattataggcatgagccaccgcgcctggcccaaactccattttctaagtatcacttatatacacaatgtattatcaggtgatccaggaaaacggataaaacactgcattttaaatatagtattttgctttaaggaaaataacatcacttgtgttacttttaatttttaacttgtattcactagtcattatgtttctgaagtccttttctgttttgaagagtgacaatttttcaaggcataagcatcaagaatggaagaattccagtctcttaagaaaggaattgaatttaaaatatgggtgtcttccttaatattatataaatgaaaaattagtggtgctacaattgcttgctattaagtattgcaaatggtcaatctatctatgggtcgaagtattgatggaaaacttatcctatcagttgcatcatgtagtttttgattgtattttttcatctatgtgcttatttggacaggaaccaaaaagaaatcagtaatttattttacttagtgccagaataatgtaaagttaattttccatgcttttttttttaaaggtagttattgttttattgtttccgtttttaaaaacaaatcaattatctaatttttggtagttattttaaatatataacttggaactttattaaaacaattttgatcattgtgggagattgtaattaaggtatttgtttttagatgattatatttgttttgattaattgactaagtactttaaaatgagatctaaacaaaaatgctatttcattgatgttaaatttcttctttggtttatataaatgtaaggttatgctgccctctgtctgttgctagcccactaataattgaagtagaatttggactctgaaactttttgcctttaaagtggtttttttgagttgccactgaccaagtaggtagtttggatgttggaaaataaatatgaatctatgtagagatttcctaagtttaacaaaatgtcctctgatgcctgttttgaaactgatatttgttgatattaaatgattttggagaatactcatgtataggttaaaatgatacgttggtaatcttctgaaaaatattgtggttgagtaaactaaattggtaaaacaaatgaaggtaatttcatttggggaaacatctgggaagtaagagctaaaagtactagccctgttctggaagcagaagcacagagcattctaggaactgctgttactcttagctagtgatgcttaccaaggctaaggaagaatttgtaacacaaggtctttagcttttcagggaggtatataaaaagatctaatgacctggtgaagccagttgagtgactgagagcagtgcttttcaaacggtaatgttcaaacagatcacttagagatattgttaatcacatcttgcatattctgattcatcaggtaaagggtagggcctgagagccggcatttctaacagactcatagaattatgccatggctgctgagtggctagtttacaggaaacatttatagcccctcctcccaatgcacatgaggtgatgttgctgattattttttatctaatggggtgatggatttgcactgaaacatcttcacttttagttctgatggcatgtgactaatgcttatatatgcaggacagctatcttagattaggggtgtaaattgtgattagtccattgggccatgtaaagattagctaatgacattagcatggggctttgagttgttgagatagcaagagtttcaaatacaagtacgcagggtgaaacattggaattcctttgtggtgaagcgagaaaaggaaattaatatttattgagtgctatatgccatatgctctgcttaatgcttgtttaattctcacagcagctgttatttttctgactagagtcagagagaactctcttaaactagaacacagtgcctttagagttagatccattaggatttactctcttagcacagtgtaaatcgcctttgctaatttctctttatcttcctaactcttcaggagtggaaccccaggactgacagtagccctcatgaaatatatcccatttgtgattgttaaatgccatctatttgttgatgcctgccaaatttatacttccagaccagacatataacctgaactctgaacttacctgtatccagtgtcctttttgatgtcttcacttgggtgacaataaatgtctccaactgaacatgtcccaaacttcattctttgtttccccttccaaatatgttcttcctatagtcttgcctgtctcggtaaatgtcaactttgttgttcaagttgatcgttgatcaggcaaaaaccttagagtcagccttgattcctttcttttgctcatatgtggatataatccctgagcaaaatttgtcatttctcccttgaatacctatacagaatctgaatacctgagttaagcccaccattctgtcctgcctggattactgcagtaaagtcctctgtctcttagcttccacttttgcacattaccatcagttctctacagaccaattttgatacttgtttaaaatgttccagtggctttcagcagaggacaattccttatgacgacccaaagccttaactgatctggcccaccactcctttctgactccatccctcagaaccagctccactggctttcttgctaccaaataatagtttttgtaattgctcttccctcttctataaatgctttccctcagatagccacgtggctcctgacccttccagggttctacttaaatgtcatcttattagcgaggccttcctctactactttggagaagtagcagttccctgcctccactccccattacttctctgttcctcttcatctttcctatcctgttttaaaacactttttagccacacctaacatcttaggaagtatatcgatttacactctactttcttcagtgggatgtgagcttcatgcgggcagaggttgtattttgctctctgctgggttcccaggactggagaggtacctggcatatagtggaggaacatagtaaggcctaattaatattcaccgagtgagtgaataataggtgagcagataattgagtttctctttttcctcccccgcccacaaaaaaaaggaaagttcttcacagaataatgaaatttctctttactttctaatagctgctgttttactaatctggaggtttgtcatgtctgtgtaatctaaaattttgatttctgtagtttctgatcttcatttagcaactatattcatttaaaggtatcgttgtttagctgattcagctcttagactttcaggtagttaatgattatccttgaaataggttatccatgaaataaatcatgaccaaacccacttttgtaaagacagcatttcagccgtaatagtgagtcttgtcaagagattttctctgaacgtcaaatttttagtcctttttattcctttaattgatatttagaatcctgtcacaaaactagaaccatttttttaaaaaccataattctttcagttttaaatctattgatttaaggttataatgtgtataatatttcatttgggcatattgattttatactaattaaggggctatcttctgtattttagaactatttaaaatattatattggatttccactatcccctctaaaagacaaaaccaaagaaaaaaattcgtttctgttcaaatcaatctatagctatacttgatttcgtgttattaatatgtcattaataagctctgtcatgttcagctatgggatggggaagtgttcttgtcttcagtttatcaggttattggggagatttgcgtacatgtacagaaaatacttagagaaaaaggcctcatgccttagttcaatagcagaggtatatacaaggtgcagggctcaaggagagaagaagttggtttggggaagaagaaagtagttagtatcttaggctttgagaaagagttgatatttggacttgagacattttgtattgaaaaaagacagagatagaggtagatgatgtgttgggaaatgggattttctttggaaaaagtttcagttttttgacaaagaattgctaaaaaggaagttggattagattaagactatagcccactatgtttctctaaaataagttttttttaaacaaagttttaatttttttgtttttttaattcaccaaggcaagcgagtttttatcagagcctatgtcaacagcattatttctcctttctttggacatgcctatttctttggaatatccaaatattcatgaagctgttgtggcctatttggaacagctgaattctgaaaactacagtatttataaacgaactgcagaggccgtttattcaattgaatgcacctgtaacttcctgtctgatattgggaaagaggtaaaaagcttttttaatatctcttttaaatccctttgacatattttgaaaatttaatctatacttttcaaattgatggacatataattaaattgtcacaggtgggatacattattcctgagtgggtcaattatacataacctgttatttaacaggttaaagtaaggatatgatttgtatagaagtaaaacgaagactttaattaatggtgtatattcctaacatcagtgatttacaaaaaagcagtggttattacaaatgtcttaatatttaataatgagtacctctattaagtgacttactgatatgaactgaatgacagttgatgtaaccaaaattataagggctattttagtgcttacttgtagacatatttttgcctcaatattttatagatagttcttacatatatataaaggctgatttttgaaatatattaagtacagtgatgaactacattgtttataatgtattaggatgactttatggcagtgttacagcaataattatgtgtcggtatttatcccttttaaaaatactattagaatattagtatgttatcaatgaaagggttaatgggtcttagagacagacattgatacaagagttgtttattgtttgaaaataaggacatggatcctgaagatcttgaagaattagggataaaattcttactcattttggtgcctacagtagaatctatctgaacctatttattttctttgaattttttttttttttgacagccttctcagttgcctaggctacagccttgatctcttgggctccagcaatccatctgccttggcctcctaagcaactagtactataggcacatgctaccacacctggctaatatttaaattgttttgtagagatgaggtctcactgtgttgcccaggctggtcttgaactcctggcgtcaagctgtcctcccaccttggcctcccaaaatgctaggattaaaggtgttagccaccgtgcctggccttgaacttgatatttatgatttttcttacttaccactgtagtttgttttttttcccctttccttttgccatgttagtaccactgtcttcttgttttctctgtgatagaattttgaattgtgtctttaagttgaagtatttctgtggcttttttttttttttgagacgaaatctcactctgtctcccaggctggagtgcagtggtgcagtcttggcgcactgcaagctccacctcccgcctcagcctctcaagtagctgggattacaggctcgtgccaccacaaccagctaattttttgtatttttagtagagacggggtttcgccatgttggccaggttagtcttgaactcctgacctcaagtgatctgcccgcctcggcctcccgaagtgctgggagccactgggtctggcctctgtggcattttgtgtggtcagttaatcacacatgtgttcaatgtcctgtgtgttcctagtggtcaggctgctacaagaggcaggtttataataaaataaatacattagccctacttttattaggggaggtagagctacaaagaagtaatcaaagaaccaggcaacttgattgtaactttaagcttactcagagttaaataatagaaagtctcatgtggcatttagctagggaattttcctacatttctccacctcggctgacatttttaggttgcttgatgagaaagtggacttaaacaaatgtaaacagtctcatggtctctgaatggtctaatttcttgaagctgcttagttagctgttgagaatatcattgcacatgaacttgacatttattgttccattctgcttcttttgtagggagagaagaatctcttagaattagtggagctggcagaccaagccttgcgtagcttttcctatcatcagcatttcccgctaataaaggaaatcatcagcatttgttcaaagatgtaatattttctttcttaatgtgattacgttattattggacacttagggtgtgtgtaaacttagaaacagtgaaagtgaaactgactgtatatctttgttattattttttagtttaattgcttttatatgtgtctgatttttaaagggtatatgtacagctgcattaggatacttaactgttatattcaagattaaacttcaaaaatgtcatgcctacaatcaaaatgaataatccttggatttttatacatttgtttttggtatccatccagactattcacacacattgtttatttatctttaaagttttaattaataacttaaactgagagttttgtaacttttattactttgtacctttttcttatgtggatttttagaaaagactgtgtattggttaatttattttgaggacatcagcaaatttctatttagaacttagtgtctttattgcttttggaaagaataaattctgtgatgtgataatcattaactgagtaggggattttaaagacattttgggtttttaaaaatactctttaagacagaacctcctctgccctgaaacaaataagtgcttaggtgagtacttgctagtattggttatttttaataagatctcagtttgaggagttggagtaggaagaaatcccttccagtatgctttgcagtcttttgcttactaacttacttgcctcacatgtcttggttgttttaccttttcaccagctggaaatctgctcaggccagtccattactacaaggagaaagtcagaaggtgcttctccatatgttgtctcacccattgccacgagtgaaagctgaaacttaccactgctgtctggaaatcacgaaggtgaggttttgttttttcgtatgttttgtttttgagaacaaatagtagactctcttgttataccttcaaacttaatttacttgaccttttgtatgagatataagaactatatcccataaaagtagatgataattactagtcaattctggaaaatttgtactattaaattctcttaacttagtaagtccagcaattgaattgctttatttgaagttttattaagaattacatttatgttgtattaatgatggaaaaattataaggaaaattgatttccaggtattcaaaagtgatttctatgcccaggaaaccttttaggttgttgtggcctagattttatggttttaattctgttttttttaatgttattttttatttttcttttcttttgaaatatttatttttctgtcttcttaaatgataaaatatttcagcatagaatattaaatatttcaatattgaaaagaacactgtacataggacaatatttaaaagtatatatattactgcgtactcttgaaagtgtccttttgtatttaacactcttgtaagtactatttggttataataagtgtttacattttgccatttttacttctgattcatttttattcaaagaaaaatactagttatagaggaagcttctttgctttctcttctcccaccagcatagcctagccactcttacacagctggtgtatattcttcccatccagttgttgtatattatttataaagctgtatctttatatataaatattatctttaaataatttaaagaattttatatatagcatgattagtatatatagcaggatttgagatttgcctagttcattcaccttaactgctattaagtttgaatatacttccttttattgaatgataaatatttaggttcagtctcctttttattgaagtaagtttttcagtattttcagtgacagtctgtgactgtgtgcatacgtttgaaaatgtcatgatttcactttattttgaatagtaatttggctgcatataaaatacaggttgactgctagtttttattagcactttgccagtattgcttaattcttattcggcttctatcattgttgagaagtctgatatcagttaattatgatttcttttaatttttttctctagtttgttttaaaatattttccttttctgtggtgccctgcggtttcattaaaatatgtctccatgcatacatgattttccatttatcttgcttaggacttttcgctttgaacactccatctgccttcacttctgtataattcttggtcatgcttattttgaatattgcttttctcttatccttgctgttttctccaagtggaactcttattagacctgtgttagaccttcttagtttaccctttgtgtcttttaagccttctttcatattttccacatctttttaggttttatttgggtagaatttctcagtgttatcctttcagtacactaattctttcctcagctttgtctaatttactttttttgatggtgatatgtatatataacataaaatttattttaggccaggtgtggtggctcatgcctgtaatcccagcatttgggaaggccaaagcaggaggatcactggagcccaggagtttgagaccagcctgggcaacatagggaaatcctgtttgtacaagaaaaaaaaaaaaaatagctgggcatggtggcatgtgcctgtagtcccagctacttgggaggctgaggcaggaggattgcttgagactgggaggtcaaggtacagagagctgtgatcatgccactgcactcaagcctaggcaacagagtgagtacttcatttctggaaaaaaaaaaaaaaaaggaaaaaattttaccattttaactatgttctgagtgtacaattcagtggcataagtacattcgtattgttgtaccatcatcaccattacccatctcccaaattgaaactttatagtcattaaacaataactcctcattctccccttctcccagcccctgacagccacctttctactttctgtctctatgaatttgaggtccctaggtaactcatataagtagaatcatacagtgtttgtctttttgttactggcttatttcacttaatataatgttctcaaggctcatccatgttgtaacatgtatcaacatttcattcctttttaagacttaataataatctattgtctgtatatatgaacactccaattctgaaaatccaaaatctaaaaggctccacaatctgacacttttcgagtgccgaaatgacacttaaaggaaatgcacgttggagcatttccagttttgaattttcagattagggatgctcaactggaaagtataatgcaaatattaagaaatccaaataatttcaaaatctgaaacacttctggtcccaagcatttcagataagggacactcatcctatactacattttgtttattcatccgttgataggcatttgggttgtttccatctttttgcaattgtttatatacccagaagtggaattggtagatcacacagtaattctgtgtttaatttttgaggaattgccctactgttttccacagtgactgtactattttatgttcccactggcagtgccaaggattccagtttctcttcatccttggcaatactttttatctggattttttttttttttgagatggagtctcgctgtgtcaccaggctggagtgcagtggcacaatcttggctcacagcaacctctgcctcccgggttcaagtgattctcctgcctcagcctcccaagtagctgggactacaggcgtgcatcaccatgcccagctaagttttgtatttttagtagagatggggtttcaccatgttggccaggatggtctcgatctcttgacctcatgatccacccacctcggcctcccaaagtgctgggattacaaatgtgagccaccgtgtctggccttgtttttttttttttttttttttttttttttaataatagtaaccatcctaatgggtgcaaagtcatttcccatcatagttttttttaaatttatcaagttttgattatcacttatactgtttttcatgtctataccttttctttgctttctttaactgacttgttcttttttcatgtaatctttcattagtttctgttttttttttttttttttcaacttttattttagggttgggggtacatgtgcaggtttgttacatgggtaaattgtgtgctgctggggtttggtgtacaaatgattttgtcagccaggtagtgagcatagtacccaataggtagttttttgatcctcaccctctgatatggtttgtctttgtgtccccacccaaatctcatcttgaattgtaattctgtaatccccacgtgtcgtgggagggacccagtgggaggaggtaattggaatcatgggggcagtttcccccatcctgttcttctaacagtgagtgagttctcatgagatctgatggttttataaacatctggcattgtctctgctggcattctgtctctctcctgccgccctgtgaagaggtgccttctgacatgattatttcctgagacttcctcagccatgcagaactgtgagtcaattaaacttctttccttatgtattacccagtctcgggtatgtccttatagcagtgtgagaataggctaatacgttctcttcccaccttcccttgtgaagtaggccccactgtctgttgttcccatctttgtatccatgtgtatacgcagtgtttagttcccacttctaagtgagaatgtgctgtatttggtttttctgtgttaattcacttaggataatggcctctggttgcatccatgttgctgcaaaagacattattttattcttttttaatggctgagtagttttccatgatgtatatgtaccatagtttctttatccaatccactgttgatgggcatctaggttgatcccatgtctttgctattgtgagtaatgctgcagtgaacatctgggttcatgtgtctttctggtagaaagatttatatttttttgggtctatacccagtaagggattgctaggtcaaatggtagttctgttttaatttctttgagacatctccaaactgttttccacagtgactgaactaatttaaattcccacaagcagtgtatagggcttatagtactgtgttcccttttctctccaaccttgccaacacctgttattcttttactttttaataatagccattctgactggtatgagatgatatctcattgtggttttgatttgaatttttctaatgattagtgatattgagcattttttcatgtgtttgttgaccgtgtgtatgtcttcttttgagaagtgtctgtttatgtcctttgcccatttgtaatggggttatttgttttttacttgttgatttaagttccttatagattctggatattagacctttgtcacatgcatagtttgcaaatattttctcccattctgtaggctttttacttagttgatatttttacttagttgatagtttcttttactgtgcagaaactttttagtttcattaggtcccacttatctatttctgtttttgttgcaattgctttttttggagacttcatcatgaaatattttccaagacctgtgtccagaatggtatttcctagggttgttatagttttaagtcttacatttaagtctaatccattttgagttgatttttatatatggtgaaaggaagggggtccagtttcaatcttttgaatacgcctaaccagttattccagcactgtttactgagtagggagttatttccccgttgtttgttattgttgtcttttcaaagatcagatggttgtaggtgtctggctatatttttgtgttctctaacctgttctagtggcctgtgtatctgtttttgtaccagtaccatgctgttttggttactgtagccccatagtatagtttgaagtcaggcagtctgatgcctccagctttgttctttttgcttaagtttgctttggctattcggtctctttttttggttccatataaattttagaatggttttttctaattctgtgaagaatgacattggtagtttgataagaatagtgttgaatctgtaaattgctttgggaagtatggccattttaacaatattgattcttcctattcataagcagagaatgtttttccatttgtgtcatctctgatatctttctgcagtgttttacaattctcattgtgatttggctctgagcttggatgttattggagtacagaaatgctactgatttttgtacattgattttatatcttggaacttcaccgaagtcatttatcagttctaagaacttttgggcagagaatatggttttttcttttttttttttttttttcaggtatagaatcatctgtgaagagagagagtttaacttcctcttcctatttggatgccttttatttttcttgcctgattgatctggctaggccttccaatagcatattgaatagaagtggtgagagttggcatctttgtcttgttctggttctcaaggggactgtttctagcttttgcttgttcagtatgatactggctgtggctttgtcatggataactcattattttgaggcttcaatgcctagtttgatgagggtttttaacaagaaggaatgttgaattttatcaaaagccttttctgtgtctgttgagatgatcatgtggtttttctttttggttctgtttatgtgatgaatcacatttattgatttgcatatgttgaatcaaccttgcatccagtggataaggcatacttgatcgtggtggattagctttttgctgtcctgctggtttcagtataccaatattttgttgagaatttttacatttatgtccatcagagatattggcctgaagttttctttttttgttgtgtctctgctagggtttggtatcaggatgatgctggcctcatagaatgagttagggaggagtcactcctccttcattttttggaataatttcagtaggattggtaacagttctttttacatttggtagaatttggctgtgagtttgtctggcccagtgtttttttctggttggtaggctttttttattttttaatgactgattcaactttggaggaacacattactgttctgttcatggttttaatttctttctggtccaatcttgggagtttgtatatttccagaaatttatccatttcttctaggctttctatttggtatgcatagagtttttcttaatggtctctgagggtctttctgtggggtcagtgataatgtcacttttgtcatttctgattgtgtttatttggattgtctctttttttctttattaatctagctaatgatatatcaatcttgtatattcttttggagaaccaaaatttggttttgtcgatcttttgtgtgaatttttgtgtctcagtttcattcagttcagccctgattttggttcttctgctagctttcaggttggtttgctcctgcttttctagttcctctaagtgtggtgtcaggttgttagtttgcaatctttctaacttcttcatataggcatttagtgctgtatagtttcctcttaacactgccttagctgtgttctaaagattctgatatattgtgtttctgtttttgttagtttcaaagaattttatgatttctgccttaatttcattctttactcaaaagtcattcaggtgcaggttgtttaagttccctgtaattgtatcatttttgagagatcttcttggtaataatttctatttttattgcactgtggcctgagagtgtggttggtatgatttcggttttcttgaatttgttgagaattgctttacagctgagtgtgtggttgatcttagagtgtgtgctgtgtgcagatgagaagaatgtgttttgcttttgttgagtggagtactctgtagagtctcctaggtccatttggtcaggtgtcgagtttaggtcccaactatttttgttagttttctgcctcagtgatttgtctaacactgtcagtggggtgttgaagtctcccactattattttgtggttgtctaaaactctgtaggtctctaagaacttgttttatgactgggtgctccaatgctgggtgcattatatttaggatagttaaatcttcttgttgaattgaaccctttatcattatgtaatgcctttctttatccttttgatcattgttggtttaaagtctgttttgtctgaaataagaagagcaactcctgctctttttttgttttctgtttgctggatagatctttatctccattctattactttgagcatgtgggtgtcactgcatgtgagttgggtctcttgacagcatatagttgggtcttggttctttatccagcttgccactctgtgctttttaagtggggtgtttagcccgtttatgttcaaggtcagtattgatatgtgaggatttgattctgtcgccatgttgctagctggttgttacgtagacttgattgtatagttgcatcatagtgtcagtgggagatgtattttagtgtgtttttgtggaggcaggtaatggtcttttgcttccttttttagcactccattgaggaccccttgtaagtcaggtctcatggtaatgaattccctgagcgtttgcttctctgaaaataattttgtttttcctttgcttatgaagcttagcttggctggatatgaaatacttggtttgaatttctttaagcatgctgattataggtccccaatcttttctggcttgtaaggtttctgctgaaaggtctgctgttagcctgatggagttctttttatatgtgacctgctctttctttctagcttccttttaagattttttctttcctgttgaccttggagaatctgatgactatgtgtcttgggggtggtcatcttgaatagtatctcactggggttctctgagtttcctgaatttgcttattgacctgcctagtgaggttggagaaattttcgtggaaaatatccacaaatatgccttccaagttgcttgctctctctccttctctttctggaatgctgatgggtgttaggttcgttttgtttacataatcccatatttcttgaagtttttttttttaattcttttttctttatttctgtttgcctgtgatgattcaaaggagtagtctttgagctctgagatttttttcctcagttatgttattaatgcttccaattgcattatgaaattcctatcatgaaatttttgtttccagaagttcagttttgttcttacttaaaatgtttgtgtcagatccaatcatggatcaaaccaccattttactggtttccatgggtggggcttcagccttcttctatatcttgtcgagcttccttgccttccagcttctgaattctgtcattttagccatttcagtttggttaagaacgattgctggggagctagtgtggttatttgaaaataagaagacattctggcttttagaattgccagaattcttacactgtttttttcttacctgtgtgggcagatgttcctttaatctttgaagttgctgtactttggatggggccttttgcttttatattatttgatgccattgaggattttactgtggtataagttgggattagtcaattggcttggtttctgtgtgctttcagggccagagctcagctcagcacccctgggctgtgtgctctaaccctgggggtgcactgaacaggccagtggctttgatttctggtcccttgaggtcaagcatctgctgcactggaggagccgagatgttcccagactgctggcaacaactttccgatggtgactgcccgagaaagtgctctgggggggcgtggggcggtgctttgggagagtgcacttgtggtgggggtaaccatgggcaagtgcgcactggcaggggaggctgcaggcaagtgcacaccagtaggtattggctgtgggtgggtgtgtgcttgcaaaagcgctctgacaggaaggcagaggctgttggcaaaagacctatggggtggctgttggggagcatttcggcagggcagctgaggctgtgttgcaagctagtgagacagacaggaccctttgagaggctggcagacagggtggcattcagatcaggttggcccagtcttgtgggaaagatagccctgctctttctacttctggcagcgaactaaggctaaagccacctagaggagtatatcaagatttgggtgatgggcacctatcagggaacctgccccaatagtcacgtagtttcttttctgttttccctaagtgtcggctgggttgggaaataaagggacagagtacaaaagagggaaattttaaagctgggcgtccgggggagacatcacatgtcggtgggttccgtgatgtcccacaagctgcaaaaccagcaagtttttattagggactttcaaaaggggagggagtgtacaaatagggtgtgggtcacaaaaatcacgtgcttcacaaggtaatagaatatcacaaggcaaatggaggcagggcgagatcataggaccgcaggaccgcaggcaaaattaaaattgctaatgaagttttgggcaccattgtcattgataacatcttatcagtagacagggtttgagagcaaccggtctgaccaaaatttattagatgggaatttcctcttcctagtaagcctgggagcgctatgggagactggggcttatttcacccctacagtctcgaccatagaagacggccacacccaagggggccattttagagacccaccttcaagggcacattctctttctcagggatgttccttgctgagaaaaagaattcagtgatatttctcccattagcttttgaaagaagagaaatatggctctgttccacccggctcaccggcagtcagagtttaaggtgatctctcttgttccctgaacgttgctgttattctgttcttttttcaaggatcccagatttcatattgttcaaacacacatgctctacaatttgtgcagttaacgcaatcatcacagggtcctgaggcgacatacatcctcctcagcttacgagatgacaggattaagagattaaagtaaagacaggcataggaaatcacaagcgtatttattggggaagtgataagtgtccatgaaatcttcacaatttatgtttagagattgcagtaaagacaggcataagaaattataaaagtattaatttggagaactaataaatgtccatgaaatcttcacaatccacattcttctcccatggcttcagccggtccctccgttcggggtccctgacttcccgcaacaggcacctatggccatgccccattgcagccattactgcgccagaccctctgggctctgtgcagactggcattctgtctctggcaactcattgggcagttctcccttgcaactcaaaggtctgtgcaggtcatggggtctcccatagttaggatcctagaggatcgttgcaagagtgggctgctccatgcctgttgcacttgccacttccctaagagctgctcaaggccaggaacaagtcctctagtttcttcttttgtgttgttgtgaattttaaacatatttattttataatcttgtttagattatggtattagaatcctcccacttgttatggctattgaatcttccttatgttgtttattttagcagatactgttattttgattttcaggtcttctttggcagggtagctttttcttgtgatcttgtattctctagatggtggttgtatatttgtttctgccttgcctttagggatttgacagttagtggtgatgcaccttggaaggggtttgtaatgaagttacattttcatttgtgtatgttgaaataataaaaagaatcagaggaggaaagattgaagatagtgggtagcaagtagctaattaaaagaagctagtgcctttgaaagttgaaggcggtgggaccttgaacatgatggctaattggggttaggtgggcttagatatcacaggaagttgcaggagcctccttctattgagtctgtattttctttgagattgaaagtgagatgttgaatgtgtgaaatgactaatatgagtagatatttgataatatcaaatagtagcatttttgggctgcatgaagagcttagtcaattgtgtctataatcttaatagggagactcttctactttgcatgtttatctttggctagctggtgtggtttctgggaatgtgaaccttgcgatcaatcaagggttgagttatttcattgctgtcggggaggagggaatgcctgtggtgcaagtgagctgagtagttgaaatgacatgtcgactgtagaaccaaaggctgtaaagactacagggaagaaagtagaagggtttatggactggaggtcaaagaaggaccatatttcaagttgagtaagaagattagaaacctacatttatgattttagaggtagaacaagtgaaaagagaaggggtcctcagttatagggcaggtgagtatcattgagataaataggtcaagaaactaagatcactgtatttgggatagttattataccccgaaatttaaaatggtggaatacgatttgatatctttcttgaggcagattttaaataattattggaaataaaaatttttgcagataggaaaatatttggtgtaaattgagttattgatgtatatgatcattttggtatatgatgaatttcaagtaggaataatctggatgttaattttttagaggagttctaaaaaattaacatccagataatttttcctgtcatagaatgataggaaaaaaggaatgtcagaaataaatatgtatgtgtcagtttcgaatttgtttttaaaaaaaatgcactgaattttagtaattttgaaaattctaaattttaatatactatagtttttataaccaagtgtcatacattttgttgcaaaatttaaactgaaagaatattttttgttaaaactcgccttattatcctagttgtagaaggagataaaataaaagaatgtgaactttcatttaatgttttattttcttgttaactatttggaaatttatattagttgacactgttcttgcaaaatattgtgatttttcttttgtcacaaaagataatcatctgtatagtgcaatgtggttttaaaaaattcatgtgtatttactatcagggagttataataatccaagtcaaaagctccaaatgatgagatttcttgtagttagcccctgtgtcataaagatatagtatcttggtttggatataaggatttgtaaaggcatttcactttaattggctatgtctgtcagatgatattattccagtgtcttctggtaaatctccaaggcattgctgcagctttacctacctaaatgtaggagcgtgctagtaatgtggaggttactttttctgaagaggcaagttagctttttattgtaagacttaactttgaggacggtatggtaaagaggtaaaatagcttttaaatttagggatgattaaatggccaccacttccatgttacctacatctaacattcatttagcaatatttactggacactttaccatatgctagactgtagtgatataaagtacagaaaagagccttatcagagagcttatattctgataggggacagagagagatgtatgtaataattaagaaaaattccttaaatacataaaaagtatgtatgtgtatgtgtgtgtgtatatatgtatatatagttttctttataacactatatgtatagaatatgtatatatatatatagtttacaacactgcatatacattcaatgtatatagtgttttaaataaaatagtgttgtaaagacaatgaaaggataaaggactagagaatgactagtaacgtggactaaatttatgtaggctggctagggagggagggagaatttctagcccgaggaaacaacaggtgaaaagcctctgcttttcaggtgagaatgtactttgcgtgtttcacgaacaaaaagaagggcagtataatgagataatagaaaaatggtaccagattgggtctgaaaagtaggcagggtgccaaacattataaagctatgaattgtattctaagtacagtgagatgctatgaatgattttaacgtgatctgatgatctttctgaaaagatcactctcccattgtggggaatggattgtagggggtcaggatggaagcaagaagaccagtttcattgtagtagccctgatgagatgtggtggtgtagtggagatgaagagaaggaaatgaatttaggaggtattacggacgtggagctaattggtcttgctgataatgagagtaggagatagagagtgatcaaggatgaattttaaggttttggatctagcagttggattgatgtcccaaatatgggattgtggattgggtagaattctgttttgaacctaagtttgacatgcctttttatatcaagtgcatatgttaagtagactgttaaatataataatgctaatgctaataatttcattgataatgatagcagctaacatttattgagcatttactcttatgtatcaagtacttttataagtatattatctcattgaatcctcctaacagctctgtgagctaggtactacctctttctgaaaacggagatactttgaatttgtccaaggtcattcaactaaaagtggtgaaactgggctttgaaccctataggctcactccaaagcccatattcttaagcattgcaccacactacctttggagtgtggagcccagattaggtataaaattttcagtcatcagcttagagatgatattaaagccacaagccttgataggatcaactactgagagactagggaagagaaggctgtctaggatctaaccagttagaagttgggaacagagggagccagaagtggagacagaggttagaaggaagagtcacatgagaacagagatgaacacgttggatttggcatcgttgaggttgttggtgtcctctatgagaagctcctgtggaatggtaggaacctaagtcctgctgatgtgcattgaagagggtttggcaaatgaggaagtactgactgaggacagcgaactcttgtgaggactcgtggtgggaaggagagctgaaaaatgaattgttatcaagaggagaaagccagggccatagacacattagaatatgtcatatggtgattagaataatcatgtgaagaaaaataaaggtgctggagaaaaataagacaattttaggaagtaaatcttggtttcagaaggggatagtcacagtttagatggtagataagtatcttaaggaagtaggtgacagctattgtttagggctgaggctttagatctttgaaaaccttgtaatatgaacgaagttgctgtctgtggcatgaagttaacagttgaaagaaaaataatgtatgcaaatacatatgtgagtgtatgtgtgtaactttttgacctttgaattgttgataataggaagtagaaatttgcagaatgaaaaaaagtagtattcatgtaactcattatttattgtatttttaccttctatattgtatttaaattccattaatatttcaagtagctttttttcccctctcaccttaaatagctgctaacaaaatactattctctatcacatattgagaaaaaaattcctgatagttactctaagtgttggttcaaagtaattgtattttaggtacatagctgtattgatgataactttatataatcatatatatatcacatatataggacataaatatgtagcataaaaaattatatataataggtatattatatataaaatatgtattctttatattctatatatatagaatataaatatatatagtatataaagttatgtctcccataacttgaagtccttgaagtcttttcatgttgaatttttctttcccaacctttgtaagtaaaatgcaaacaccttaggataagtttcttactgtgtttatgtcctttgtgtctgtcatgatgaattaactttaagagattatggttgtctcagccgtttgtttacttaatttatcatgattatgcttgtggcagaaagtaatataatatgtatctcctacaaactaagaaactgttagacaggagaatctttttcattctgtcttgttaaaaaaagtttcaatgaagtaaaaactaaaatagaaatgggattgtaaacagaagaaagatggatcttttggaaaaatcagtgttgctaatttaaaaatactttttaatattattttacaggaatgtttaggtgtccataatgtcactaaacccgtgtcttcactttgcaatggaattcattttctacttcatccaaaagttctgtatgaaatctctgtatttggcattcaagagcccgaaagtgaggtatgacattaaacatgagtgaaaatattacagtaacttagatactcagctaaatcaaggtgatattctaatatagtttagatagcatggtgagaaactaaaaagaaacctgtctttggtgcattggttcagttgaagtgttatttaaataaaaataaatgttacataaaatgtgggaataaaaatacaggacacacttgatttcaaaaaattcagatcagtttacttacatttttcatctaagatgtagagaactatacagtacaggtagtaagcagattatttcagttagggaaatttttactcaagggacaaatgtacattaaaggtaaaaaattagaaatattaaggaagaaaaacagaacagaatgtaagatgatgctgtggaagtacgaacatttgaaagaaagagatgttaattatagcatctttccacatgctataaaatgttccaggtgtgtcaggtgacctagcgggacatctcatttgactggtttatcgggtctgtgttgttgagcaggtgaacactgctgccaaggccattctgttatacctgcttcagggacgattgatgatgacagcattgacctggaacaagtttattgaatctctctgtcctgtcatcccaatactacaggtattctgtgaaattcactttttatgataccatttatctttggctgggtgtgattgatttaaatgcatgcaaacagctaaactgtcaagttgtgagagaaatgaagagaagctgtgaaggcgctggggataagtgaacaggaagtgggtggctgtcttgtttctggcagaaagttaaaccaggatagctaatttgtctgtatatattttatatatctgggtgggaggttaaaaagtgaggtgcattcacagcattgactgtgaaaaatagaactcaaccttatataaaggcttttaggcagagctaacagtgctttttaaggagaccttacataactaacttgcctcatgagttctatccatgcatatgtatgattagagtgataccgtaattaacatgctcctagaaacagcttttttttttttttttaaaaaagcaatccttctggacattaaaggagtcagtttcctgtctcttttggatgaaaaggtggagttcagaaatgccatcataagcacagtcctcttttagaagagagagcctgggccttgtgccttgagactcacagattccatgcgtgtagcatttagagcactccatcttcttagggtggggatgggctgaggatctgtgaggtgcttcaccgaggggaggtgccactattagaatcttagaaaatagaaaaatcagcaagtgtcaagaaggttggcatgttttcctgaagttctcctgtatgtatgtgtattttcttttaaatacagttttatttaggctccttggctcatagaagttattttaaaaaataatgattttattcaactgaatccaaagacatttatgagttgctgataggacaatacaattcttattttcaagttgaaaagttatgtatacaattagacaataatttctctttaaaaacaaatctattagggctatgccgacacagaagatcctctgggtaactgcattctccttctaagcaaagcaagttctgacacagaagagatgcttccgtgtactacccgattaaagtccatgctgcgacttttgctagtgaaaaagccatcgtgagtacaacgtaatcttgtgaacgtcaaagattgatggaaacatgctaagaaagtatagtaactatatataatttgaaacaaaactaaagaatttttaaggagggtgttattccattactagaggaaaccaatgcgtgaaactaagcagatacaaggtcttgtatgtacttgctgacgtttcatccactttacagccaagttattccttgccagatcagcctgtgttacaggactgctactaagtgccgctcagtagtgccctaggcaagttggagagccatggagataaatagatggtaaaaattatagtgcattcccatcttctctttagaaattgttagccttccagagtgatccttttgtaaacatctgttctgaatattcagtttttcataagtatagtaggccagttgtctcaaataccagagttatgcaggtattttaatcccatatagctgtgttcttacttggggaactgaaaacatatcctttctttgactgccattaatataagcattgttttaattaatgaaaagaaggagaatgatactgtttttcttccttctctgtcattgcaacatgaatcttttctattattatttttaggtaacagtggttagattttcccttactgaaaaaagaaaaaaatgctgagtcgagatggataagcagggataaagaggaatagttggttgaaaaggctaggaagaatggacagacattcttttcacaatggataatttgtgtttcccaaaccttacatcaggaaaatacagcagcttatttatagacagatcattggactgaaagataaggaaataggtggaagttaactaaactattaagagaatggaaggaggaaaattatagtctttaaaatatctctgtattgtagagagtaatgttatgggtgatccaggaagaagtagggcagagggagttaacgtgcttgtgttctcaggggttgtcttctacacatgcagaaaagctgttccctgttaattaacatgctagtgtggtactccttacttgaacaaacccccagtttggagaattaacacaatagggggcatttcttgtttgtttttcgggcccaaggtcctcagtttaataaagacattctaaggcaggacacccccaggagcatagtgcaaggaaaggccagatctttctttgggtaagataagtctctattatatagaatttgaaacaattcaaatgacatatttgttttccttattgtattaattctaccccatcccatcaacccatccataaactccatgtagacaggaaccctgtccgttggctaatctttatattctcagaacttcatagcgtaccttatacataaatacacagtcatgcgttgcttaatgacatggatgcatcctgagaaatgctttgttaggtgattttgtccttgtgtgaacatcatagaatgtaccttacacaaacctaagcaataataacttaactacatacataacctaggctatatcctatagcctattgcttctaggctacaaacctgtacagcatgttactgtactgaataccatatgcagttgtaacacagtggcatttgtgtatctaaacatagaaaaggtttagaaaaatatagtaatataatcctatgacaccactgttgcatatgtgatctactgttgactgtaacattgttatgcagtacatgactgtactcaaaagttttaaagaatgacatacatgtataggaataactggattctggcatcctatgctaaacctaaaaagatgctaaatgtatataccagagaacaagatgcataaatacatgctttacatatctcatctctagccacctttgctaggggttatacctgtctctcaactgacaaccccagatgtgaatacagatatcattggcttagaatgtaaggaacaaaggaaaactattaggtaggtgtttagcctttctaagctctcttgaggtaactcaggaaatggagagggagaaagtttgcctgacttattagtcctctggagatgatatcagttaacaatattgcagtaaatatctactttgtgtttgattcaggaagtatttattgggtgtcttactatgtatctatgagctgtgggaacgtagcagcacacaacacagacatgggccctgccctttcagcatttagtgtgtaaccgggaatatagctcttattatcaattattctttattattaattgtcataaagtgagataaaagttatgatacaggggctcaaggtggcaggcctgcatacagaaggcaacctgctctagtctgtagtaggagggccaccctaatgatgcatgttttaattgttgtcttataggtagttcttaaaacctggcaacttgtattattgcttaaaatttgtccagtttccaggtagttcaagaacctatcagaggagtgacagatacatggttgtctcaatatctgccgcctcagtgacctttgtccactcagtggtttttctgtttctctatttcattgtttagtggcatacagtatttactcttttcttgaaaggtctcccacctccccactcagctgaccttattcctaatcccttccagataaggaaaaagtatttgtattttcatatttgacaggaatctgtttggcccctaatatgagaagattttgatacattgtagtgttatcacacttccattatgagcgtcattactctcctgtgggttcaacttaacatttggactgtggtcagcggtctgtgatactttttatggtggagaatagttcactagatttgaagacaggagttattgatttaattcgcagatgtacttattgaagtttactgatatttaatctcagtgagtctgtctcatttgtagttattattttttgtttctgatgtttattttataactattacattgaataaatcattataattatatatcgaagaatttttagtagaaaaagtaaattattactagtaatggcagtataattgtgactacttattgtactttgttgatatataattacttgtaattacaagcccttttaaaatagacatttgcatatcacgaaagttcgacttaagtactttgtgttctcagggtccgttcgctagcattaaagcttttagcattccatcttaccagtgaagaaggggctgatacaaagcgtcctctaatagacgccagagttctctccagagttactgatttattcattgggaagaaacctattgaactcagactggatgacagaagagagctggttattaaggtgactataaattttgagtttattactgtgtggtaatttgatacatttttatatcatgtattttatgtgacattcttcagtttgtgtatgtcctggggagggagagaagtatggggattcagggctggtttgaaattgtgttctggctttatctggcttctagatacgttgatttattgcagtggtcccaacctttttggcactagggaccagtttcacaggacaatttttccatggatcagggcaggagtattgttttgggatgattcaagtgcattatatttattgtatactttatttctattgttattacattgtaatatataatgaaataattgtacaactcaccataatgtagaatcagtgggagctctgaacttgtttttctgcaactagacagtcccatgtgggggtaatgggagacagtgacagatcatcagacattagttaaattctcttaaggagcagccagccaagatccctcacacacctagctcacaatacggtttgcactcctatgagaactgaatgccgccactgatctgacaggaggtggagctcagatggtaatggcagcaatgggcagcggctgtaaatacattttcctgtctttagctaggactgtacctatagcatactggactgatggagaattctataaagaaagctgtccactagtccactgttttcatggattcattcctgtgttttgtactttctcatttcactcaagtttgcaatctgtctgttttattttagactaacttgccaaggcctgtagtagtatggtagagccacatgtaatacagtcggtttttttgtttgtttgtttgctttttaatggggaaacacattatgttcttctaaactgaatgttcagggctttatgacagtgctggcagggggattggagagtcttcactggccacataccaggtctggttgggacttccctgagtactaagccattggtagtcactcctgtgccctgatgtatggaggaaggcggggagagggcattctaatacgtcttctgtgagtccatgttaggactggaagatagcagtgagtgggagaaaggagcttcatctttgttattttcttgtccctttttcctgatgctggttttgccacctcagattctgttctagcatgaagtgacagtaagggacttgtctggggggtagctttgaaggggtgctggacagcaagtcccagagtgctgtttgctctggggtcttctaaaagaaagaatggagaggcccacgggaataccagctggtggcttctgggagcaacagggaaatcttgagtcataggtctgggtcgcttttctcaggttagcctggtactacctgtaaagatgttagggaacatggttgttttctgttacctttgtaaggttgctaatggattaatgggttatgaataacttcctagcaaaaatgtatattaagaagagaggggccgggcacagtggctcttgcctgtaatcccagcactatgggaggctgagatgggtggaccacttgagcccagcctaggcaatatggtgaaaccctgtctctactaaaaatacaaaaaattagctggggttggtggtgcatgcctgtagtcccagcaacttgggaggctgaggtaggagaatcacctgagcccaggaagtcgagtctgcagtgagctgagattgcaccactttactccagcctgggtgaccagagtgagaccctgtctcaaaaaacaaaaaaaaaaaaggaaaacttatttgacatgatgactctttattttagatcttaagttccttcctgacctactgcatcattgttgcaaattttatttatttatgtatttattttaaacttttatttcagtttcaggggtacctgtgcgggtttgttatataggtaaactcgtgtcatgggggtttgttgtacagattatttcgtcaccctggtactaagcctagtacccgatagttatttttcagatcctctcccgcctcctaccccccaccctcaggcaggccccagtgtccgttgttcccctctttgtgtccttgtgttttcatcatttagctcctgcttataagtgagaacatgcagtatttggttttctgttcctgtgttattttgctaaggataatggcctccggcttcatccatgttccctcaaaagacatgatctcgtccttttttagggctgcatggtactctatggtgtatatgtaccacattttctttatccaatctgccattgataggcatgtaggttgattccatgtgtttgctgttgtgaatagtgctgcagtgaacatacacatgcatgtgtctttatggtagaatgatttgtatttgagtatccaacatctataaggaacttaaacagatttacaaaaaaaaaccaaacagctccattaaaaagtggacaaaggacagaacagacatttttcaaaagaagacatacatgtggccaaaaggcatatggaaaagagctcaatatcactgatcattggagaaatgcaaatcaaaactgctacgagggaccatctcacaccagtcagaatggctatttatttattttttttgtgagacagagtttcactcttgttgcccaggttggagtgcagtggtgcgatcttggatcactgccgcctccgcctcctgggttcaagcgattctcctgtctcagcctcccgagtagctgggattacaggtgtgtactaccacacccagctaatttttgtatttttagtagagatggagtttcacaatgttggccttttgtgtttctagtagagatggggtttcaccatgttggccaggcttgtcttgaactcctgacctcagatgatctgcccacctcagcttcccagagtgctgggattataggcgtgagccatcgcacccggccagaatggctattattaaaagtcaaaaaatagcagatactggtgaggttgtggagaaaagggaatacttacacactgttgatgactgtgtaaattagttcaaccattgtgaaaagcagtgtggcaattccttgaagacctaaatacagaactgctacttaacccagcattgtgtgaatttacctgtaattatgttggttatttaaataagttgactttttgagcttttgttcatagggcacaaactataaaatcttattggagaattggaagcagataaatgtaattttggtttttttttttttttggtttgtagttggagactgttgaaaaggtatatgaaatcttcacctcagatgatgttgatctcgttttgagaaagtcagctgctgaacagttagctgtgattatgcaaggtaatgtcttttaagggaaatgattgctgtactgctgataatagaattttagattgccatatggtactggcaggagttggcaactatggtttatgcgccagatccagcctgtggccttttttttgacagccctcaagaatggtttttgcatctttagagttgttaacaaaatccaaccaaaaccaaagaatatgcgagagaccatatgtgtgtgtctagcaaagcctaacaacatgcttactaacctggttctttacagaagaagtttgctaatgccttattattatttgacctgtaaaatgccatttgatagaattatcttctttctaaaatattagtgtacttccaatagtgaagtgcatgttccttcctctgtttactgagtgcatgcatcatattttcaatctgtaccatcttgcttagggaaattaatcaaataatacttttgtggtaggtaaaagaaaaatagtacactgtagctatgccttttctttaaacgtttatttttatttttttaaattatactttaagttctagggtacatgtgcacaatgtgcaggtttgatacataggtatacatgtgccatgttggtttgctgcacccatcaactcatttatattaggtatttctcctaatgctatccctcccccaacccccaactctgtgacaggcccgggagtgtgatgttccccgccctgtgtccaagtgatctcattgttcagttcccacctgtgagtgagaacatgcggtgtttggttttctgtctttgtgatagtttgctgagaatgatggtttccagcttcatccatgtccctgcaaaggatgtgaactcatccttttttatggctgcatagtattccatggtgtataaatgtttatttttaaaaacaactagtgtaatacactgttagctttgtttgtagtgttgttattccataggcttttgttctttgggttagttttgaatttttccccatacgtgatgtatgtactttaatatttatgagaaatgataactttgagtttatgtaaaaagatttttatggttagcacttcttgtcttgacattagtggaaactggaatgagagagttatttgaaaaaacatattccacatatttttagttttaacaacaatcacacagactacagaaaagaagactagaaaatgtggaaagccctggttaaaaaaaagatcaagaaaaactcgttaaagagtattccttcaatattgttaacatttcaaaagtatgccttataattttggtatgcactatattggggggcaatggaaatttttttttttaagtagcagctaaagattgttacaatgatagcttccacttcaatatcagtatgtgagtgtatgtgtttttcctaatgagaatataggagaaaatttgtctgcaagttgttaaatacttgtaacgaatatataatcaattacagttttgggttccggtaacatttgtgtgtgcgtgtgcacatgtctatacatataagatttttttatgtatatacaaaaacttctttattacaaacataatatgtgaatatatgcttattaaaaagaagctcaagttctccagaaatatatagtgtattataatcttgttccttttatatttgctattaatagtttgaggttagagatttttttatagatagaaaaatgttcatgttgtaagtcatattttacacatgagcttgtggagaattataaacatttgaaggtgataaatttggaagagtcaatgaaataatataaagaagataatttgcatgtataaatataagcattcatttgtacacttaaattctcgtagttttcagagtctgaactagttccataattctttttttatagttttgtattttatgtgacagaagtaagatatgctttttacttaaacattttcaaattggacaggtgtacgtaaagtaaaaagttaaaagtttcatactcttatgtcaaccccaggtctaagtatttttaatagtttgaaggttgtgtggatatcagttctgagtatttcaaaatacgtgttttaaactacaaaaaatgtgctttaacttttagtaactttttttatctacagatattaaaatgcatgctgtggtgaaaaagttatgcttaattgacaaaataattgagtatttaaatgaatgtgtgagtcaagatggcaaggtaaggctaatgtgcatctagacattgttttacaggctgttttgattaatcagatctgaaattgaactgagcagaatttggatgagtacttggattttaaattctaagtaacacctcctatctcattcattttttttttttaaattcgaaaagtggagtctctataaaggaaaactaatcctaaaatttccataagataggtgatagaagtatatacgaaacttactttcagtggaaagtaattcctagtatttatttacattttagtttcagataattttgatgaaaacgcataaaatttagagtaagataatattatggtctgtttgatctcacctgataattggtgaaaatgaaaagctgtgtttttcctcctggcccaggttgtagaatgtttggtacaaccatgcctcacactcttgaggaaggttttatgtggtgatccagtcatgcgtgtttcgctctcgcaacagtcttctcttttgaccgtgttattcagaggtaaataaaagaaaatctgctaataattagattgttcttaaattttaagtgtttcttctttaattgtaagtcacatttactttttattttactattagaacaacagcatttattagtgaatacactactaatgtaaatggaaaatgtttaatatttttgtggaaattgctttctaatcctgttgctgagtggaggctagagctgagaaaagctgaaacctctgattgttctttgtgccttgatgtagatgtcatctggtgctcagacagtaaactattatctataaagagagaaagttgcagctgctgttattactatcttctttccaatatctctttcgtctttcttgttttgcttatacctttggatcttggtacattttgtctgattatttcatttgacaggtgttaagagtataggctcaacctgtgtgagtagaaactagaccatcctaaatgactctgagcctaaatttattacattctataaaatgtggtttttaaaaacccattttaatttgattctaatttagtaaggtgttagatgaacacgtttcatgtagttttgtccttcctgtcttctctgtttttttttttttctcaatggagagcttggtaacattttgtactattttttttcttagagacttaggccactgctttttgatattttgcaagagtcatgtagaatcatctgaatgtgctgaagagtcacgtacaagcatctgaatgtgcttcatcttgtctattatcaggcatataggagataagtgagatttatgttcaaaatatgttattataatgtagtcattttattttagcatcttttcctcctgttggcttctgcttgccaagtgagtaagatgcagtttatttaagtagcagccctaaaaccaggtaaagctctaaacagattcagtgtgtttaggctcataacattttgagtggactataacgtttttataagattgtatagactgatcatctgaaagagcagcagttacggatttttagttttctttaatcctgttaataattgtcttcttattaacctcattcacttgaatttagttcctggtttaccttttcatttataattttcatttaaattattcaagcatggaacttattatgaacacctactggattcaaaagcacatttcaaggcaatataatctatacccttttcagtatttcagtttttctatttcattgctgtttgtggaaattactttcaatgagtttgagaatgaatatagtatcctccattaatggatttagtttcaggaaaaattttacttacttacttatttatttattgagaaagaatttcactcttatcacccaggctggagtgcagtggcacaatctcggctcagtgcaacctctgcctcctgggttcaagcatttctcctgcctcagcctcctgagtagctgggattacaggtgcctgccaccatgcctgggtaatttttgtatttttagtagaggctaggtttctccatgttggccaggctggtctcgaactcctgacctcatgtgatccacctgccttggcctcccaaagtgctgggattacagtcgtgagccactgtgcctggccgaaaaattaatttttaaccagctgcttaaccaagaaaacccatttctcagcaaacgtttattaagcacatgctttgtgctaggtgcaatgctaggcccttgggttatattggtgagcatggtaaatgaccctcatggagcttacagtagagttggagacattgacaagtaaatatacagtacaccacagtaatacttgtaattggggattcctggtgccagaggacatgctggtcagattggttggtgaaaagtatcagagattgtttctagggaatgtggcatctaagatggaatttcagaaatgagtaggagttcaaataggcaagattgacttctagatggagccgtggttgtgtgtatgagaaattgatgtgtttgagatggagctggctggatttggggagtgtggagtgaaggggaaatgatgggatgaggcagggagggcagttcgtgcagggcctgggagattttattaaacagcagtgaagagctgtttaaggttgttaaacaggggagtatgtgttttaggaagattatttctgtagcatggatagtggatcaaatgagtacaataaataacttctcagataacactgctttgaattataaactttatgttatgacagaattctatagtgtatttcagggttagaaattaacttagaaatcatttactataccatctgtgtgaggtctagagagatttagcaacttggccaaggctataaccaaaaaatggttattgggttatttactttgctactgagagagaatcgaaacttccttacctttgtttgtttctgttttaaataatcacagacctatacatccccattgtaaaaattcaggcaatatagaactatacaaattctaaaagttttcattttcttctcgttctcaatttccccaaagaagactgttctggttatcattaggaatatatttttccgaatgattttttctacatacacatgtagttttcattctgtatattacagtattgtgttgcttccttttttcaactggaaatgtaacttgaatatctttctatattatttcatgtgagtatacattctttaaaaaaccctaaaaactactgcactggtgttgcagaatttcagtttgctatgttactgggtatttgttttagatttttcaccatgacagtaatcatgttgtgtgatcatctttgtgcattcagtgttggaattcctaggtcaaagagattttataagataatggttaagttcctttccaaatcactctcaccaaaggtgtttaaaaatgcttattttcattacaactttgccaacactgaatatgtctcattaattttttttaatcttataggtaaaaatatataattgttttattttcttattttagttttagtgaagttatcttttcatatatattcaaatttcttcatctatggattacttattttcctgttgtatttactttctttttagtgacttgtagggttttttattataagataggcacaatccttatgcttgattttatgtgattaatattttctctcaacttttctatcctttaaatttatttattattatatttttaaccttaaacttaaatattttatggaaacatatagaacttttctgttatggcagttgggcaattttttatcatgctcttcaagtaggactttctctagttccagattgaaaacacttttcctgtgtttcaagtgttgtttaaaaaaattaaatttgaaatcaggcaaaggcattgctgtaattcttatttatttggaaatattatggttcattctattcatcactgatgtgaaatgtcttttattataagttaatttttacatgttctctgtttctttactttttggtttatggctatttttaatcatgccaattacataaggatgattttcttttcctgcagttaggaaaaatctcttctctcaaaacttcttattgctgcttccctgaatttgctaactgtgtattatgttgttattcctgtgagataacatcgtacttctttgtttagaatttcataggtttcaaggagattgtagcattgggatcattacagaagtgggaactgagacttaatgttaaagaatctcaccagggcatttagctaagtagtaagtggtagagctagtgttaagtctgtccattcagagcacttcccttttccatcatcttgtcataattaaaaggaaccaaaacaatgacacagcccaaggataacattttaaagtcaaatccaagttctgtgatcacatgtttgtagtaaagggcaaaagttataaaataagatctcttggtgaggaaactttagctagaattatctgactcggcataaccttcttagaggctgtatcagtttgtttctctaattacctaagactagacagtgtctagtgagtgtatctacaagtgtggctcctggactggcagcatctgcatcctctgagaacttattagaaattcacattcacaggctccaccctaaacctatccaatcagaaactgttttaaccagccttccaggtgattcttgtacatccacaagtttgagatgaaagcctgtgttttagtgtcaccttatctgggtttatgttgcatttcttttctcttcaaatcaagatattttaaatttgaagttcattctttctagacgtacaaatatttcataaagttgtgcttctttttattcagtttccttaatatttcatgaagattgtagtgtcgtgactgaagttggagcactattttgtcttctattatttgatgaagtatcgagaatggatatgtggtgagatataagaatttataagttttttactcttaactatttatctcaggtatctgatgtaatcttatagcaaggcatggaaatttctgatttacgaagcttatgctgtccatgctacacatatgtggtatgaattttgatttgaataaacagtattcaaaagcctattagctcagaaagtctatctcaaattttatttttaaacattactaaatataaactttaaaattactgcagtaatttttgtctttaatacatttttagtacataccttcaactatgtgtttttttcttaatatttcatgatttttaaaaaacctcggaagatatttaggacgatagtatatgattagcgctgatcttgagcaggatccgtgggaggagacgcacaaagtccacctgctagtcccaccactgcattgtatgaatcatttgttatgtggaatttttttttaaaacataatttactcttcataagcaaatctaggaagtagcaaacatgttgtttctatactaaatgatagactcagttgcactgcttgatttcatttgcagtcaacgaagtgaggtaagttgtatttgttagacaaaacttggtctactcagttgtttctttgtttttgtttttcttttatgaaataggtctgttaatccttccaataaaccttctttgccatcggtcttcagtttgcctgtttccgtttttagaaggtaaaggatttatttctctgattttcttgaaggacgaaatgttgttacagaaagggaaatcaaaatctataatttgtcacaattttcatttagcatttaaatcccataacttgggctttcatggttccttcacaatggtgctttgaagatttcagtaagtatatctccccaccaccaattttttattttgataccgttcaaatttacaggaaagttgaaagctatacggtgcatacttgtatgtcgttcagcctagagtcatcaattatttacatatgagtctctttgctttctctctcctaatatatatttttatttatatttaattctccctcacccaccaattggaaataagtttcagacataaattcactcctttcctatatattccagcatgcacatccttaagttaaggacattattctacataactgctacaatatgatcccatctaacaagattaaaaataattctataacatggtgtggtttctccagttatctccaagtatcttttgtgtatattttttcagaatgcaataaccagttaaggttctgcattgtatttggttttcatgtctctttagacttttgtaaaaagtaaattgtttttattgacatatatcgtacataaagcatacaagtcataagggtacagcccttgaatttttctgagtaaacgtacttatttatctcacacagattgacatagaatattactgacagaccggaaaccctttttgtgctttctcattaccttctaccaccccaaaatgtaatcctattttaatttctattgctgtacattatttttgctagtttttgaactttataaatagagtgcattattatattgctttttgctcaacttggagagatttgtccatgttgctgcatgaagcaatcaatagttggttcatttttattctatgtagtattctgtctaagaatatacaacacttttatttaccattctatttgtggatgtttaatttgttttctgttttgggctattatgaagaaatgactgctaagaacattcttgaacacgtgtcattgttggaatataggatatttatgtttagctttagtagatgttaccagacagtattacgaagttgttgtgctgatttacattcctaccatcagtggaaaagtactagctgccccacatcctcactagcctttggtatttgcattaccagtcttaatggtgtttagtttggctaaataatgaaactcacacgactgcagtagtcatgcttagaatgagatcacatttgtgggtgctgggagctgtcttggcttggaagcctcatgtcccaaatagaaaatatgttctctagtaagtgtgctgtaggcatagtttccaggttgcttataagagccacagcactcaagattgctcagagctgtgacatcccatcatgcatttatagtttattcctagatgtctcagtccagatgtggggagtcattttcatcataagcaaagcagcttagtaaattcttgacattccatatctatctgattttactgggtaaagggacagagagttacctcaatatcatgtttgtccgtaaagaggagaaagggttttattactcttttactcacagtaatgttggcatttaaaaaattgttgcccatctgatggatgtatagtgtatctcaaagtggtcctgatgtattactctttgctttttattattttcttccttctgtgtttttcaaacttaattttctgttcattttctaacttactggaggattggccattgattattagccgccctttcatttaaagctatcaatgtttctaagtatggcttttggtatattccacgaatttgatatgccatattttattatttagttcaaaatattttctaagtgttttgtgatttttttttattgatgcaagggttgtttagagttattgggggtaactagtgaagatttagtttattaggttttctagttattttattattaatatttagctaaatattgacattagaaaatattttctatgattttaattctttagagtttgttgaattttactttatggcccagcatatggtcagctttttaaaatgttccatgtgtacttgaaaataataatgtatatgtagtagttgttggatatactgttctataagtctcaaaatatatcaggtttattgatagtgttcagatcttccctgtgtctactttattatatgtgtgtgaagttctttcaggtagcagagaggcatgttaaaatctccactatgacattgtcattctggctgacaatgtattttgaggccatgtaatttagtttgtaaacatgctggtgggttgtctctatcattatgaaattatttctttatctctagcagtgcttcatcatatagaattcactcgatctcttatgactgtagcttccccagcttttatttggttagtggttagcatgatatgtatttttccatccttgtagttttagctgttctgtgtccttaaatgtactttttttttttaagaagtatatagttgagtttttttgtccaatctgacattatttacagttttaatggaatattttaatgcattttacatttactataattactaatatttttggatacagattattagcttgctattttctatttgtccaatgtggtttttttctttctttttcctctctggcttttcttgattaatttttaaaattagtccatgttttccagctgttaacttgtagttacatatacattaagtattttatttatttatttatttgtagcgattgggatcttgctttgttgcccaggctagtcttgaactcctggcttcaagcaattctcccacctcagcctcccaaaagtgttgggattacaggcatgagtcactgtgcccagctaagtattcttctatatacattatttctatatattttatacagatgattattcttttataatatagagattataatttacttccttgactgtgaactagtatttttaccacatcccagacaatgcaaggaccttagaacacattaattccatttatttgctcttcttttttttttcttttattgtcaggtatttaaattctatacatattttaaattctataagatgttattataattattttatgcagtaaatagtcatttagatttgtataccgtggtcgtttctgttactttttattgcttttttggtttttctgcctccatctgagaatttgtttttttaagagttttttattatttaatgtagtgcacttatattagcaatgatttctgtcaggttttttttttttttaatctaaaaattctttctgttttaaaaaatgttatcactaggtatagaattctaggttggcagttggagtccatttttttgtaggaacattggctgtcagttttattgttgcttctttgaaggaactgtgttccccattctcttaggagttccttcagctatatcccacagcactttgcttgcttgcttatttatttgggggagtttattttatttttatgggtatataatagtacatatttatggagtacatgtgatattttgatataagcatacaatgtataatgatcaaatcagagtaattaggatgtccattacctctaacatttattgattctctgtgttaggaacatttcagatctgctcttctagttattttgaaatatacaacaaattactgttaactatttttaccctattgtgctactgaacactagatcttattccttctatctaaatttttatgtacccattagccatcccttcttaattccccccttccccaccatcctttacagcctgtggtaatcatcattctactctttatctccatgagatcatttttttttttttttagctcccacatataaaggagaacatgtgatgtttgtttttctgtgcctggattatttcagttaacgtaatgacttccagttccatccatgttgtttcaagtgacaggatttcattcttttttacatctgaatgatactccattgtgtatttataccacattttaaaaaatccattcatctattgatggacacttaggtagattccatatcttggttattgtgaatagtgctacaataaacatgggagtgcatatatctctttgacataccaatttcctttcttttggatatatacccagcagtgggattgttggatcatatgtaggttctgtttttagttttttgaggaactccatactgtttccaataatgactctactaatttacattcccactaacagtgtgtgagcattctccttcctccacatctttgccagcatctgttatttttttttgtcttgttgataaaagcctttttaactggggtgagatatctcattgtggttttgatttgcatttctctgatgattggtaatgttgagaattttttcatatacctgttggtcatttgtatgtcttttaagaagtttctattcagatcttttgcccagcttttaattggattattattattattattttgctgttaagttgtttgagttccttatatattttgatggttaatctcttgccagttgaatagtttgcaagtgttttctctcattccataggtggtctcttcactttgttgactgtttcctttgctatgcagaagctttttagcttgatatgatcccatttacttatttttgctttgcttgcctgtgtttttgaggtcttacttaataaatctttgcccaggctaatgtcctgaagcatttctctaatgttttcttctagtagtttcatagttgcaggtcttacattaagtctttaattcattttgatttgattttcatatgtggcgagagatagagatctagtttcatttttctgcatatggatatccagttttctgagtaccattcattgaagagactgttctttccccaaattatgttctcggtgcttttgttgaaaattgaccaaatgtgtgtatttatttgtgcattctttattctgttttattggtctgtgtgtctgtttttatgctagtatcatgctgttttggttactatagctttgtagcataattcagagttaggcagtgtgatacctccctctttgttctttttgctcgggattgttttggctatttaggaccatgttttgttccatatacattttaggagttttaaaatttctttttgttccttttaggatgcaaatttacatgcatgttagattatttcaccatgttaaaggaaaaacttgagacaaaatacacatgcatgtgtctttacggtagaacaaaattaactttggtttaaaagatactgctattgaatctgtttttatttctaaacatatttcttggttcttgttgaatttattgatgatgaaaccatgttctcaagtgaaaacaataagctggaattcagtcatttagtgacctctatgatcataggcaattcatttatcagctttaagcctcatttttgatcatttgtaaaataggtatcatagtgccataccatgtaactgtgaatgaatgatacaaaataagcagtgtttggcataaagtaaatatcagtgttttagctgaacaccttttatgtttggttcactgtattcatggtccctgacttcaaggagcattagttatctccacaacaactctaatatagcatagaatgtggtaagtcctcaagaaaggatttaagtgttctggggagtttagaggagatgaaaagaataattgaaatactgtataaattatgataattgtttaaaatagggactaagagaaacctttgcattattgtgggttgggaggcattgaactagccctcatttgtggctcatctttttgagtagcatttaagaatttgaaagtttgtaattatttgtacacattttctttaggtaccatctacctgttcatgtaattggacaccatgctgtgagtccttactccatagttttgcccttatctgctgattgtttggccttgaagccggtgtcagatatgctgagaatagcttggaacctgtcatggtatcatgggagtgataatctgttgaagcaaatgaactctgaaactaaaacgcaagagtaagctcttatattagtttaaaaagcatttgcaattaattaattgtaattaattagttaagttttactttttccttaggtccagtagctttttcccttggtatcatctgattctgctttttaacagttataatttttactttcttttaaatattacatgtgtttattacttttaacaatctatcatatgggaaaactttaaatgaaaaagcattttactctgtactgttttagaggttaaagtctgatttgttcgtagatatgaatcactaggaaaagggtcctggattagaacaaaatctcagtaagtatatgcatgagtgttatcattagtgtgatggtgattacttttgaatatcttaatattctaatctgtctgtcttaagtgaataaaaatttttataaggaggaaaagtcaatataaacatttgggatgccaatgtaaaatcctaatattgacagatatgtatcagtttttcttctggctgtaagtcaaccttttgttaaaagaaaatgaagataaaacagcttttgggagagtttataatagaaataagtgtgagcttttatttaaatagctttatgttcctccttcattttttttctttttgtctagaattttagatgcattgaagttatctacagaggacatcctcactctgaagataacacacatggctagtgggctgcaggactgcctccattccattgttcaggctgcaacccacagggaagttagggctgctgtcaccaggatgagtttttatcttctgaatgacagattgtctttaaagggttgccctggtccatgtggggttaccttgaagtccttggcttggcacaccgcactaaacaggtcagtgtaaggtcaaggctgccagtttcaaagacctggattgcattgtattgtgttcatctcctaacctttgaagataagagtctatgcccttactgctgctatcatagaaagaaaaactccaggatttttatcatctgtaataatagccaaagagaaatttttaatttagttattgcattgttgaagggattattaataaacttgtaacaatttattcttagaaaattttacctcacaaaagcaaataattaggataagacatggatgaaacaaattgaatgtttatttctatccatgttataaatgagttgagacatcagtgaattgattaatagctgtgatacacctgccacaggctgttttgttttgcttttgttttgttcttaagtaaattatatcatttttctttttactctcaatttcatgaagttgattgccatgtggcggtcctttatagcagttaattgagaaggctctagcttgtcaatttaacatgcttaacttgtagcagatggttgcatttgcaacaagactgataagcaaccactgcaagcaggttttcattttattcttcatgtgactttagtataaaatgtataactttattatttaacataaaatgtgcagtttttaagctgctaggttaaatgagtttccaaaatatgaattcctttattagtttagctttaaaaattagtttatctgattaggctttccagtggtgtgctggtgcccactaatgcagccttgtgagagagctgatggttgaattttcaggatttttgtaaggtgattgttaaacacagccattcttaattatataaacttacaattaaataaattatatgaagacaaaaggtaatgaatatgcaaacatcactttctaattatgtggcaacattttactgttatctttgttcttgaggttatgcatacatatgcactacaggggtatgtattttatggaaataactacaatggagtaccactgtgcatctcttcacaacttcatgttacatggtagctccacattgtctacagtagtatatttacaccatggaaattgacaaacacaataagtcagcactctcagttacatatttatcagcacactcccgcatttaaacagtctcgccagttgaagaatgcataaatccttcactttaaataaatgtaatatgtccctatttgtcaaaagaaattttaacataaaagctgattgaattcattgcactaagttttctttctcttgtgaattaaaaccatagaaatagtatgcaataccacattacaggaaagactctcaaactgtgggtcagtggaagcctttagagtatttcaaattgcccaatagcagtaactgtatgtgagcatcacattttttatggttagtttcctcaggactagtgtaagtggagagtatagactgtgtatatgtttaatatatacacacatgcatatataatattcatcttgtatttggtttttaggcctgtgtttgatcatggcaacacagacactactgcctaatttataaatattcatgtatttctgctgtattatgtttcactaaggaatgtatcaaaaatatatatcacagaatccaccttttttcatgaaaactttttaaaaactttacttccagcaatgtatgtactaatgaggctttgggaaactttagttttgctttcattcagtttaatgatagaaaggaacattatctttttgactgattatctaagatgaaccaacagcttaaagggtgcttggagatagaagattcccataaatcatggctgtataaagtattgagatattgagaacatttttataagcttagtttaatatttttaaaatacagctatttcaaattatatcattctagacaaaacaaaatatagagaagcatgttcatacctgtgtgaatggttttttattgtattttaaaaataatgttattttttacacattttccatgtcagtaaatatactttgaggctaatttttcaaatatatgatatatccaaatgaatgttccgcaaaagaggtccttttaggagtgagtgtgtatgttagaataattctggctttgctcagatattttgaaattgtcctctcaggtcatttaaacagcagatgtaaggaagtcttattatattttgaagttatatttaattttttactaaaaaatgatattagcaaactcaactatccagagaagggtaaaaatgatttttacatgtataccgaaatgaacaccaccctaaaccatgactatttatcactattaacaaaagtatatttcagtttgacaaaaaacatggtttctaaaatctttttacttacggtactgtggcttctaaacataactttccaagatgattattttaacagcccaacattaatttatgtgtatgtttttatatgtgtatgctaacacacaagcatacaattataatctaatatcattttggaaacttattttaagaaaacagatgatagtcatggtttagtaggattacaagttgtcagaggtatctagagtcttctttcaactagtttctgttgagtttgcatgtttaatgcctctctactcctttcctactggaagtcctattgctactgtttttctccatttttcaccagactgtagactgactagcgaattggtttttctgcttttaaccttatgccactcatttatgttgcttcctgaatgatccttctgaaatacatgtcacctgtgggttctcttccatggtgtgctagatattaatagaattccaaccccttagcatgctgtagaaagttctttttgatctagctcttgcttaccttttcagctacagtttcctcctctctctctaacatatgctgtgtttctatgaagtgcaaatattggggttttatgaaactgcttgatattttagggcatacacttctgttttatacatccttgcttttacatagttaactccttggctgccttgtgaatatctactcttccttgagctccagggtcttcttactctgtgatgtatgtggaattctagttaccctgattgtcatgtggctttcctgcattacttctacagttgtttaaatatttgttttctcatgtgccttgggtttattacattcctttttatatccctcacatatcgcataagtcatagtatacagttggccatgcagcctcagcgtgaacacctcctttgaaggatattcattctgtttttgcgctgtgattattcgtaagttttttgttcttttagactgtacctgatcatttctacctgttattctgtcctttaaactcacagaataaataatgtcttcacatgtgacagctcttcatttaaacataactataatttcttctctattccccccaccctgctttaaatgatttgtttttttttttagatagactttaaaagccacagtgtccagacttctcatttgttcatgctattttacaagggtattgtgtttcttaggactctccctgagatctggacatgataccttatatgggtgtggtgctgtggcatggggtgaataggaagaaaggggctactgcctttcttttcctactgcttttccatcattcaacaaacatttattgatcacctactaggtgtcactcttgtaggaaatatagcagtgggcaaaactgatagggtcctgctctcatggaacttggaattaagacagctaaaagtataatcaaaagtagaaatgcttccaagcagactattaggaaactgcattagaggagcaccctatccctcttcagtagagagaaagtggttcagagaatgaagcttaagccaaggcataacaggtagaaggatgttaaaagtctatgggattggaagccgaaaagataccaggcacacagagaaacaaataccacatgatctgtcttatatatggaatctaaaaaagtcgaattcaaagaagtagagtagaattgttaccagaggcaagtggcaggtggatatgggtagggaaaagggagacgttgctgagaggttacaaaattccagttagacaagaggaatgagttctggtgatctcttacagcatagtgactatagttaataataatatatgtttcaaaatagctaaaagaatagatgttaaatgttctcaccacagagaaataagtatttgaggtgattggtatgttaattagcctgattggatcattccacaatgtatacatgtgtcagaacaccacattgtatcctaaagatacatacaattattatttgtcagttaaaaataaaacaaataaatggaatatagtttggtgcatgttatgtgacagaaatttgatactttgaatccgtaaatggatggtcagttgactcacaaccacttgcagaatatattatttctcctctagactaaaatgccatattcaacaaatattatacaaattaattttttttttaaatgccaggcaaagggataggccctgagttaggaaagagtgtcttgtgtcttcaagaggaattgaaaagaggatagtacacttagatttaggggatatgagggtggttataaaatggggttacagaggtgatattttaatgttacactggatatcatagaagacttcttataatctttgtgattgttaaatcataaatctcccaaagatctatggttgttagaatcacctctcaattttcataatccggcacttgccatcctactcagctgaatgtcattttggggatgtgagaattttaagtaaggaaaaataataatgagacaaacaccacattactaagaaatacagcattatatatccctggtgttggactgcttagtttagtattcctgttttaaaacttgctagccgtgtgactgtggaaaaacgacttaaccatatttttgcttgggtcttcttgtctttgaaatagaggtgcctacttcataatgttgttatgaagtttgacagaaaccctgctgttagaacataggctggcacaaggttggtgctccataaatgctgagtattaagattcgtattattgtcactcttattaacattttgatgcaatggctttagatttataaaaaataaaacattacagataaaattggatctcatatctcttgctgattgctttttaaaaaaaacgatttccaaactacttctcccttttaaataaaagttttattgtctactaatcttttagctctcttaaaccagtttttttttttaaagaaatcttagaaaattggctcatatccttttgctctgaacttaaaaagaaatttcatcctaagtctaccttcagtgttttccttgcctgttacaaactctagtagcgtccttgcaggcctttttttccccctcactttattaccttattttttcgagttggtcagaattaggtttgaagtactaattcttctcatcagtgaaacatgacattcccagtatgaaaagcaagtttcactgggcggttattagagtcagtgtttttccccttggtatttttttggtactttttctgaatttgttatttttctcttatgatatttgtcacttctagttattttagttacttgtccacatgttttttccactataagctcatgttcttgaaggcagatacccagtttgtttcaactttgcattttccaaagcatttaaaacagtgtctcataaaatagcatcctcacaagacatctgttaagtccacatatctatgatgaacagtggtattgtgtattttaaagcgccagaaaccatgattattgtcttttcattataggtttttacaggtgcttcctgcttgcactgaagatgagaaactgctaatagatatcatacattttttaaataaattaataaaggaacaaagaaaaaattcttcactagaacttctaaactggattctcgaattacttcttagacatgtaagtggtgttaaggaatttggattttaagtttgggaaataacttatttgtagaaatcattaacattatattatggaaaaggataattttatattgtctatgcttggtaaagtagtcttcatgtaatgaatggctcataacaacatggctttcctgatacgattgtgaatgtgtttattaaaattctgtacagtgaatgggacctacagtcttgtgtttaataaaacctgttctgcatgtgaactttctgctgcaactgtatttttaagtggggatttcagttcaggtggcaggggacagggtggatgtccagataggcatgttgagagttagctaacaaagccagatggaggcaggagggggtatagtgatggtgcagttataaagataaagtgtgttcaggccttaaataacggttactggaatatttacccttctagcccccactactgtcagatttttagctcttctaaaaattctaaattttttttttttattttttttgagacggcgtctcgccctgtcacccaggctggaatgcaatggtgcgatcttggctcactgcaacctctgcctcctgggttcaaatgattctcctgcctcagcctcctgagtagctgggattacaggtgcctgccaccacgcccagctaatttttgtatttttagtagagacagggtttcaccatgttggccaggctcgtcttgaactccggacctcaggtgatccgcccaccttggcctctcaaagtgctgggattacaggcgtgagccaccgtgcctggctctaaaatttttctaaatagctattctaaaaattttggctattcagatttcttattctaagaagcgtgtgaagaacccaagaagccaggtccctgttgttggtctatctgtctctttatgtatttatttgcaaataccgtatgaatttactcaacttagctaagataaagctttacacaaataagaagaaaaacaaaacaaaactagaaaagagggcctaaactgatataggacatagtggatcttataaggcaaatatgtttcattatatattaacacatttgcgaaacttagagataattttatgtaaaaatatgaattactgtgttgtcagaaatgctaactgatatgaatgtttgtgtgtatataaaacttatttagaggtttattatcgtcttaggctgttttctgttgtttttaacataatatcagaagctgggtaatttataaaaaacaaaatttatttcttacagttatggggtgcaggaagtccaggtttaagagggcatatctggtgagagccttcttgcagtggggactctctgaagagtcccgaggtgatgcagggtatatgtggtgagggggctgagcatgctgatgtgctatctcaggtttttctcttcttacaaagccatcagttccccttccatgataacccattaatccactatccatgaatggattagtctattcatgagggtagggccttcatgatccagtcacctccaaaggccccacctctcaatactgttactttggggattaaatttcaacatgaattttggagggaatgttcaaaccatagtaattatcttttcctttattgtagattggtgaaggtagggactgttttgttcattattgcatacccagcatttattatagtgccttgcacatagtgagctctcaataaacatttattaactcagtaataagctatgtagttaattacaagaagcacacaaaaccttaattttatcactagttaagatttaacaaaaatggaaaccatgtattactttcaaggttacttatatatgcaagtatatttatagactgaatttctagaattgtaattgctgagtcaaattgtagaggtgcgtgtgtgctgaggtttttgtggttttataaatagataacttattttgaattagatggagattttttcatattcggtcttttcatgaattgtatcttgatgtccttgctggttctccgccacaattgggttgttagtctcctttcatttcttctttcctgtcctttcttttcctcccttcccttctcccttccctttctcctttgctttttccttccattttcctcttccctcccctcccctttccttggagcgtgatttcattctggtacctgcaacttggacattagtgtagagatctttcaccttttgattaaatttattcctaaatatcttaattttttttggtagctattttaaatgaggtttttttttgggggggcgcggttactgtatagaaatgctactgattttttataagttgattttgtatcctgcaactttattgaattcatttttaagatcaaagttttttggtggagtctaggtttttctagatttaagattatatcatcagcatagagggacagcttaacttgccttttttctaatgtggatgccttttatttctttctatatactaattgctctggctaggatttccagtaccatattgaatagacatggtgagagtagacatccttgtcttgttcctgatcttagagaaaaagctttaaacttttcaccattgagaatgatgttagctgtgggtttttcatatatggcctttattgtgttgggattccttttctacttaatttattgagagtttttattatgaaaggatgttgaattttgtcaaatgctttttctgcatctgttggtataatcatgtggtttttgttcttaattctgttaatttggtgtatcacatttacgcatttgtgtatgttgaaccatccttgcatccctggaatgaattccacttgattatagtgagtgatctttttattgtgctcttggtttcagtttgccagtatttggtaaaggattttttatatctgtgtttatcagggatattagcctgtaattttcttttcttgtagttcccacgtctggctttggtatcagtgtaatgctgccgtcataaagtgagtttggaagtattccttcttcatttggttttaggagtacagagattagtattaattctttaaatgtttggtggaattcagcagtgaagccatcaatcaggtcttgggcttttttttggtgaaagactttgcattactgatttaatctccttattattggtctgttcagattttctgtttcttcatgattccatcttggtagctctatgtgtctagaattttttccacttggttgtccaatttgttgacatgaaattgttcataatagtctcttacgattccttgtgtttctgtggtatctgttgtaatgtcttcccttttcgtttctcattttgtcttctttttttattagtctagctaaaggtttgtcaattttgttcatcttttcaaaatctcaattcttgattctgttactgttttctattgtttttccagtttctatttcatttgtatctgcccttatcttcattgttttctttttactaagttttggcttcatttatgcttctttttctagttccttgaggttgtttacttgatatctttctttttgacatagatgtttattgttatgtatgtccttcttagacctgcttttgctgtatcccataagttttggttggtttggtgtccatttttgtttgtctcatgatattttaaaatttcccttttagctttttctttgacccactgattgttcaggagcatgttgcttaatttttatgtatatgtgaatactccagaattccttcttttggtgacttctagttttttatcactatggtcagaaatgatattagatatgatttcagtcttgttatatttgttaagacttgtaacaccatacatgtactgttaattttgtagtatgtcataaggtttatgtatattttataatttattcatagttatgaaattaaaattaaattcctacaagactctagatgattgtactataattttaatgcagtttttgaaaaggatttttggtacagttacatttacttatttggttttgtatggtattaaacctttcttcggaaagcttctactttatctcatatattatcaccacaagtgttataaataatactacttttaagagtgcacaaaagtgaacttaagtgttcactatcagttgggtttactccctaaatattatgctacaagataaattaatatatgttatataactaccaatgtttaggataaagggaacctggaaatagaaaatcaagtaccttttaaagtttatcctttgaagtgagtaaaataagtgagaaatgatttaagaagctcagtaaaataacatttccaagtaaattgctttgaatgtatggacatacatgaaaagatatacaaaagttgtggttgcaaaaacaaaattaggcagatatgaacgcctgattagtcagaagaatgctaagaggaagtgaaaagaaaaatcagctaacttcccgagggaagatttaggaactttctcttgtgaaatttttttccatgtgttttatcaagacattcacttattacaaacatattgtaattcttaggcaatttaggagtttattgcacctctaatctgtttttaatatgatattttgtttatagtaacctagaagtgctgaatttgaatacctttctttttggaatgcatttttttgatggaagttcacaaatgtggggctgttagtttttttcttcttttggtgaagctcagcagaactacacagcatatatattttccttggctggctttcccgtaacgggctcaatgtgcactcagacattattgagggtcttgcagttacttttggcatagcttgctgatggatgtaaagttggatatgatgagtggtaactgtgtgtgtaaacaaaatgagccatcattatagaaatggttgccttttagaggtcaacagtgacaaaataatggcccaagtagttggtttaaaattaggattgaatcctaacgtctaaagacaaaaacttcagatatgattaagcacttgacatctgtaggcatcagtagagacatcttattctactctattgtacttgagaaatggtaattcaccctatattttacaagtggtattgctgaggttcactgaatttcagtgttaacatgtaaatcaaaggtgaaaagagaaaaaaaaacttcagtaatcttcaagtggaagcaagttattaataggatgagattctttgggagaatcttaatttttaggtatacacatactgtttcagtatattcatgtattaatagtagcttctacttaatttttatcagcatatcagaattaataattcctaataataaaattgttttacaagatggagtttgcgtcttggtataaacagtttgttcattttgtcagtagttttgggagtcagaaggcacgtgaatgtgagtcagcttttggatatttagggctcagaacattatagaaaatttatttatttttatgatttactaaatgtgtatttcgattcttttattcatgtatgaaacataaaagttgcagttatgtcttattcaatcttaatttatccaaagacatatattgcttaagataaaagaaaaagttgggaaaaaaactatttagatgttaaaatactgtaaaataagagcaaaatgtcactactagtttccaaaagctctcagttatattatttataattgtatatatctctatatactataagcaatttagaggtttctttacatattttcatttcttttccctaaagagaatgcagttaattttgagttgagctcttttaggtgaaggattttataagaacaatagttacattttgattgtatctctttttgtatgtttttacatgcactagtgatgtgacactgtgctgaggatggaatattaactagctttggagtaagatgcttcttgctctgcccttgtctgtctaagacttagacaattatttaacctctttataaatctatgttcccatctgtaaaacaggaatgaaaatgcaaatcttctagtttattcaaaaagtcaaatgaaatcttactatcttttttttttagcacagtgcctgaggcatcatagatgattaataaatatcccatatatctattaatgcttctgattaatgtaacgttttcttttgtcaatattattagaaataatcctcttatattcctttatctattttttttttagttgggaaaagaggaaaaactttagaaagaactagtatttgtttactagcctatcaaggtggcaaagattattgcagtaataatccacatagcactggcttgggtgctgtgggtcttttcatgtcctgtgtaattgtatgtattggtacattttttacagggacaatttggcaatatatatcaaaaaattaaaactactataatattttgatttagtaattttattgcagaattcatacataagataaaatccaacttgagtacactgtgtgttgcagcttagtgaaattatgcatcattgattatccaggagttagtgtggtaaatccttattgttgaaaaacaatcagatattaaactaatgtttttgcagaaatattgttaataacgggaagtaggaaaaaatggttacagtagtgatttttttcacttgatacgggtttgtgaaaaatgtactgttttaattctgtttatattctcagaaacaaaaaggagagttatatatcaatatataatagtggcaatttctgtgtggcatgattatgtgtggttttgtttttctcgtcctttttttctattttatatgataaatatgtttttcttttgttgagaatatattaaacatcttttgaatttagaacatctctactaatgcagtaaaggcccacacctactagttaggtaatatagctcttactagaacttgcttagcaaccaaaccctttataggaaacaatatatagttcaattagtaaatacattttttacaaatttcattttttagagtgcaaacccactgttagacctcttggttctgacagagtcacaggcacgagaagaaacagatgatatccggactgctgtcaggcaacaacttcagaaagaactgattgctctttttgataccttgctgctcaatttcatggaagttactgacaggtaccatttgtaatattgcaggtttaggtgcatttatatagaacccaagttttctttgattttcaaagttttactttgtacttctttcaaattaagaaatacttctttcaaatacttaaataataatcagttatagtgttctgtttgtttttgtttcagtttaatctgttacagcctgattgtacctgcttggtctctttcactacacacatgcactcacatatgcacacacacagttttgttctctagggtttaattcctggttctctcttaattatctacaaatctacttgagcagtcatacctatgcctatgactttatgattatctttacactgatgactttcaaatacatatctctagttatgaattctgttttttaaaaataaaaatattaagatgaaagtcactattttaaccattttaaaatgtacatttgaatggttttagtatatccgcaatgtttgcaactgtcaccactacctaattccagaactttatcatcaccccaagagaagccttgtatccatgaaaaagtctctccctattcacacattcctctgggccctggcagccactagtcttctttctatgtctgtggatttgcctattctggatatatcacataaatgaaatcaaacaataatgtgacctttagcgtctagcttcttcacttagcatcatgtttccaagctccttgcatactgtagcaaatatcactacttctttctatgactgaataatattctatttatagatatgccatgttttgtttatccattcattcattggtggacatttgatctgtttctaccttttggctattatgaatagtgttgctgtaaacactcatatacagatttttgtgtggacatgtgtttcagttctcttgagtatataattaggagtggaattgttggttcatatggtaactgtaatggtaactctatgtttgacttttcaaggaaatgccaagctgttttccacagcagctataccattttacattcccaccagcaatgtatgagtgtttcattttcttcatatcctcaccaacacctgttattatagcatcctaatgggtgtagactggtatcattttggtttttatttgcatttccccaatgaaaaataattttgagcatcttctcatgttcttatggctatttgtgtatcttcttcggagaaatacctattcaacatctttgaggatttagtatcagtgtgcatcagggatattggcctgaaattttccttttttgttttgttttgttttttgctttaaatatgtcccagagattctggtacattgtgtcttcgttctcattgatttcaaagaacatctttatttctgccttcatttcgttatttgctcagtagtcatttaggagcaggttgttcggtttccatatagttgtgcggtttggagtgagtttcttaatcctgagttccagtttgattgcactgtggtttgaaagactgtttgttatgatttgcgttcttttgcatttgctgaggagtgttttacttccaattatgtggtcaattttagaataagtgcgatgaagtgctaagaagaatgtatattctgttgatttggggtgaagagttctgtagatgcctattaggtccgcttggtcaagagctgagttcaagtcctgaatatccttgttaattttctgtcttgttgatctgtctaatattggtagtggggtgttaaaatctcccactgttattgtgtggtagtctaagtctctttgtaggtctctaagaacttgctttatgaatctgggtgctcctgtattgggtgcatatatatttaggatagttagctcttcttgctgtattgatccctttatcattatgtagtgcccttctttttctcttttgatctttgttggttttaagtcttttgtatcagagataaggatggtagctcttgcttttttttttttttttttgctttccatttgcttgataaatcatcctccatccctttattttgagcccatgtgtgttttttgcatgtgagatgggtctcctgaatatagcacactgataggtcttgactctttatccaatttgccagtctgtgtcttttaattgtggcatttagcccgtttacatttaaggttaatattgttatgtgtgaatttgatcctgtcattatgatgctagctggttgttttgcccattagttgatgcagtttcttcatagcgtcgatgttctttacaatttggtatgcttttgcagtggctggtaccggtttttcctttccatatttagtgcttccttcaagagctcttgtaaggcaggcctggtggtgacaaaatctctcagcatttgcttgtctgtaaaagattttatttctcctttgcttatgaagcttagtttggctggatatgaaattctgggttgaaaattgttttctttagaaaggttgaatattggcccccactctcttctggcttgtaggtttctgctgagagatctgctgttagtctgatgggcttccctttgtgggtaacctgatctttctctctggctgcccttaacattttttccttcatttaatctttggtaaatctgatgattatgtgtcttgatgattatgcattcttgaggagtatctttgtggtggtctctgtatttcctgaattggaatgttggcctgtcttgctagattggggaagttcttctggataatatcctgcagagtgttttccaagttggttccattctctctgtcactttcaggtacaccaatcgaacatagatttggtcttttcacatagtcccatatttcttggagcctttgtttgttcctttttattcttttttctctaatcttgtcttcacattttatttcattaatttgatcttctatcactgatatcctttcttggtgaccttcggttgggatctttgagtggacgtgctgttcctttctgtttgttagttttccttctgacaggcccatgtgctgccggtctgctggagtttgctagaggtccactctcgaccctgtttgcctaggtatcgccagcggaggctgcagaacagcaaagattgctgcctgatctttcctctggaagcttcgttccagaggggcacctgccagatgccagccagagctcttctgtatcaagtgtcggttggcccctactaggaggtgtctccccgtcaggatacacgggggtcagggacccacttgaggaggcagtctgacccttagcagagcttgatcggtgtgctgggaggtccactgctctcttcagagtcgtcaggcagggatgtttaaatctgatgaagttgcgcccacagcctcccctttctccaggtgctctgtcccagggagatgggggttttatctataagtccctgtctggggttgctgccactttttcagagatgccctgcccagacaagggaaatctggcaatctggccatggcagccttgttgagctgcagtgggctctgcccagttcgaacttcccagtggcttagtttacactgtgagtgtaaaactgcctactcaagcctcggcaatggcggacgcccgtcccctcaccaagctctagcgtcccaggtcaatctcagactgctgctgtgctggcaacgagaatttcaagccagtgaatcttagtttgctgggctccgtgggagtgggacctgctgagccagaccacttggctccctggcttcagcacccctttccagcggagtgaacacttctgtctcgctgctgttccaggcgccactggggtatgggaaaaaagaactactgcagcttgtttggtgtctgcccaaatggccgcccagttttgtgcttgaaacctagggctctggtagggtaggcaaccgagggaatctcctggtttgtaggttgcgaaaaccgtgggacaagcgcagtatctgtgcaggagttcctcaggctcagtctgtcacggcttcccttgggtggtggagaaaattccccgaccccttgcgcttcccaggtgaggcgatgctccaccctgcttcagcttgccctctgtgccctgcacccactgtccaaccagtcccagtgagatgaaccgggtaccttagttggaaatgcagaaatcacccgccttctgcgtcgatcttgccgggagctgcagactggagctattcctatttgaccatcttgccagcaatccccccaacctttttttttttttttttaaaaagggatgggggtctcactatgtcaccccggctggagtgcagtgacacattcttagttcactgtaacctcaagctccagggcttaagagatcctcctgcctcagcttcctgagtagctgggactataggtgtgcaccaccacacctggctaattttttttactttaattttattttatttcatttttttagaaatgaggtctcactgtgttgtgttgctcaagctggccgcaagcaatcctcccacctcaggctcccaaggcactgggattataggggtgagccacagcccctggcccagtgtaatcgttacttgtattttatatgacattctctagttggtattttatgctttccttgaaaagtctcattttgatagagactattttctgccattttgtctggttcatttttttctattactatgagtttaagtaaccttttatagccagtaagatagcccattaagcccattatactttcttggtggttgattttccctcttttgcatacataggaaatgctcggaacttctttacgtttttcaaacgcagctggctctgaaactgctccagtgtctgaaagtgacggatgcgcctcatttctatggcctgccgtcccttgagcggaccttacgagggatggctaacctcactgcgtttccgggatggagctcacactctcctctcacaaagcctctagatatctgtgtgaagtacttgtcaggtctccttgaggtaagtaaaaatagcatatggtagttatttactattagttgcttttactttatgccaggccacaagtgcattatacgttactctattcaatgtagaatattatacattatttatataagtcataatagtgaaatgttttagtgatttttattaatagttaagtaaggaaggtcacttttataaataccctcattttcaaaagaaataaatggaaacttttgatgctcaaaggaagtgttcgctagagcatttcagattttggatttttggattaggaatgctcaaccagtaagtatatgatacaggtatttcaaaatccaaacaactccaaaattcaaacacttctggtcccaagcattttgtatacggcatactcaggctgtacaatgttaaaggatatttgttttttctttttcttccagtttgtgcagttctagatgctactgctatgaacattcttatcttttggtgaaaatgagcatcttttttgaaattttatcttctgttattgaaatatgtaaatatagccaatttttatatgttgaccatgtatcaggcaattcttatttccaatatcaaaacaaaagcctttaatttttcacccttcagtatgctgtttatagtttttttttgtcaattaagaaagatcaagttaaggaagttttcttttgtcctgttttgctaggagctttgttttttaattcataattgtatattgcttttttctgtatcttttaagataatcacatgatttttcccttatattccattactgattgattttaaaatgttaaacaaccttgcatttctcgaaacatttcagttaggttgtgatgtattactctttttatatgttagtggatttcgtttctcaattttttagaattctgaagtttttagaattattctatttcctcatgtaaaaaagtttttcgaattttgcatcttttttctcttaaagaatttgtcaggtttttaataatcaaaatcattccgttcttatgactaaaatgggagaatgtgagattgtaagaacgtgactttttcaaccattttaaatcttttcctttatataactttcttttttggaatagctgatttgcattggtgtgattttgttctctaatgttaggtagaatttgatcgtgaaacaatcttggtttgcagttttctttttgggaagattgtaaattgtgaaatgaaatgactttttttttttttgagacagagtcttgctctgttgcccaggctggagtgcaatggcatgatctcagctcactgcaacctctgcctcccgggttcaagtgattctcctgcctcagcctcccaagtagctgggattacaggcgcctgccaccacgcacagctaatttttgtctttttagtagagacagggtttcaccaggttggccaggctggtgtcgaactcctgatctcaggtgatccacacccgtcttggcctcccaaagtgctgggattacgggtgtgagccactgcgcctggcctgaaatgactttttaaatagatctaaaatcgttcagagtttctttttatgtgtgtcagccttagtaagttatgtttttgtagaacttaaaaactttttatctaatttttaaaatttgttactgtgaaggtattcatcaaatcatcttacacttttaatgtctgctgaatctgtagtgaggtcccctttcattgcagacattaattattcctttctcaatttttcttggtttatctttctaatagaatgaacctttggctttgttgagcctctctttaacttttttctcctgttttatttctgccaatatttattatctccttctacttttagtttagtttacagctcttttttctaacattttaaggtagaggcttacgtcattgatttttttaaaagtctttctcaaatgtgtgtttttagctctaatcctctaagcatggccttatgccatgtttttatcatcaatttaggtcaaaatatttctactgtgatataataaatacgacaatgatatggttgtacatagttctatgagaacagcctcatcacagtggcctgacaattttgcatatctgcccttgggcttcatagacaaggcttaactacagccaatctaaatcttggcagaatttcctgtgatccttctggaacatgagaatatgaaaggcttatgagcagctgactatgcaagattgattctcacttacttcacagtctattaggaagtcagttaggagcccgtttcttattggttcctaggttccgacgagcactgggctttctgccttgctctccttggggcatagctacagcttataaaactgctttactgcagcacggcatgggcttctccgcaacagagtgtcctacatctttgttatagtcatctggcccctttgtttcaatgtcatcctgtgcaagggatactagtagctggcacctttgtctattcttgcttttgctgtttatgtaggtaataaactgtctgaatccaaaaattactcattgttttcttactggacaaatctgtcagccttgttttgattgctaactgtgttcggacctcaagaatgattcttgtaggaagcactgtagagttagattttgaaagataagtaaattgatagtgatagcaatagacattctagacatggaattttctgataaaattgtatctataacctcctgtttttttttcatgctgtgggtgacttcttgacatcatataatctctacctattgccagattatttttcagaaacataaatttttcaatccaaacctctttttttttcaagagcataagactcaatattttgcatttagagatttgcctccattgtagttttttcccacatctctgaattttcagttatatctggctgtttttccaaaataaaaatgcactttaaaaagactgcttctttcacatagtttcctctcttttagggatggcaatatctacaaaaaatttaagatctaacttatttatttaccttcatttagtaaaccttttcttattcttccaaggttggatacttacctaatactgtttggcctttcctgtaggttatatacctgtaacaatttatatatgtggctattacttaatacattatatttttatttattttactttatttctttgagacagggtttaccgtgttgctcaggctggaatgcagtggtgcaatcacagctcactacagcctcaacctcctgagcccaagtgatcttcccacctcagcctcccaagtagctggggccacaggtgtgcaccactacacctggctggtttaatttttttgtagagatgggtctcactatgttgcccaggtttgtcttgaattctttggcgcaaatgatcttcccactttggcctaccaaagtgctgctattacaggcatgagccactgtaactggacctttattttgttttctgcattgctctagtagactatgagcttataagtatcatctttgggctatttctactatcccatggctactgcattgacctagcaccatggtttttacatagtggttagtgaatcagttaattaatatatgtgctacataatacatatatattgtgtatagtttttaaattaagatacagtttgaaaaacattttggaaatgtagcataaatgattataaaaatatgttttattgttgtatttttattactaaataatgatttaaataatgtatatatatattttatctggtcttatctagaacttttttccaaaagcacatattgtttttaaaacaagtttaaagatcataaatactctttgctgtactgtaaaatttaatatgaatttcactggagtccctttaataaaataaatttcggagaggttccaagatggccaaataggaacagctctagtctacagctcccagcatgagcgacgcagaagacgggtgatttttgcatttccagctgaggtaccgggttcatctcactggggcttgtcggacagtgggtgcagcccacggactgtgagcagaagcagggcggggcatcgcctcacccaggaagcgtaagaggtcagggaattccttttccaagccaagggaagccgtgacacatggtacctggaaaattgggacacttccaccctaatactgtgcttttccaatggtcttagcaaacaatacactaggagattatatcccacgcctggcttggagggtcccacgcctatagagcctcgctcactgctagcacagcagtctgagatcgaactgcaaggtggcagcgaggctgggggaggggtgtccgccattgctgaggcttgagtaggtaatcaaagcggccgggaagctcgaactgggtggaacccaccacagctgaaggaggcctgcctgcctctgtagactccacttctgggggcagggcatagctgaacaaaaggcagcagaaacctctgtagacttaaacgtccctgtctgacagctttgaagagagtactggttctcccgttacagagtttgagatctgagaacagacagacagcctcctcaagtgggtccccaacccccgagtagcctaactgggagacacttcccagtaggggccaactgacacctcatacagccgggtgcccctcttgagacgaagcttccagaggaaggatcaggcagcaacatttgctgttctgtaacatttgctcttctgcagcctccgctggtgatacccaggcaaacagggtctggagtggacctccagcaaactccagcagacctgcagctgagggtcctgactgttagaaggaaaactaacaaacagaaaggacatccacaccaaaaccccatctgtacgtcaccatcatcaaagaccaaagatagataaaaccacaaagatggggaaaaaacagagcagaaaagctgaaaattctaaaaatcagagcacctcttctcctgcagaggaacacagctccttgtcagcaacggaacaaagctggacggagaatgactttgacgagttgagagaagaaggcttcagaagattggtaataacaaacttctccaagctaaaggaggatgttcgaacccatcacaaagaagctaaaaaccttgaagaaagattagacgaatggctaactagaataaacagtatagagaagaccttaaatgacctgatggagctgaaaatcatggcacaagaactacatgacatatgcacaagcttcagtagctgatttgatcaagtggaagaaagggtatcagtgattgaagatcaaatgaatgaaatgaagcgagaagagaagtttagagaaaaaagaataaaaagaaacaaacaaagcctccaagaaatacgggactatgtgaaaagaccaaatctacatttgattgttgtacctgaaagtgacggggagaatggaaccaagttggaaaacgctcttcaggatattatccaggagaacttccccaacctagcaaggcaggccaacattcaaattcaggaaatacagagaacgccacaaagatactccttgagaagagcaactccaaggcacataattgtcggattcaccaaagttgaaatgacagaaaaaatattaagggcagccagagagaaaggtcccgttacacgcaaagggaagcccgtcagactaacagcggatctctcggcagaaactctataagccagaagagagtgggggccaatattcaacattcttttttttttatgatttgcttttttttttttttttgaagtatttattgatcattcttgggtgtttctcggagagggggatgtggcagggtcataggataatagtggagagaaggtcagcagataaacacttgaacaaaggtctctggttttcctaggcagaggtccctgtggccttccgcagtgtctgtgtccctgggtacttgagattagggagtggtggtgactcttgaccagcatgctgccttcaagcatctgtttaacaaagcacatcttgcaccgcccttaatccatttaaccctgagttgacacagcacatgtttcagagagcacgtggttgggggtaaggttatagattaacagcatcccaaggcagaaaaatttttcttagtacagaacaaaatggagtctgctatgtctacttctttctacacagacacagtaacaatctgatctctctttcttttccccacatttcccccttttctttttgacaaaactgccatagtcatcatggcccgttctcgatggtcgctgtctcttcagagctgttgggtacccctgcagacaggctgtcacttcatgcttggaagattgcacagcggccaggcagaggcgctcctcacttcccagacgaggcggccaggcagaggcgatcctcacttcccagacggggtggcggctgggcagaggcgctcctcacatcccagacggggcagccgggcagaggcgctcctcacttcccagacgggacagctgggcagaggcgctcctcacttcccagacggggcgcctgggcagaggcgctccccacttcccagactggacagctgggcagaggcgctcctcacttcccagacggggcgcccgggcagaggcgctcctcacttcccagacggggcagccaggctcaacattcttaaagaaaagaattttcaacccagaatttcatatcctgccaaactaagtttcataagtgaaggagaaataaaatcttttacagacaagcaaatgctgagagatttgtcaccatcaggcctgccttacaagagctcctgaaggaatcactaaacatggaaaggaacaagcggtaccagccactgcaaaaacatgccaacttgtaaagaccattgatgctaggaagaaactgtatcaactaacgagcaaaataaccagctaacatcatgatgacaggattgaattcacacataacaatattaaccttaaatgtaaatggtctaaatgctccaattaaaagatacagactgggaagttggataaagagtcaagacccatcagtgtgctatattcaggagactcatctcacgtgcagagacatacataggctcaaaataaagggatggaggaagatcaaccaagcaaatggaaaacaaaaaaaggcaggggttgcaatcctctctccgataaaacagactttaaaccaacaaagatctaaagagacaaggccattacataatggtaaagggatcagttcaagaagaagagctaactatcctaaatatatatgcacccagtacaggagcacccagattcataaagcaagtccttagagacctacaaagagacttggactccacacaataataatgggagactttaacaccccactgtcaacattagacagatcagtgagacagaaagttaacaaggatatccaggacttgaactcagctctgcaccaagtggacctaataggcatctacagaactctccaccccaaatcaacagaatgtacattcttctcagcaccacatcacacttattccaaaattgaccacatagttggaattaaagcactcctcagcaaatgaaaaagaacagaagttatgataaactgtgtctcaaaccacagtgcaatcaaactggaactcaggattaagaaactcactcagaacagctcaactacatggaaactgaacaacctgctcctgaatgactactgggtacgtaacgaaatgaaggcagaaataaagatgctctttgaaaccagtgagaacaaagacacaatataccagaatttctgggacacatttaaagcagtgtgtaaagggaaatttatagcactaaatgcccacaggagaaagcaggaaagatctaaaattgacaccctaacatcacagttaaaagaagtagaaaagcaagagtaaacacattcaaaagctagcagaaggcaagaaataactaagaacagagcagaaatgaaggaggtacagacacaaaaacccttaaaaaaaattggtgaatccaggagctggttttttgaaaagatcaacaaaatagatacaccactagcaagactaataaagaagaaaagagagaagaatcaaatagatgcaataaaaaatgataaaggggatatcaacaccgatcccacagaaatacaaactactatcagacaatactataaactcctctatgcaaataaactagaaaatctagaagaaatggataaatttctggacacatacaccctccgaagactaaaccaggaagaagttcaatttctgaatagatcaataacaggctctgaaattgaggcaataattattagcctaccaaccaaaaaaagtccaggaccagatggattcacagctgaattctaccagaggtacgaagaggagctagtaccattccttctgaaactattccagtcaatagaaaaagagggaatcctccctaactcattttatgaggccagcatcatcctgataccaaagcctggcagagagacaacaaaaaaagagaattttagaccatatccctgatgaacatcagtgcaaaaatcctcaataaaatactggcaaactgaatccagcagcacatgaaaaagcttatccaccatgatcaagtgggcttcatccctgggatgcaaggctggttcaacatgcacagatcaataaacgtaacccatcatataaacagaaccaaagacaaaaaccacatgattatctcaatagatgcagaaaaggccattgacaaaattcaacagcccttcatgctaaaaactctcagtaaattaggtattgatgggacgtatctcgcaataataagagctatttatgacagacccacagccaatatcatactgaatgggcaaaaactggaagcattccctttgaaaactggcacaagacagggatgccctctctcaccactcctattcaacagtgttggaagttctggccagggtaatcaggcaggagaaagaaagaaagggtattcagttaggaaaagaggaagtcaaattgtccctgtttgcagatgacatgattgtatatttagaaaaccccatcgtctcagcccaaaatctccttaagctgataagcaacttcagcaaagtcgcaggatacaaaaaatcaatgtgcagaagtcacaagcattcctatacaccaataacagacaaacagctaaatcatgagtgaactcccattcacaattgcttcaaagagaataaaatacctaggaatccaacttacaagggatgtgaaggacgtcttcaaggagaactgcaaaccactgctcaaggaaataaaagaggacacaaacaaatggaagaacattccatgcttgtggataggaagaatcaatatcatgaaaatggccatactggccaaggtaatttatagattcaatgccaccttcatcaagctaccaatgactttcttcacagaattggaaaaaactactttaaagttcaaatggaaataaaaaagagcctgcattgccaagacaatcctaagccaaagaacaaagctggaggcatcacgctacctgacttcaaactgtactacaaggctacagtaaccaaaacagcatggtactggtaccaaaacagagatatagaccaatggaacagaacagagccctcagaaataataccacacatctacaaccatctgatctttgacaaacctgacaaaaagaagaaatggggaaagcattccgtatttagtaaatggtactgggaaaactggctagccatatgtagaaagctgaaactggatcccttccttacaccttacacaaaaattaattcaagatggattaaagacttaaatgttagacctaaaaccataaaaacccaagaagaaaacctaggcaataccattcaggacataggcatgggcaaggacttcatgactaaaataccaaaagcaatggcaacaaaagccaaaatagacaaatgggatctaattaaactaaagagcttctgcatagcaaaagaaactaccatcagagtgaacaggcaacctacagaatgggagaaaatttttgcaatctacgcatctgacaaagggctaatatccagaatctataaagaacttaaagaaattttgcaagaaaaaaacaactccatcaaaaagtgggcgaaggatatgagcagacacttctcaaaagaagacatttatgcagccaacagacacatgaaagaatgctcatcatcggagaaatgcaaatcaaaacgacaatgagaaaccatctcacaccagtcagaatggcaacattaaaatgtcaggaaacaacaggtgctggagaggatgtggagaaataggaacatttttacactgttggtggaactgtaaactagttcaaccattgtggcagacagtgtggtgattccttaaggatctagaactagaaataccattttacccagccattccattactgggtatatacccaaaggattataaatcatgctgctatattcatggaactagcccaaatgtccatcagcaatagactgggtgaagaaaatttggcacatatacaccatgtaatactatgcagccataaaataggatgagttcatgtcctttgtagggacatggatgaagctggaaaccatcgttctcagcaaactatcgcaaggacagataaccgaacactgcatgttcgtgctcataagtgggaattgaacaatgaaaaacttggaaacagggtagggaacatcacacaccagggcctgtcatggggtaggaggagggtggagggatagcatcaggagatatacctaatataaatgacaagttaacaggtgcagcacaccaacatggcacatgtatacatatgtaacaaacctgtacgttgtgcacatgtactctagaactttaagtatattaaaaaaataaaataaacttcattttttaattataaatattaaaaaaggttcaactgtcagtatactaattagttattttctgctgtctattagaaatgtatgaattttaaaaaacaggtatattaaagagttaatgataatatttcttagaaagtcagctcctctagtgcatttaaaatataattcagttagtctagctagtggcctatctatctcattaagtttttcaaaaaaacaactcctggatctagtgacctttcgaatggtttttcatatcttgatttccttcagttcagctctgattttggttatttcttgtcttctgctagtttggggttgatttgttattgctgctctaattctttcagttgtgatgttaagttgttaatttgagatctttctaactttttgatggaggcatttagtgctacgaatttccctcttaacactgccttagctgtgtcccagagattctgatgtgttgtaactttgttctcatgagtttacttgtgtaacaaacattcacgttacccgtgaacctaaaagtttaaaaattaaaaaaaatatataattgaacctataagtacctagtttatagcattttttgtcatgtgatttataaatactctatttatcaaccttttacagagtcagtctcctctagaaaatgagttttactctttgaaatcaggaataggtgaggacctgccacagcggtaactaaagaagaagtgaagtgttgcctcatttatgtttagaaactatcagaagtgcttttgttttaaaattacgtgcaaagactttagatcacacctacgtttcaaataccagaaattgaaatgaactgttaatgtattggagaacaaaagggcttagttttaggtaagaagtgtaggcaaaaaggcagtagtccattctgtgttcagttgtctttgaggtaataaaatttagtaacagtttgttagctaaaggatacataaaaagcacagtccctgttatgtaatgtttcgcagttataaaaaatttgattagccaatcttgctttggtttaaaaaggaggtcgttttgtgcttcataaaacatctcgagcagaaaatctttatgactttatgttaaatggcaggcaaatattaggaaagaatccgtcacttttgttaaaaattgtagcagggtaacatttaatcttgggactatctgcttagtttattaattacataaacaggtatccctgttgtactactaatgactaaattcatcttttaaagaataaagtaaggcttatgtgagagaacattgaaacaaagtcattgttggtccaaatgatttgcttcatagtttcttagtaattaaagctgtttcctttttggaagggagccatatttctaataaaagattagcttgtttctgcacagtgaaatttgaatatgagtatttgctttttgtagctgtgaaatgagactttttaactaagcatgattaattatgataggtgaataaactatgataattaaatctttaaatcagatacatgatgtataattccagaggtctgacaaaaatatcaagttgaaagaaaatactggcaaaggtcttggcttgtcatttataagctagaattaaaaatcattacacagatcacagatgttagatatctccaaagatgacttagaggaagataataaggatctgatcatttagatattttatttttcaagtagtcacttaaaattttaaatttttgaccttggggaaggggcagctgtgggcacagcttcagcaaacttaaatattcttgcctgccggctctgaagagagcagtggatctcccagcacagcactcaagctctgctaagggacagactacctccttaagttggtccctgaaccccgtgcctcctgactgggagacacctcccagcaggggttgacagacacctcatataggagagctctgctggcatctggcaatgcccctctgggacgaagcttccagagtaaggaacaggcagcaatctttgctgttctgcagcctccgctggtgatacccaggcaaacagggtctggagtggacctccagccaactccagcagaccagcagcagaggggcctgactgttagaaggaaaactaacaaacaggaatagcatcaacaccaacaaaaaggacttccactcagagaccccatccaaaggtcaccaacatcaaagaccaaaggtagataaatccatgaagatgaggaaaacccagtgcaaaaatgcggaaagttccaaaaaccagaatgcctcttttcctccaaaggatcacaactccttgacagcaagggaacaaaactggatagagaatgagtttggtgaattgacagaagtaggcttcagaaggtaggtaataacaaactcctccaagctaaaggagcatgttctaactcaatgcaaggaagctaataaccttggataaagggtagaggaattgctaactacaataaccagtttagagaagaacataaatgacctgatggagctgaaaaaaacagcaccagaacttcgtgacacatacatgagtatcaatagccgaatcgatgaatcagaagaaaggatatcagagattgaagatcaacttaatgaaataaagcaagaagacaagattagagaaaaaaaaaaaacaaaagggaatgagcaaagcctccaagaaatatgggactatgtgaaaagagtgaacctacgtttgattgatgtacctgaaagtgacagggagaatggaccaaattggaaaaaactcttcaggatattacctaggagaacttccccaacctatcaagacaggccagcattccaattcaggaaatacagagatcaccacaaacatgctccccgagaagagcaaccccaagacatgtaatcgtcagatttaccaaggctgaaatgaaggaaaatatattaagggcagccagagaggtcgggttacccacaaagggaagcccatccctgttagtcttaccagcggatctctctcagacaccctgcaagccagaagagagtgggggcctatattcattaataaagaaaataattttcaacccagaatttcatatctagccaaactaagcttcaaaagcgaaggagaaaatcctttacagacaagcaaatgctgagagattttgtcaccaccaggcctgccttacaagagctcctgaagaaagcactaaatatggaaaggaacaaccagtaccaaccactacaaaagcataccaaattataaagaccattgatgctatgaagaaactgcgtcaactaatgggcaaaataaccagctaacatcgtaatgacaggatcaattcacacataacaatattaatcttaaatgtaaacaggctaaatgccccaattaaaagacacagactggcaaattggataaagaggcaagacctatcagtgtgctgtattcaggagacccatctcacatgcaagacacacataagtttgaaataaagggatggaggatgatttaccaagcaaatggaaagaaaaaaaaaagcaggagttgcaattttcatcactgataaaacagattttaaaccaacaaagataaaaaaaaaaacaaggcattacataatgataaagggatcaatgcagcaagaagagctaactgtcctaaatatatatgcacccaatacaggagcacccagattcgtaaagcaagttcttagagacctacaaagagacttagatttccacacaataacagtgggagactttaacacctcactgtcaatattagatcaacgagactgaaaattaaaaaggatattcagaaaaaaaaaaagggatattcaagagttgaactcagctctggaccaagcggacctaatagacatctacagaactctccaccccaaatcaacagaatatacattcttctcagcaccacatcgcacttattctaaaattgaccacataattggaagtaaaacactcctcagcaaactcaaaagaatggaaatcataacaaacagcccctcagaccacagtggaatcaaattagaagtcagcattgagaaactaactacaaaccgcacaactacatggaaactgaacaacctgctcctgaatgactactgggtaaataacacaattaaggcagaaataaattagttctttgaaaccaaagagaacaaagacacaatataccagaatctctgggacacagctaaagcagtgtttcaccaaatgcccacaggaggaagggggaaagatctaaaatcgacaccctaacatcacaattagaagaactagagaagcaatggcaaacaaattcaaaagctagcagaagacaagaaataactaagatcagagcagaactgaaggcgacaagagacacaaaaaacccttcaaaaaaaatcaatgaatccaggagctggtgttttggaaaagatcaacaaaatagatagaccactagcctgactaataaagaagaaaagagagaagaatcaaatagacacaataaaaaatgataaaagggagatcagcactgatcccacagaaatccaaactaccgtcagagagtgttataaacacctctacgcaaataaactagaaaatctagaagaaatggataaattcctggacacatacaccctcccaagactaaaccaggaagaagttgaattcctgaatagaccaataacaggctctgaaattgaggcaataattaatagcctagcaaccaagaaaaggaccagagggattcatagccgaattctactagaggtacaaagaggatctggtaccattccttctgaaactattccaaatgatagaaaagagggaatcctccgtaactcattttatgaggccagcatcatcctgataccaaaatctggcagagacacaacaaaaaaagaaaatttcaggtcattatcactgaggaacatcaatgcaaaatcctcaataaaagactggcaaaccgaatccagcagcacatcaaaaagcttatccaccatgatcaagttggcttcatccctgggatgcaaggcccgttcaacatatgcaaatcaataaatgtaatccatcacataaacagaaccagtgagaaaaaccacatgattatctcaatagatgcagaaaagtctttcgataaaattcaacatctcttcatgctaaaaattctcaataaactaggtattgatgagacatatctcaaaataataagacctatttgtgacaaacccacagccaatatcatactgaatgagcaaaagctggaagcattccccttgaaaaccagcacaaattattcataaactctttaaaaggatgctataacatttttaaaaatattataagcatattctaagttacaactgtgtactaggagggcaccacacatctttttttttttttttacagactttaaaaggaaaaatattgaaactaagaatttttgtttttgttttgaaaaattacaggatctcactctgtaacttaggccaagtgcagtggtgcaatcatagctcaccgcaagctccagctcccaggctcaagggatcctccctcctcagcttccccggtagctgggactacaggtgtccactgccatgcctggctaatttttttcttttttaaagtagactgggtcttgctatgttatgtaggctgaagaatattttcttttaacaatggtaaaatacccataacataaaatttaccatcttattcatttttaagtatataaactaaaaatattacaactttataaggtaaggattcaattcatacaagtcagtagacagttatatatttatctttatataccattgagaataaagccaccatgaaattgtttacatttgtttttcaggtcattacttctttttatgtggagcgtggaggaaatgctatgtccttcatgggaaaaggtgttacaaagagcacaattctttgcttgcttcacttatcccatgagatgatggcccaggctgggagcttggtgagcgcgttaaagctgtctatcttctgaacatttgcttgaaagggaatgtgctgtgtccaacacatttcaagcatataaacttgccacatgaaaatgtctcttttgacttttctttttaggtaacgtgaatgatttttgactagaatatttcttagaagttgtatattaacaaatctgaatcttatttgaaattgattcaaatgtgcatacactggaaaactacattttgtctacattatgggaaaaatagcttctgtcaaaaaattgttatgtttaactttttaaagagaaacaaatttttttgtttgccttttttggctgaataatggattaaaaccaagtctaaaatacattttcacgttgttttcattaaaaattcttgttttaaccttcctgcattttatttttagaaacttacctcaaatatttctgtttcccttttttccctctaggagtggatgtcactttggttcttgcctttgggtagtcatagtgaagaacatattcctactcaacaaggattggcttggttgattccattatgggttgatcgggacccagaggtgagtgtgaaggagaatcaagtgtattgtgtttagattaaaaaacaaatgacacggggccaggtgcggtggctcatgcctgtaatcccagcttgttgggaggctgaggtgggcagatcacgaggtcaggagattgagaccatcctggctaacacagtgaaaccccatctctactaaaaatataaaaaaattagctgggtgtggtggcaggcacctgtagtcccagctacttgggaggctgcagcaggagaatgctgtgaacttgggaggtgaagcttgcagtgagctgagattgtgccactgcactccagcctgggcaacagagcaagactccatctcaaaaaaaaaaaaaagacacaaaacatatatacatatacatagttatattatgggattattgtagtgactctaccttatgttttatttaagccctgttttagcttaggctgccataacaaaataccacagactgggtggcttagacaacagacacttcttttctcatagaagttttggaagctgaaagtccaagatcagagtgccggcatagtcaagttctggtgagggctcttcttctggcttgtagacggctgccttcttgctgtgtattcacgtggcctttccttggtccatgcatgtggggcaggggagggaggggtggtatagagacagatttgtctttttttttttattataatgttaccagtcttattgagataggaccactcccttatgatctctttaaaccttaattatctcctagaaaccctgtcttcaaatgtagtcacttgagcataaagacttcaacatatgagttttggagggacgcaattcagttcatagttttccatccctgagcccctgaacttcatgttcttcttccatgcaaaatgcttttattctccctcaacaacctcaaaagtcttaacttattcccaaatcaactgtaaagtctaaagtccaaaatctcatctaaatgtcatttaaaccacatctgggtaagtctccagatataaaccctcctgaaacagaattcttctgcaggtgtgaacctgtgaacccatacaagttatatgcttccaaaagatgatggtagaatagacattcccattccaaaagagagaaataggaaaaaaaggaagaagtgatgggtcccaagcaagtccaaagcctagcaaagcaaatttcattagatgttaatgctcaaggataatgttctttggcttgatggtgtgccttacaggcccaccagagtgacagcatctgtctagatggctctgtgggatgaccccacccctttggctgtcttcaagagccccgcccataaagctgtcttcaagggcagccatgttcctgaagcactgggcagggtcatcattctggcccacagaaatcagaggtctttgaaaccaaggaggaaaagccacccttgagtcctgtggtgggattagcagcctggggatctctgaatcattttttgggtcattcttttcattgaagaatacagtagtcctcccttatcagaggtttcattttccaaaagcaccctgaagatcagtagtagccaaaccctccctcacaatgcctacatcattcacctcacctcatctctttatgtaatcattgtatcatctcacatcaatacaagaaggctgagtgcaatacaataagatattttgagagagagaccacatttatgtattttgtattataacatattgttgtaattgttctagtttatttttagttattgttaatctcttactgtgcctaatttgtaaactttaccatagatatgtatgtgtaggagaaaacatagtagttatagggctcagcactatctgtggtttcaggcatctactgggggtcttggaatgtattccccatggataagggagggaccactgtagcacatatttgcttacagaatccaggaagtccaacagctttccttcattctctgcatctttctctgtcctctttagttcaaactggcaatgtctttgctgatataatcccatctctattcctggcttctgctgagatgtctgattaagtccatgaattgcacccgtgatctttttcttaaatgggtattcagccacaccctccatgttctctttagaacaagctttctcattttttttgcacagataggctgagaatttttcaaatcttgttcttgtttctttttgcttacccattcttaattccttctttaattcatctctctccctttgcattttgctataagcaatcaggaggaaccaagccaatttttcaacactttgcttagaaatcttctcagctaaatatccaatttcattgctcacaagttctgcctttcacaaaacactagaacatgaccacagcttaaccagttttcttgctactttataacaaggattgcctttcctcaaataaccttttttaaataacactttcctcatttttgtctgagatctcatgagaattacccatgtctacgtttctggcatccacctcaaaactcttctagcctgtaacccattacccagtgccaaagtcactttcatgtgtttaggcatttgtttcagcagcatccccactccttggtacaaaaatctgtattagtgtgctcaggcttccataacaaaataccattgtctgggtggcttaaaaacagaaatttatttcttacagttatagaggctgcaagtccaagatcagagtgtcaacatggttggtttctggtagggcactcttcctgatttacagagggccaccttctcactgtgtgctcatatgacctctccttggagcacgcacatggagaaagatttctctccttcctgaggccaccattcctagtgcagtagggtcccacccttataacctcatttaactgtaatcacctaatagctctgtctccaaatacaggttggggattagggcttcaacatacgagtcttgaggagacacagttcagtacacagcaccctcattttcaatcaaatttgttcgagtatagattgaaaatataaaagagaaaaggttatagtatctattaccttcagaagagtggaaaattattggagaagcttagcaattttgaaaaaaataaaaaggatctggaaattatagacatgcaacacttaagtgtcatataatgaaattaaattaaatgcaaaaaattgcatttgcattacaatacaaaattttgtattatttctttccagttttagccagtttacttttttcaagtaaaatatgctattacaataaaatcttatttatagaaatatttgaaatacattttttagtcacattgaacttggacttactacttgacaattttatgactgcatttttaaaaaattctatagctgtcattgaaactatatttttggattcgaattcagaaatttaccaaaacgtgtggcttgaacagcagtggttctacagcaagcatattataccacatcaatcttatttgggaacgtttttctcttgaataacttttgaggaaaatacgaaatgccttgtaaaatgataattgcctctttgtttagaagttttaagaaagttaaaatcatttatttggaagaaacaataaaaaattaagaaaggtagaacaaagaatagctaccttttttaagaatgaagaattgaaattgtgttcataaaatgtaagtgccctatgctttccttagaaaaaggcttgcaaactataatttttatgcatctttttatacccagttttactttgctttgaaatttgcttatatttaatttttcctatattactgctttcttgaatcatggaatggaggacactgtcttctataggtgtctcttataatttaggatcataaaaccaatggatttttttaaagtgtgatatttatgtaccagaaaaactaagaattcatgttaggaaaaaggcttatttgattcaacaactttctctttaatttgaacaggtgagattcacttcactgggattaggatcagcactgaccacccttgaaacgggctgtgtggccttagcaaacagttgtcagaacatttccggtgggctctggggaactgtggtgaacattcttctggaccagtcagaatgtagtatggtgcgccgggaggtatgtctgtcttttctcctttttttccttagaaattctttgtgatggtatccgtaagcgatacttgactgccgctcaacatggtggactgaccactgaccatgatctcttctgtctgtgaacacccaaacaaaatgacagtagaggatttaaaaggtattcatgcacaggaaaaactggagtccttccttccgataagataaaatcggaatatactatattttaatgtgaactttttttattatgcattgaaaggtagttcacaggaaaaattacttttatattatctcagcatttatgggtctctgatatttatgaagctttagtatagataagaggctgtcaaaataactctttgtagtatttatcatataacatgagagggaaaaataaaccctattttaattctttctgaatagcttgtggtttttttttattgctgcttttgttaaagtaatgattcatgtaaatggttttaaaacaataatcaaattgtacttagaggcttatgaaaaaaaacagcagctcctgggtccaccattagcagtcgccagttccaagctcaaaaggctagttttgttgctgtttgccttcatgtttttaagtagtgatgtttatatttatggctgcttcttgatttatcaactttaaagcttttccatcacttctagttatcatggttggaaatgtcagtttcttagaatcctcttgttaatcctgtcattctcccattatggttatttcatctttcattaagcagacaatcaatgctcctatttgtatgattatttaatttgatcatcttcaggatctagtcaagttggacatttgtggtttgtatttctagttagcaagtttttattgaaaggagtctgtataagagaagggagaaagcggggcagaggggtgcgtgtgtttgtgtgtgtgtgtgtgtgtaatctgaaaggggatagtagaaacctaaaattatatttcttaaatgctaccagaagaatttatgttatacaaatcattttttaataaagctgaattctgaaataggaaaagatatatttcctgatgaaataatttcatatgctgttaggtcattacctaacaaggtcattacctaagaaggtcatcacctaacaagaaatacagtttgacaattctcataatgacctctcagcatgtgcagttgaccagagatgtcttttgctattaattacaatatattggttatttcagagatgaccacaagatggcagtattgacctttttttttttttttttttttttttttttttttttttttacattttcaggcggcatttattcttcagaatctccttgtaattccaatgcctacagaaattataaaggattatacttggcaggtgggtgattttaaacaattatcaacctagtagatgtttcaaattaattggtgataaattttcagtataagtagtatatttcattattgatgaaactatatacaagacagcaagggcctcttaaaatagaacgtagaatttgttcttatgccgaccagacttaaaaattcttctctatagtgttcacaataatttaaagcaaataataatagttaacatatgtttactatgttttaggcacccttctagaaatgtaagacatagtaacttgtataattgtttgagttgtgaactgttactatccttattttctaagcttaggaacttttgcatagagagtttaaatagtttgtcctaaatcacacagctagtcagtggtacgcctttgctttgagtctaggcagtctcttacccactttgctgtattacttctctaatttagtaataataaacaaatttgtagatagttaaatatgtgttgatgttaacatctttttttccttttctaggttagtgcacagtgcgggttatagtgtatcttgctttgttttctgttgggttaactttctttttcatgttctgaatatcacatcagtaaatggttacctaacatttttatagcttacattaaaaaaattctagcttcatgggatatatgtacatgtttgttacataagtatattgcgtaatggtggtggggattggggttctcgtgtactcattacccaaatattgaacattgtacccagttaggtaatttataacctcagccgcctcccccactccctccttgggagtctcagtgtctgttatgtctgtctttatgtccatgtgtattcattggttagctcccacttatacgtgagaacacgcaatatttgattttctatttttgagttagttcacttagataatggcctccacctccatccatgttgctgcagttttaggtaatttggaagatacaaaagtacacttattggggatataagatgtgctgtttctgtccttttacctatccatatattttcaccttatagggatatatttatcatattgctacacctcactcctcaaaatcctgtataaatctaaggtttatttttaagttttaattagactatactcttagaggagttagtgaaacaagctgaaccgtagcaagggcaagtttccgcacatgacccgaagcatgaatccaggtggttgtcaaggcccaggtagcatttaactcttggaaggcttacctctccaaactttacaaacccagggtaaccctaccagtcattgtaaatcccaggcttgtaatttgctcgtaatttctttaacattgccttctgataatggctgcttatctactttccatgttgtaataaaaccaggagacaaaactggagggaatatgcaggattaatagttatattaatagtgtagtagttttggtacctgttatccggagactacattttaaaacatgttgtttttggctcaaatacaaataatctctactcccattgttaaactagtgacccatgtacatggatatacttggtgatgtactaccaatgaatttttaattattgaaataagtataaaggcagagtatattaaagttcctgggacattatgttgtaatacagaaccgtatgtagctgttcatatttttctcttagaaattaaatagtaaagttcctgtttgttgctggtggcatgcttactgcagtttattggttttgttattctccagtcttcatcatggaaatccttttctactaaaaagtggaaaatagtgatttaagttagcttttggagttttggccttgctaagttggccaaaataaaaaaagttggagagccactgctgtcccaaacaatagttgattacaacttttgctagtcttaggaaaaattagataaataaggacaatcttgtatgctttttaataaactcagattttcttcctctcttttcagtctttttttttttttggttatttttgtttgtgtaagtgtccttccttggcagtgaaaatagttaactcagtatatctgtcatccaattttaagaaagtttagtggggtctgaaattccaaagtagaaacagcttctgcaagaaggaaacaagatggttgtctctgggtgcagctagtggggcacatggtcctttgcaaccatgaaaaaggggccacatagccagtattttaaaattcaaacagtctttggtagaattatgaataataatcttattcaacaaaatgtttcatttacttattttagtgtccctttcatagtgttgtggaggatatagcatgaaacagcatgtttaggagctttgttaaaattttattttggttgaggtaaatatttgattttttttttttaacaaagagaattgcttctattgctttgcactttgttttcctgcctgcagtctaaattaatgcccgctagtgctcttgtttcataggctttctgaagcattctctttataattactactccttttcctctccttcctctgcacagtagcataaattcctacttcatgtcatgacatagaattgttgtacttgtgaatagtaataatatgcatatatgaattatgaataatattatagctgagtttcccttttattgttagatgccagaaagtagagcccttttatcaattgtgactttttctgtatgtacttaaaaaaaaaaaaagatggggtctcactgtgttgtccaggctggccttgagttcctgggctcaagtgatacgcttgcctcagcctcctgagtagctgggaccccaggcacatgctgccacacccagcttaccttctaagctttattcatggttgcactttttccatatctctggcttttttctttcttttattcctgatatgcatttactatcatgttacaatttacctttccttgtaatgggccttaaatcttttctcggacaagataggaagtaaataatttaaaacaatttatttttttaaagtattaaataattttaccaaccactgcaattcccattttaatcttccttttaaagacactaacatttaatgtcttaccactaaattaggttattttccatatttgcattatttcttaccatttaacttaatcttcctgtgtagaatgtttgtttctgacaggactacattttttatattttaaaaaatgtttctcccaacccctaccacagagaaagtaagtgctccatctgtcttgactgattcattaaaatgtgcaaaacatttgagttatccttttggtcttaatatcataagtaaatacagttagaaataaagccttaattttcatagcataagtccccttttatttttctgtggatgcagaagcatactggaagtggggtggtcaccaagaggaggagcagatgaagtatctcggcctgtcttcccttgacatctagcactcctaccaggggccttgataccaggcccctgctggatatgagaacccagttcctgctgtgtcagtctttggtgtgtcacagctcttttatattcaggacactaacttttcagagggatatttacaaacattggtcttgttcttgagtcaaactcagcctcattcaaagctacatcccagctgggtgtggtggctcatgcctgtaatcccaacacttggggaggctgaggtgagaggatcacttgagcccaggagtttgagactagcctgggcaacatagtgagaccccatctctaaaaaaaattttaaaaattggcctggaatggtggcatgcacctgtagtccctagctactcaggagactgaggcaggaggattgcttgagcccaggagtttgaggccacagtaagctatgattgtgtcactgtgctgcagcctgggtgacagaacaaaaccctgtctctaaaaacaaaaaccctgcatactacattctctgccaagaagagaaaacagagccaatattcagttgacacgaaactgtattgtggctcccaactgtccagtgtttttcagaccagtttcccacagtctgactaggagttaagactcctgaatgtggatggtttcataactgggtttagtttgaagactagtgtcagaaatccgtatccctgaaactttaacaaccaattttagagttgattataacaagaaatctattgattagagatggattattgatgtaattttctcagttcatttctgtaaacatttgttgagtgtctaaatattggagattcacagataatccaatttagtattcttgggcttatggcctacaggggatgacatgtacccaggaaacattgttataatcatgttatgtatgatgatggtagcttatgcataattttaataatatttcagttctttccacttgaaaatgatctcacatttaaatgtaaagggtaatttcatgcacttaaataacataatgggttgtcagtttgtgatttaaataaacttgttcatgctctagttgctttccatgtttgtgacaggactttgaattggtacacagactttttaaactttattttgaaaaaacttagatttataggaaatttgtagaaacaatacaatttttatgtactcttcacccagattccccaaatgttattttacacatttacttcagctctgtctagtgtcttctttctaaactattggagagttgtagacataatgcttcttttcctctgaacacttaagtgtggatttcctaaaaataaggatatcctcttacataatcacaataataattatcataattaggagattactcaaggattttcagttgtcccactgctgtttttaatagaaaaaaaagaaaaaaaaatccaatcctggatccaagatccagctcaggaatacacattgcatatacttgtcttacatatttgctttcgttcatctgaaatagtttcaaaattttaaatatttatgatcttaacatttttgaagaatgcaggctacttatttgttgtaatatacttcaattagatttgtccttttccccaggtttagatttgagttacgcatttttggcagaaaaaccatagaagtgatgggttctcagtgcaacatgtcaagagatattatatctctctttcccattgttggtgatactaactttgattacttagtaaagatagaatctgcctgttttgtcctttgtaaagttacagttttttcttttggaaggaggtgctctgagactgtaaatatctgtttctcatcaaactttctttcactagttttttgttttgttttgttttacttttttttcccccataggttattggggaacaggtggtgtttgattacatgagtaagttctttagtggtgatttgtgagattttggtgtacccatcacctcagcagtatacactgcacacagtttgtatcttttatccctcaccccttcccacccttttccctcaagtccccaaagtccgttgtgtcattcttaagcccttgcatcctcatagcatagctcccgcttatgagtgagaacatttgatgtttggttttccattcctgacttacttcacttagaataatagtctccaatctcatccagatcactgcgaataccattaattcattcctttttatggctgagtagtattccatagtgtgtgtgtgtgtgtgtgtgtgtgtgtgtgtgtgtgtgtgtgtgataccacacacaccagtttatccactcattggtggatgggcatttgaattggttctacatttttgcaattgcaaattgtgctgctataaacatgtgtgtgcaagtatcttttttgtataatgacttcttttcctctgggtagatacccagtagtgggattgctgaatcccactggtagttctacttttagttctttaagaaatctccacactgttttcctagttttaaattccattcatgattcttacctgaaacagttattacagaattgttgccaaatgatttcctaactccatcatttctttctatgtttattacatgctactgtaaggaagaacttttcattcttccttgcttatttagtgattcacttatttacaccagcatggattgaagattcttaagtttgtttaatgggctataatctgtttctatcattatttgtttcaatgttcaaatcattcttgctttggccaggggaaatttcttcataatggttcttgtgtctttatcaatatttgagccatttccttacttctggtacagcaaagtgttctagactgtccagctccatcctggaatcagatatttgctccaagggctctgatttcttttcatggagaatggtatttagaaaccaagatctgcgttctagatgtattcattgttcctggggtgtcattgcttctatgtcctgtgagtgaacaaagctagtaattgtctgtgtatatgttttaaatagtcagctcatttatagttatatattattttgatatttgatatgattaatatgtattatttttatcttttgtttgttatgaagcatcatgagtatttccagaagacaatgagtacttggtaaactgatatcattgtaatgatattcatattttacatgtagttttggatttctaatgtatttagggtcatttttacagtctttggattatagcatttttgttatatatgacaataattcatttttctccttgaaaatattatatcttcttaaatgttattcttactttgcttctagtaccttttcaattatagctaatgggtatattagcactgacactaggagtataatatgcattttaaaattagtattctgatttattgcattcttgataaagatgttttcaaattaattggagcttgatatgacataattaatttgcagttttctttgtaaatgtatttgtaatggcattctggtgatttgaagagctttcttactttccttctcagctctctctggcaattcagcagacgatctggcagccccagaactcacctgagggcaaggctagtcatgatacagaagtcttgagacagagcaattagacctgattgctctaatttccccactatgctagaagataaccccatcaattactgatggatgtatggagcagagcctagtgtgtgcatgaaagacttcattgttctggcccttgaaccattagttatctgtgaaagcctgagcctggccatcctttgtgcatatcctgggcttggctccattataaagctctcttaataagtgtagagaatggggattcaggcttaatgcttagttaaataaaaaataaaataatttttatgtaatatgtgcctatttcagattactcggttttcttttgagcagttcaagaatattttgaatgcactaattgaactttttagaagaaatttttttttcaagtaataaatacatatggttaaaaaaaagctaatagagcttatagtgaaattcactgtccctctccattcactgagacagttttacctctgattttaattcttcagggagttaccactgtatatctaaatagcatgtttgcaataatatatttattcatacactactttagtacctaaggatttagctcatgtacacaatttcctgcagataccacagtatctcatagtaccatagtggtattactgctcttatttctccactggtcacacttgctcttcctggttttgtcacccatgcatcatatcttttgaccccaacccattttgagatgagtaagacatggctgagattgtacctgtcctttcttcagtctttcctctgccgtttctaatacccatctttaatagttttatttttactttttgctttgtgagcgttgattatgtttacattctcatctgcagtctcaattttatctgtaggttgcttctaaaagttgaaaaccgtaactcactacagagacacttagtgggctgtgattacactttcttatctcggcttccaggaccaactcatctaatactcagaggaaaagttttctggtatttgtatgtatgtatacatgtatatgtgtgtgtgtatatatgtatatataaaaatataatttaaaaattgatttgggtgatttattttcccttgaggttcctgtttgttttttcttacattgtgggtccatatcatgtctcatgtctaaagtttttctaagctcttaatcatcctttctcttctgttagaatttcttttcctagtcataattctcaaaatgattgtagtggtaactagtgacaagtgcatgagagataaatatcacaagttcttgcatatttgaaaatgtctttaaattgcactggattgatagtgtggttagttaccatatgtttggtgaagattgttcctcccaagaattttgcttcactgtattctagcatccagtgctactgatgagaagttgaattttcatctgactctttttacttctttatggctgatgttttctttcattatcatctctttgtcctcaatgtttagaatttttttattatgtaccttttttccatttttcttgcttgacatttattaagctccttaatttgaagatttggatcttctatatatttttttggctctgacaaatcttttcatatttatttcttttaagatgaatttcctttttttgtgtgttatattttatctttccagaaattgtaagtcccttattaggcctcttgaatttattttctctgatttccttttgtatttctatatcttaaacctttttgcactattttctatgatattaaattttttgttcataagctaaattagcttcttcaatcttggtaggctaaataatttttaccatgatttataaacagaggaaaaatagaacagattctaaactttatttgatagatttagttataaatttgtgtctcttattatgactttcttacctatattttctaagtctgtgtttatattaataggaactagaaaagaatttttaatttattgaagggaaaatgtgattaaactaggttctttatcactgtgacaattttacatatttagagaataattgcaagagttctaataccatatttacatgtgtaacttctcacttctaaaatacttaaaaactaaagaaatgttagattttagaagacagtgggtttgtaactcttgtcttcctaacagttggtatggccatcagcctcagtaggccttgaacagaataaagaatcagcagatttaagatctctcaaagagctgtagatgtcatttttttctgtttttaagatttatacagtttacattctcttctctattttcattaaaggtttgtgaattttgggttgtggtaactgatagaggaagcattcatgtagacataattttgcaaaaatatgaaaaattgcataattttatataatctgtatggcaaaatatttttaagtggttctttgtatcattataaaatatattttgaaaactagtttttgtacaactttgattaatcacttttgatttattgaattttttagatggagtgaagctagtaaaccctctacaattcttgtcttatttgttaattccttccctatattattataatgaggactctaatttgtgatgttaagcagtttattgcaaatctcttgggtgtttggcgtgttttgtacgtttaagtatgttataacttgcttaaaagatagaatttcttgaagctgtgaatgttaagattgactgtgattttgggtgaatacttcattctatataataaaataaggtaatgtattaaagggcgccagtacctgtaacatataccttggttaataaacaggagccacataaccccattcactttgtattactctctattttacctgattcttctagacctctgcatttaaaataacgacagtgaccaccatgtgctggctgttcattacagtagtcttatttcttatataaattgctctgtttaggacgagtaagctcacagtgttggtagatttattacaacacagcagtaacaacttcatagtcataaaagacattgaatattgaagaggtttaattataatgatgtatataaatgtccttaaaaagaagtgttaatagaaataaccttgttagtgtaatcgtgcctttaacttgtgaattcctttgtcttcctgaagagtaagttaaaatatccatcttcttttggtgatggggagggtgagagaacagacacacatacaaatcttatggttaaaggtcaacttgcaatatgttttgaacgtatctttcctgttggctcttagatttctgtttgctatcttttatttttctctctcttatggcctgttttgaaatcttaactttattatcatttcccagaaaatagaaatatttataaactaatggtaggattatttgcaaacttcaaaccaatcctcattgcttgctttttgctattagatactccaggaaaagtagtaagtcacaatgcaaaaaattgtttgggaaaaatgcaaagagaaaaattgtgtaatagcagattcttttcagcctcctggtggcagttcatgtgtgtgtatgtatacatgtgtgtgttttttttccttgtcaggattaattcagtgggaagtaatgtgacagattttgccatatggatattgatggaccttttcattttacctggcttagtgataggtataaaaaataattctgaacataatatatggaccaccttatttcatatattttaacacctattattttactattatatgtaggttgaaaaatactgcttttattgtgtttttggtgcaagtatatgatttcttggttaaagctgatcattccatagaaacattttaaatgaaatggcccctcaagagaaagatcagctttgtcccttcacgggggtgtttaggcagcaaagacctagagtattatggaataatttgtcctaggtcaggctgctataactgtgtaaggacaaaagcagagtggaaggagatgggagcatctgggacccatttgtttcctcgagaggagacaatggatctttttaaggaaattgttggataaatcagtgtctcctccttctttccctctcttcctacagggtccctgtgttcatgatgaggactctggcctatcgctcattggaaaacctgcccttcaggctcttttatatcactgccatttttatgaacatttgaatcagatggtaaagcattgttacctaggacggtgtatgtttgatttgaatttttctgcttttgatagaaattcagaaagcaatgatttaaatggtaagtacgatatctttgtatttttatttttgtaatatgtaacttgtaaaaactgttaaaaatacatatatttgttttaaaaatttgaaaaatgaaagtatacagggaaaacattcatttccagttctaccacccagagagatgtattttcttcccgtcttctttctctgtatagcctttgtttgttttatgtaattatgttcatatcttgtgtacatttttgtatttccttctttcactaaatattctgcaagcatttttctatgttataaattcttcatggaaattatttttgacatcttattaatactttataagttatgcccatcagtacagttttatagtttctttctctgttaacgtctcaaacttttttggaactttcacttctaggcaatgtacagtttttttatccttcttgtgaatgagactttttcccactatattttctaattcattttgctcatgtatcaaaaagttatttattttagtatgttacttatttgtcacaatattttcctgaaacctttttattccttttgtttgtaggttcttgtagatttgctaagtataagatctgagcacataaaaataattatatcttgtaataaatagtaatttaataatataaatagcttttatttttaaattcatttttataataattttttagaatcttgccatagtttcaaacttacagaaaagcttcaggaatagtacaaaagaattctcaaatgttaacattttacagtatttacatcttgccacatgtgtgtgtatgtgtgtataaataaacggatatgtatgatctatatatactctttttgagccatttaagagtaagttgaagacatgaagttcctttatccccgaattattaagtgtgaatgtgtgattcacttttctgtttacttcttggaagaatcaagaaaatgagatttgatgaagttttgaacattttaaatatccctcttagaaaagtgactcacttaattgtttagatttctctggatcagttacttagagcatggcccttaaactaacagcattggcatcttctgtgaacttgttagaagtgaacactcagggcttccactctgacctggggtattggagcctctggggctggggctgaagcagctgctttagcaagctctcagtgattcttatgcacattaaaaaaaaactctccttagatttttttttttttaaatagtggtctatctcagaagccagatccatataagttttttcctttctttagttttgaattggtttcctgtaatgcgtacccttttaattaattgttacagttcctaggagggtgtccatgttaacaattttctcgttgttgcaggtttagatgactcattcaagttttggagggctccatctaggacaagtcaggatcgagatccaagttctctctccacctcagaaacaacggtacttgcaaagaatgcataagtcctttattttgaatctctgaaaaaatttgagtttgcctagtgggagagttaagaatacaaagtgtaaggttataacagctatgatttattcgaagtgctttctgcagaattttgctaaattattgtattcaagctgcacatcagtcatacattatagatacttatcttgcttttctgtgtgcgcaagccactctgaagtaaagtaactttgtgatcattagtgctataggtagcagaactggagtttgaaccagggtgtgtcttgctacggtatagctacactgaatatccctttagttgagaattttcaacctctctttcctaccttttttgatagtacgaaagtgtgaaaatatgtttttcgttagtattagaagagaacaaatcctacatgttaaaaatggttgattaccctgaaattgtgcttaagggcagggcaatatgaagaacattcaaatgattctagtgtggtgctgacagctttaaacacacttctaaatacttgcatcacatagaagtttatctggaatacctgaaatttatatatgcctgtttgcatgccttctttccttcccctttcattcatgcattagttgctttttttgcagaaaagtttgaaacactgagtatttataaggaatgattgatactaggtttcagttatttacaaacatacagaatcatttattctcaactgggaaatgttacttttaattttaaagtgtttttgaaataattagtgtattatacaacatatcaggaagggaaagatttgatacacctgtttccaggaacaaaaataatatgagaataataattatacagacattataatgtaaagattatgtttaatctatctcctagtttctcaaaagactgatactttttgctacagttttaagtctttttttccctagattcaagagaagtatttgtgtttagtgctacattggacctttgtatggaaaagtaagataattacccgagttccactagatgtcatgctttcctttccaaggtggagatagtgtgtacctttgtctcaacaagagcagtaatatgataaatgccaaactgaattgtcttaattggttatttagttcacagaaggacagcatgaaagtgtgcttaaaagtaaattttgtttgttagcctatttgtcaaaagggctatagactagccttgaaatctttgtacatatttcagtttttttgcttttagtaggtactcagtaaataataattgctctaattaactttgagttatcttagctattttgtggtgagcactgaagtcatatttatcctatacaagaaaacctaaatacaaaaagcaaaagcatatcaaccttttgaatttctctattttgtaataacatttaatcttacaggttagaatactagattttctgagaaaatttggaaatatgttattaattgtagtcattattaaagaaagaagcaccccaattaaagtgaaggtctttaacttgtttgtgtttgaatgtaacacagacttttagaaatatataccaatggaatcttttcagtttttttaaaagaattttgtaatatgtgtaaaatttatttcttattattttctctaaaggctagtgtattctgttagaatttttacagaatttactttttactttctttttcgggaggtttccaaacaacttttagaatgggtgacttttagttacaaaaatagtcttcgtaccctaattctactagttatattttctttaccatacccaagatgatgtgtatctttgtcccaacaggagaaaaatctggagagtgttttcattctgccagtgttactttaaaccaaagctgtcagtacttcgaccaaggcatactttcttatgtataaaaaaatgttgaagttacaaattgaggtataagttgagtggatgtaaatcttattaatcagcttatctgcttatttatatctttgttttgtttatctcagaattgagaaaaaatgcaatcctttattggttagttggctggtttttccattttatctttccaaggaaagcatcatcttttgatttgggtcatgtcatccagcatgctctcctgggttactatccattttgtgctgttaatgccaagttagggactttcatgctgttacctaatgtgtattagttccgttgtttggcaagcttcgtaaggattgttgggtcctgtatgtttgataaactgcagatagagtaagcagagtgtcattgttagctttggggcatcgcccttgtaaatgcttcctcaggagtggcctctatcgaactcaatattctcctcctctggggtaggaggatgcagccattaggtggtgtttttcttctcgaaatcacgtttatatccaagatggatagctgtttgtgcctcttacacacctgtgtgcagcaacagctttatgaccaaaatttggtctcttctgttgttcctgagcagaactatgtctgtatttttttaaatttatcaattgtcaaaataaaatatgtgggaaatataattcctttctttttgagcctttctttgtgaaatatgtgatctttcaaacttttttctggaacacagatttaaagaaaactgattttagtttttctaaacatttaaagagaatttttacacttcatagtcttaaaacaactgaaaagcattgttactattttgcaaaagaggaaattagggcatggagtgaggtcccactccatggagtgcatgcttgttcaagttcctagcatggtaactggtagaccattcttttgagtccagaagtatgtttgcttcctccttcactctaaggccagatgtgattgatcccataaaagatggtgtagtcaagggacagtgaggtttctttagagggaaagatgaaatgaaaagtggttttgtgtaggaagtggccactgaaatgggctttacaatattatccccttctcttttatatgcatacaaacatttgcaagggactgaaaagattcaaatattccttaggattcagtgaccacttaacaaatgacaaaagtctacttgagaacataaagcatacttagactttctaactaaatatgaagttgtgttgtactgaaggcattaacattcagaaaatgcaagaggttgtttggagtagaatgtgggacggaaagctaaagtttgatgacctgactaatcagataggagttagttaagaaagctgaatcagcttttggatttgaagaggtaagatataagagctataaagataaagatgtaaggatatttcagcagcatggaatggcatgaaacattacaactgatatgagagaaataacgtattgacactcatttgatggtagttaaaattgttttatagaaggaagagtagacagaggatagtttaagcagggatggatccaagaggctttctaaaagaaaaatagttttgacataggcatcactgataggacatacaaatacctccagcatggtgaccccaggaaaacttgaggaggtggtagtttgtgtgatgatggagagagaaagaaaatgttatactctgtttaaataaatttcagctacctgtggattatccagagtctaacaacctcttatatttagttaggaggaaaatacaagtgagacaagctcttggaaatttgtgctcttagattacacacaggatggcacaggaactgtgactgtgttgtggtgatgatctgtctctttaagtggtcctttggttagacatgcaagaatcgtctatcatcttctgctcattccttcagaggacttttctgagctttcttttttttacatatattgtacataatccatttgaattatgaatctattagttgaaataatttaaacttcttgttataatttggttagaattaatgattacaaattgagaagcatgccaaagctttcctgctcctgggcatatagagaaaggtattatttattaaaatgaacacatgaagcttagaatctcttagaaacccttcatatcttatatttttccatgttttcaaaatgtggctagacttgtactttatttttttcacactacaatccttattttctccctttgtacctttttaaaaacaattaaataaacttttttggcaccagtactgcttttgagggaagttgatggaactattacaagatcattttggcaaatacaatattcaagttctgaattaactttcaaaaaaagttaaagtgtctagtgaaatcacttgcttctgtaaggcagatacaaagaaaatcatttttgtacattgatgcatttttgcttatatgacagaaattgttttttacattccagttctacttggatatggcaaatgactctgctattttcagtgatttcaaagggactttcttaattttagctgcttattttacactgaagcataatttagaaaccttctttagttaccaaatctgcttacaaacacactgaagaacaatttttttcagtttttataagcaagatttgagtccattttatttttttattttcccctagttttgagctaaaatgacaaataaaattgtatatatttgagatatacagtgagattacttgacatatgtatatgtgatgaaatgattaccacagtcaaattagttaacacatctgtcacctaagagtcaaccttttttttttgtggtgagaacacttaagaactactctctttcaagtagactgtgcagtgttattaaccatattaaccatattcaccatgctacacattagaccatattaaccatattcaccatgctacacattagatccccagaacatactcatcttatctgaaagtttgcactctttgaccaaacatctccccttttccccagctcctatcccctagcaacatccattacactaatctgagtctgttttaggacagtacctttaagtagcatcagcctgctctaaaaagcttgtattgtcttttgtaatatctgtaaagtaataaggctagaaatatattcaaattcagatttttttgtcttaccgagggattataaattgaagatctcaggatatgtcatgtggcagatgtgaaagcgagggaaaagtctagattgtgattttgcacttagaccattctaatgaattgagcaagtgatagatacaagaattagactctcgctgttgtaagaggacaaccctagttatcctacttactgtgaggtacagagcagagcagcgagaagcttgacaggaacggatgacttcagcagactaagtttgctcttaaactaagccaattcctcctccttcacctgggatggggcagctgaagttagtctagctgaagttccgcggggacacagggggatcagggagaaagaagcaagcctctcctcgcaaacaaggccagccagctttctcaagaggtacgtctgaggacttcctctgattctaacgaatttatgctgtcatgaatgcagttctggactgagaatcctagtctcaactcagacaaatcccttaacttgtggtccttttctctaaatgaggacgtggactaggtcaggctttttgtacctatagcttcgtaggctcatactgcaccttccagtagctaatacttaatgccaaaattgtctagttattacttggattttaaggtgaaaagtaacatgtttacatatcgatgtactttatcaaatgtaaccaaatactatcgattggagattatatctaaacaagcaaagatttgagcatagaactgggacaatttgctttaatacttttttgcttttagttattaaaatagcaatatattagtttagcacacttaaaaaatagaggctagtagaaatataaatcatccataatcaattttaaagcaccatataaagcaatcattgtgtttccccaaccacatggggtaagttataatacaataaggtactttctaaaagcatcttttctaaacttgtgtatcccttctgtggactatactaaggaaaatcacatctttattaatgcctgacctttgtcatgaatcacaactttgctttcttctaatgagccaggtatttagtgggcccttataagctttcttttcccacaccgatcgttgaaaccgcaaaccaggtacctattctatttatatcagtaataaggccttcttgagtctttatcagttgaaagaatgttcagtgaaatgataaaggatttcagcatcattatccccttaacttttcttatacaaccaaaagagttgtggcaggagccagatatattagcttgtgcatagtttgtgatatcagtcttggcataggattattttcttcacagaactataaatgttgtcttgatatctgttgacaggaacattttttcacatatctctcattgccaaattgtaggcaaatatatttttaaaaataaacaagcttgctgggcgcggtggctcacgcctgtaatcccagcactttgggaggcagaggcgggcggatcacgaggtcaggagatcgagaccatcctggctaacacagtgaaaccctgcctctactaaaaatacaaaaaattagccgggcgtggtggcgggcgcctgtagtcccagctactcgggaggctgaggcaggagaatggcgtgaacccgggaggcggagcttgcagtgagccgagatcgtgccactgcactccagcctgggcaacagagtgagactccgtctcaaaaaaaaaaaaaataaacaagctttaggttatttttacttagtatctggatctaatactatataaaataaggcatttgatgtttgtttatgattgacttatttagactgaacttttttccagatttactttttagattatgtgcttagcctacattttttagctgcagctttctcacttatttcttggcatcatgactgttatacttacttaatgtggtgaaagatggttaagggctcaagttaaaagggggatttaaaaaactgtatattccatttttagtaatttcttcaaatttatattctctttactattagaaactgcaaatgaaaataaccttagtttttgctttcatttcatcatggtaattctaaggtactctaagtgttaagatatatacacaatcaatgtacaaatactgtgagctatataggatctgagtctggaatgatggtttataacttctatggatagctaatgttgtgttgcatgtactgatatggaggctacccaggtatgggcacttcatgttacttcacagaagagaaattgatggtaaggaaaagagttatctgacctcaccacataagtgtttttcaactaagaggtgcttagttgaacacctcttagcgcaaacacatcactttgcgctttttcagtcttagaaggtcggtctgctcattataaacctgtaggtgaaattgtacttgctttccacggattttgttatatttaatgttgtattctgaagcaatctcagcaaactggcacaattttttagtgttcttccttgataggaggtgaggtagagaaaaatcttttaatacttctaattttttaggcactattaaaatttatatgtgccatttggaacattaaaaatatctttattgtcaatcaagaaatgcaaaatatcacaataaattatagttaaggtggtatattttagcctttctaacatttgggcaatgagggaattggccttatgggaaccttaaactcctaaatgggcctgaagtcaatactgctcctttgagttactgatttatgtaaatgataacaattcctttaagaagtggaaatgccatttaaaaaaactgctgtaactcccaagatatggaatcttttctagttatcctaactagtataattttgtcttaaacctccttgtttaaggatatcttgtgtgtatgttgcctgtgtttcattttccgtactgtaacattaataagtaaaataatttactgattcataggtggcaccttcattggggagtactgaatttcagccacttgtgcagtcaacaacacttctacctgaagcctcccatgacca

SEQ ID NO: 15787 - DNA, 136074 bp, Homo sapiens
aggaaaactaatcctaaaatttccataagataggtgatagaagtatatacgaaacttactttcagtggaaagtaattcctagtatttatttacattttagtttcagataattttgatgaaaacgcataaaatttagagtaagataatattatggtctgtttgatctcacctgataattggtgaaaatgaaaagctgtgtttttcctcctggcccaggttgtagaatgtttggtacaaccatgcctcacactcttgaggaaggttttatgtggtgatccagtcatgcgtgtttcgctctcgcaacagtcttctcttttgaccgtgttattcagaggtaaataaaagaaaatctgctaataattagattgttcttaaattttaagtgtttcttctttaattgtaagtcacatttactttttattttactattagaacaacagcatttattagtgaatacactactaatgtaaatggaaaatgtttaatatttttgtggaaattgctttctaatcctgttgctgagtggaggctagagctgagaaaagctgaaacctctgattgttctttgtgccttgatgtagatgtcatctggtgctcagacagtaaactattatctataaagagagaaagttgcagctgctgttattactatcttctttccaatatctctttcgtctttcttgttttgcttatacctttggatcttggtacattttgtctgattatttcatttgacaggtgttaagagtataggctcaacctgtgtgagtagaaactagaccatcctaaatgactctgagcctaaatttattacattctataaaatgtggtttttaaaaacccattttaatttgattctaatttagtaaggtgttagatgaacacgtttcatgtagttttgtccttcctgtcttctctgtttttttttttttctcaatggagagcttggtaacattttgtactattttttttcttagagacttaggccactgctttttgatattttgcaagagtcatgtagaatcatctgaatgtgctgaagagtcacgtacaagcatctgaatgtgcttcatcttgtctattatcaggcatataggagataagtgagatttatgttcaaaatatgttattataatgtagtcattttattttagcatcttttcctcctgttggcttctgcttgccaagtgagtaagatgcagtttatttaagtagcagccctaaaaccaggtaaagctctaaacagattcagtgtgtttaggctcataacattttgagtggactataacgtttttataagattgtatagactgatcatctgaaagagcagcagttacggatttttagttttctttaatcctgttaataattgtcttcttattaacctcattcacttgaatttagttcctggtttaccttttcatttataattttcatttaaattattcaagcatggaacttattatgaacacctactggattcaaaagcacatttcaaggcaatataatctatacccttttcagtatttcagtttttctatttcattgctgtttgtggaaattactttcaatgagtttgagaatgaatatagtatcctccattaatggatttagtttcaggaaaaattttacttacttacttatttatttattgagaaagaatttcactcttatcacccaggctggagtgcagtggcacaatctcggctcagtgcaacctctgcctcctgggttcaagcatttctcctgcctcagcctcctgagtagctgggattacaggtgcctgccaccatgcctgggtaatttttgtatttttagtagaggctaggtttctccatgttggccaggctggtctcgaactcctgacctcatgtgatccacctgccttggcctcccaaagtgctgggattacagtcgtgagccactgtgcctggccgaaaaattaatttttaaccagctgcttaaccaagaaaacccatttctcagcaaacgtttattaagcacatgctttgtgctaggtgcaatgctaggcccttgggttatattggtgagcatggtaaatgaccctcatggagcttacagtagagttggagacattgacaagtaaatatacagtacaccacagtaatacttgtaattggggattcctggtgccagaggacatgctggtcagattggttggtgaaaagtatcagagattgtttctagggaatgtggcatctaagatggaatttcagaaatgagtaggagttcaaataggcaagattgacttctagatggagccgtggttgtgtgtatgagaaattgatgtgtttgagatggagctggctggatttggggagtgtggagtgaaggggaaatgatgggatgaggcagggagggcagttcgtgcagggcctgggagattttattaaacagcagtgaagagctgtttaaggttgttaaacaggggagtatgtgttttaggaagattatttctgtagcatggatagtggatcaaatgagtacaataaataacttctcagataacactgctttgaattataaactttatgttatgacagaattctatagtgtatttcagggttagaaattaacttagaaatcatttactataccatctgtgtgaggtctagagagatttagcaacttggccaaggctataaccaaaaaatggttattgggttatttactttgctactgagagagaatcgaaacttccttacctttgtttgtttctgttttaaataatcacagacctatacatccccattgtaaaaattcaggcaatatagaactatacaaattctaaaagttttcattttcttctcgttctcaatttccccaaagaagactgttctggttatcattaggaatatatttttccgaatgattttttctacatacacatgtagttttcattctgtatattacagtattgtgttgcttccttttttcaactggaaatgtaacttgaatatctttctatattatttcatgtgagtatacattctttaaaaaaccctaaaaactactgcactggtgttgcagaatttcagtttgctatgttactgggtatttgttttagatttttcaccatgacagtaatcatgttgtgtgatcatctttgtgcattcagtgttggaattcctaggtcaaagagattttataagataatggttaagttcctttccaaatcactctcaccaaaggtgtttaaaaatgcttattttcattacaactttgccaacactgaatatgtctcattaattttttttaatcttataggtaaaaatatataattgttttattttcttattttagttttagtgaagttatcttttcatatatattcaaatttcttcatctatggattacttattttcctgttgtatttactttctttttagtgacttgtagggttttttattataagataggcacaatccttatgcttgattttatgtgattaatattttctctcaacttttctatcctttaaatttatttattattatatttttaaccttaaacttaaatattttatggaaacatatagaacttttctgttatggcagttgggcaattttttatcatgctcttcaagtaggactttctctagttccagattgaaaacacttttcctgtgtttcaagtgttgtttaaaaaaattaaatttgaaatcaggcaaaggcattgctgtaattcttatttatttggaaatattatggttcattctattcatcactgatgtgaaatgtcttttattataagttaatttttacatgttctctgtttctttactttttggtttatggctatttttaatcatgccaattacataaggatgattttcttttcctgcagttaggaaaaatctcttctctcaaaacttcttattgctgcttccctgaatttgctaactgtgtattatgttgttattcctgtgagataacatcgtacttctttgtttagaatttcataggtttcaaggagattgtagcattgggatcattacagaagtgggaactgagacttaatgttaaagaatctcaccagggcatttagctaagtagtaagtggtagagctagtgttaagtctgtccattcagagcacttcccttttccatcatcttgtcataattaaaaggaaccaaaacaatgacacagcccaaggataacattttaaagtcaaatccaagttctgtgatcacatgtttgtagtaaagggcaaaagttataaaataagatctcttggtgaggaaactttagctagaattatctgactcggcataaccttcttagaggctgtatcagtttgtttctctaattacctaagactagacagtgtctagtgagtgtatctacaagtgtggctcctggactggcagcatctgcatcctctgagaacttattagaaattcacattcacaggctccaccctaaacctatccaatcagaaactgttttaaccagccttccaggtgattcttgtacatccacaagtttgagatgaaagcctgtgttttagtgtcaccttatctgggtttatgttgcatttcttttctcttcaaatcaagatattttaaatttgaagttcattctttctagacgtacaaatatttcataaagttgtgcttctttttattcagtttccttaatatttcatgaagattgtagtgtcgtgactgaagttggagcactattttgtcttctattatttgatgaagtatcgagaatggatatgtggtgagatataagaatttataagttttttactcttaactatttatctcaggtatctgatgtaatcttatagcaaggcatggaaatttctgatttacgaagcttatgctgtccatgctacacatatgtggtatgaattttgatttgaataaacagtattcaaaagcctattagctcagaaagtctatctcaaattttatttttaaacattactaaatataaactttaaaattactgcagtaatttttgtctttaatacatttttagtacataccttcaactatgtgtttttttcttaatatttcatgatttttaaaaaacctcggaagatatttaggacgatagtatatgattagcgctgatcttgagcaggatccgtgggaggagacgcacaaagtccacctgctagtcccaccactgcattgtatgaatcatttgttatgtggaatttttttttaaaacataatttactcttcataagcaaatctaggaagtagcaaacatgttgtttctatactaaatgatagactcagttgcactgcttgatttcatttgcagtcaacgaagtgaggtaagttgtatttgttagacaaaacttggtctactcagttgtttctttgtttttgtttttcttttatgaaataggtctgttaatccttccaataaaccttctttgccatcggtcttcagtttgcctgtttccgtttttagaaggtaaaggatttatttctctgattttcttgaaggacgaaatgttgttacagaaagggaaatcaaaatctataatttgtcacaattttcatttagcatttaaatcccataacttgggctttcatggttccttcacaatggtgctttgaagatttcagtaagtatatctccccaccaccaattttttattttgataccgttcaaatttacaggaaagttgaaagctatacggtgcatacttgtatgtcgttcagcctagagtcatcaattatttacatatgagtctctttgctttctctctcctaatatatatttttatttatatttaattctccctcacccaccaattggaaataagtttcagacataaattcactcctttcctatatattccagcatgcacatccttaagttaaggacattattctacataactgctacaatatgatcccatctaacaagattaaaaataattctataacatggtgtggtttctccagttatctccaagtatcttttgtgtatattttttcagaatgcaataaccagttaaggttctgcattgtatttggttttcatgtctctttagacttttgtaaaaagtaaattgtttttattgacatatatcgtacataaagcatacaagtcataagggtacagcccttgaatttttctgagtaaacgtacttatttatctcacacagattgacatagaatattactgacagaccggaaaccctttttgtgctttctcattaccttctaccaccccaaaatgtaatcctattttaatttctattgctgtacattatttttgctagtttttgaactttataaatagagtgcattattatattgctttttgctcaacttggagagatttgtccatgttgctgcatgaagcaatcaatagttggttcatttttattctatgtagtattctgtctaagaatatacaacacttttatttaccattctatttgtggatgtttaatttgttttctgttttgggctattatgaagaaatgactgctaagaacattcttgaacacgtgtcattgttggaatataggatatttatgtttagctttagtagatgttaccagacagtattacgaagttgttgtgctgatttacattcctaccatcagtggaaaagtactagctgccccacatcctcactagcctttggtatttgcattaccagtcttaatggtgtttagtttggctaaataatgaaactcacacgactgcagtagtcatgcttagaatgagatcacatttgtgggtgctgggagctgtcttggcttggaagcctcatgtcccaaatagaaaatatgttctctagtaagtgtgctgtaggcatagtttccaggttgcttataagagccacagcactcaagattgctcagagctgtgacatcccatcatgcatttatagtttattcctagatgtctcagtccagatgtggggagtcattttcatcataagcaaagcagcttagtaaattcttgacattccatatctatctgattttactgggtaaagggacagagagttacctcaatatcatgtttgtccgtaaagaggagaaagggttttattactcttttactcacagtaatgttggcatttaaaaaattgttgcccatctgatggatgtatagtgtatctcaaagtggtcctgatgtattactctttgctttttattattttcttccttctgtgtttttcaaacttaattttctgttcattttctaacttactggaggattggccattgattattagccgccctttcatttaaagctatcaatgtttctaagtatggcttttggtatattccacgaatttgatatgccatattttattatttagttcaaaatattttctaagtgttttgtgatttttttttattgatgcaagggttgtttagagttattgggggtaactagtgaagatttagtttattaggttttctagttattttattattaatatttagctaaatattgacattagaaaatattttctatgattttaattctttagagtttgttgaattttactttatggcccagcatatggtcagctttttaaaatgttccatgtgtacttgaaaataataatgtatatgtagtagttgttggatatactgttctataagtctcaaaatatatcaggtttattgatagtgttcagatcttccctgtgtctactttattatatgtgtgtgaagttctttcaggtagcagagaggcatgttaaaatctccactatgacattgtcattctggctgacaatgtattttgaggccatgtaatttagtttgtaaacatgctggtgggttgtctctatcattatgaaattatttctttatctctagcagtgcttcatcatatagaattcactcgatctcttatgactgtagcttccccagcttttatttggttagtggttagcatgatatgtatttttccatccttgtagttttagctgttctgtgtccttaaatgtactttttttttttaagaagtatatagttgagtttttttgtccaatctgacattatttacagttttaatggaatattttaatgcattttacatttactataattactaatatttttggatacagattattagcttgctattttctatttgtccaatgtggtttttttctttctttttcctctctggcttttcttgattaatttttaaaattagtccatgttttccagctgttaacttgtagttacatatacattaagtattttatttatttatttatttgtagcgattgggatcttgctttgttgcccaggctagtcttgaactcctggcttcaagcaattctcccacctcagcctcccaaaagtgttgggattacaggcatgagtcactgtgcccagctaagtattcttctatatacattatttctatatattttatacagatgattattcttttataatatagagattataatttacttccttgactgtgaactagtatttttaccacatcccagacaatgcaaggaccttagaacacattaattccatttatttgctcttcttttttttttcttttattgtcaggtatttaaattctatacatattttaaattctataagatgttattataattattttatgcagtaaatagtcatttagatttgtataccgtggtcgtttctgttactttttattgcttttttggtttttctgcctccatctgagaatttgtttttttaagagttttttattatttaatgtagtgcacttatattagcaatgatttctgtcaggttttttttttttttaatctaaaaattctttctgttttaaaaaatgttatcactaggtatagaattctaggttggcagttggagtccatttttttgtaggaacattggctgtcagttttattgttgcttctttgaaggaactgtgttccccattctcttaggagttccttcagctatatcccacagcactttgcttgcttgcttatttatttgggggagtttattttatttttatgggtatataatagtacatatttatggagtacatgtgatattttgatataagcatacaatgtataatgatcaaatcagagtaattaggatgtccattacctctaacatttattgattctctgtgttaggaacatttcagatctgctcttctagttattttgaaatatacaacaaattactgttaactatttttaccctattgtgctactgaacactagatcttattccttctatctaaatttttatgtacccattagccatcccttcttaattccccccttccccaccatcctttacagcctgtggtaatcatcattctactctttatctccatgagatcatttttttttttttttagctcccacatataaaggagaacatgtgatgtttgtttttctgtgcctggattatttcagttaacgtaatgacttccagttccatccatgttgtttcaagtgacaggatttcattcttttttacatctgaatgatactccattgtgtatttataccacattttaaaaaatccattcatctattgatggacacttaggtagattccatatcttggttattgtgaatagtgctacaataaacatgggagtgcatatatctctttgacataccaatttcctttcttttggatatatacccagcagtgggattgttggatcatatgtaggttctgtttttagttttttgaggaactccatactgtttccaataatgactctactaatttacattcccactaacagtgtgtgagcattctccttcctccacatctttgccagcatctgttatttttttttgtcttgttgataaaagcctttttaactggggtgagatatctcattgtggttttgatttgcatttctctgatgattggtaatgttgagaattttttcatatacctgttggtcatttgtatgtcttttaagaagtttctattcagatcttttgcccagcttttaattggattattattattattattttgctgttaagttgtttgagttccttatatattttgatggttaatctcttgccagttgaatagtttgcaagtgttttctctcattccataggtggtctcttcactttgttgactgtttcctttgctatgcagaagctttttagcttgatatgatcccatttacttatttttgctttgcttgcctgtgtttttgaggtcttacttaataaatctttgcccaggctaatgtcctgaagcatttctctaatgttttcttctagtagtttcatagttgcaggtcttacattaagtctttaattcattttgatttgattttcatatgtggcgagagatagagatctagtttcatttttctgcatatggatatccagttttctgagtaccattcattgaagagactgttctttccccaaattatgttctcggtgcttttgttgaaaattgaccaaatgtgtgtatttatttgtgcattctttattctgttttattggtctgtgtgtctgtttttatgctagtatcatgctgttttggttactatagctttgtagcataattcagagttaggcagtgtgatacctccctctttgttctttttgctcgggattgttttggctatttaggaccatgttttgttccatatacattttaggagttttaaaatttctttttgttccttttaggatgcaaatttacatgcatgttagattatttcaccatgttaaaggaaaaacttgagacaaaatacacatgcatgtgtctttacggtagaacaaaattaactttggtttaaaagatactgctattgaatctgtttttatttctaaacatatttcttggttcttgttgaatttattgatgatgaaaccatgttctcaagtgaaaacaataagctggaattcagtcatttagtgacctctatgatcataggcaattcatttatcagctttaagcctcatttttgatcatttgtaaaataggtatcatagtgccataccatgtaactgtgaatgaatgatacaaaataagcagtgtttggcataaagtaaatatcagtgttttagctgaacaccttttatgtttggttcactgtattcatggtccctgacttcaaggagcattagttatctccacaacaactctaatatagcatagaatgtggtaagtcctcaagaaaggatttaagtgttctggggagtttagaggagatgaaaagaataattgaaatactgtataaattatgataattgtttaaaatagggactaagagaaacctttgcattattgtgggttgggaggcattgaactagccctcatttgtggctcatctttttgagtagcatttaagaatttgaaagtttgtaattatttgtacacattttctttaggtaccatctacctgttcatgtaattggacaccatgctgtgagtccttactccatagttttgcccttatctgctgattgtttggccttgaagccggtgtcagatatgctgagaatagcttggaacctgtcatggtatcatgggagtgataatctgttgaagcaaatgaactctgaaactaaaacgcaagagtaagctcttatattagtttaaaaagcatttgcaattaattaattgtaattaattagttaagttttactttttccttaggtccagtagctttttcccttggtatcatctgattctgctttttaacagttataatttttactttcttttaaatattacatgtgtttattacttttaacaatctatcatatgggaaaactttaaatgaaaaagcattttactctgtactgttttagaggttaaagtctgatttgttcgtagatatgaatcactaggaaaagggtcctggattagaacaaaatctcagtaagtatatgcatgagtgttatcattagtgtgatggtgattacttttgaatatcttaatattctaatctgtctgtcttaagtgaataaaaatttttataaggaggaaaagtcaatataaacatttgggatgccaatgtaaaatcctaatattgacagatatgtatcagtttttcttctggctgtaagtcaaccttttgttaaaagaaaatgaagataaaacagcttttgggagagtttataatagaaataagtgtgagcttttatttaaatagctttatgttcctccttcattttttttctttttgtctagaattttagatgcattgaagttatctacagaggacatcctcactctgaagataacacacatggctagtgggctgcaggactgcctccattccattgttcaggctgcaacccacagggaagttagggctgctgtcaccaggatgagtttttatcttctgaatgacagattgtctttaaagggttgccctggtccatgtggggttaccttgaagtccttggcttggcacaccgcactaaacaggtcagtgtaaggtcaaggctgccagtttcaaagacctggattgcattgtattgtgttcatctcctaacctttgaagataagagtctatgcccttactgctgctatcatagaaagaaaaactccaggatttttatcatctgtaataatagccaaagagaaatttttaatttagttattgcattgttgaagggattattaataaacttgtaacaatttattcttagaaaattttacctcacaaaagcaaataattaggataagacatggatgaaacaaattgaatgtttatttctatccatgttataaatgagttgagacatcagtgaattgattaatagctgtgatacacctgccacaggctgttttgttttgcttttgttttgttcttaagtaaattatatcatttttctttttactctcaatttcatgaagttgattgccatgtggcggtcctttatagcagttaattgagaaggctctagcttgtcaatttaacatgcttaacttgtagcagatggttgcatttgcaacaagactgataagcaaccactgcaagcaggttttcattttattcttcatgtgactttagtataaaatgtataactttattatttaacataaaatgtgcagtttttaagctgctaggttaaatgagtttccaaaatatgaattcctttattagtttagctttaaaaattagtttatctgattaggctttccagtggtgtgctggtgcccactaatgcagccttgtgagagagctgatggttgaattttcaggatttttgtaaggtgattgttaaacacagccattcttaattatataaacttacaattaaataaattatatgaagacaaaaggtaatgaatatgcaaacatcactttctaattatgtggcaacattttactgttatctttgttcttgaggttatgcatacatatgcactacaggggtatgtattttatggaaataactacaatggagtaccactgtgcatctcttcacaacttcatgttacatggtagctccacattgtctacagtagtatatttacaccatggaaattgacaaacacaataagtcagcactctcagttacatatttatcagcacactcccgcatttaaacagtctcgccagttgaagaatgcataaatccttcactttaaataaatgtaatatgtccctatttgtcaaaagaaattttaacataaaagctgattgaattcattgcactaagttttctttctcttgtgaattaaaaccatagaaatagtatgcaataccacattacaggaaagactctcaaactgtgggtcagtggaagcctttagagtatttcaaattgcccaatagcagtaactgtatgtgagcatcacattttttatggttagtttcctcaggactagtgtaagtggagagtatagactgtgtatatgtttaatatatacacacatgcatatataatattcatcttgtatttggtttttaggcctgtgtttgatcatggcaacacagacactactgcctaatttataaatattcatgtatttctgctgtattatgtttcactaaggaatgtatcaaaaatatatatcacagaatccaccttttttcatgaaaactttttaaaaactttacttccagcaatgtatgtactaatgaggctttgggaaactttagttttgctttcattcagtttaatgatagaaaggaacattatctttttgactgattatctaagatgaaccaacagcttaaagggtgcttggagatagaagattcccataaatcatggctgtataaagtattgagatattgagaacatttttataagcttagtttaatatttttaaaatacagctatttcaaattatatcattctagacaaaacaaaatatagagaagcatgttcatacctgtgtgaatggttttttattgtattttaaaaataatgttattttttacacattttccatgtcagtaaatatactttgaggctaatttttcaaatatatgatatatccaaatgaatgttccgcaaaagaggtccttttaggagtgagtgtgtatgttagaataattctggctttgctcagatattttgaaattgtcctctcaggtcatttaaacagcagatgtaaggaagtcttattatattttgaagttatatttaattttttactaaaaaatgatattagcaaactcaactatccagagaagggtaaaaatgatttttacatgtataccgaaatgaacaccaccctaaaccatgactatttatcactattaacaaaagtatatttcagtttgacaaaaaacatggtttctaaaatctttttacttacggtactgtggcttctaaacataactttccaagatgattattttaacagcccaacattaatttatgtgtatgtttttatatgtgtatgctaacacacaagcatacaattataatctaatatcattttggaaacttattttaagaaaacagatgatagtcatggtttagtaggattacaagttgtcagaggtatctagagtcttctttcaactagtttctgttgagtttgcatgtttaatgcctctctactcctttcctactggaagtcctattgctactgtttttctccatttttcaccagactgtagactgactagcgaattggtttttctgcttttaaccttatgccactcatttatgttgcttcctgaatgatccttctgaaatacatgtcacctgtgggttctcttccatggtgtgctagatattaatagaattccaaccccttagcatgctgtagaaagttctttttgatctagctcttgcttaccttttcagctacagtttcctcctctctctctaacatatgctgtgtttctatgaagtgcaaatattggggttttatgaaactgcttgatattttagggcatacacttctgttttatacatccttgcttttacatagttaactccttggctgccttgtgaatatctactcttccttgagctccagggtcttcttactctgtgatgtatgtggaattctagttaccctgattgtcatgtggctttcctgcattacttctacagttgtttaaatatttgttttctcatgtgccttgggtttattacattcctttttatatccctcacatatcgcataagtcatagtatacagttggccatgcagcctcagcgtgaacacctcctttgaaggatattcattctgtttttgcgctgtgattattcgtaagttttttgttcttttagactgtacctgatcatttctacctgttattctgtcctttaaactcacagaataaataatgtcttcacatgtgacagctcttcatttaaacataactataatttcttctctattccccccaccctgctttaaatgatttgtttttttttttagatagactttaaaagccacagtgtccagacttctcatttgttcatgctattttacaagggtattgtgtttcttaggactctccctgagatctggacatgataccttatatgggtgtggtgctgtggcatggggtgaataggaagaaaggggctactgcctttcttttcctactgcttttccatcattcaacaaacatttattgatcacctactaggtgtcactcttgtaggaaatatagcagtgggcaaaactgatagggtcctgctctcatggaacttggaattaagacagctaaaagtataatcaaaagtagaaatgcttccaagcagactattaggaaactgcattagaggagcaccctatccctcttcagtagagagaaagtggttcagagaatgaagcttaagccaaggcataacaggtagaaggatgttaaaagtctatgggattggaagccgaaaagataccaggcacacagagaaacaaataccacatgatctgtcttatatatggaatctaaaaaagtcgaattcaaagaagtagagtagaattgttaccagaggcaagtggcaggtggatatgggtagggaaaagggagacgttgctgagaggttacaaaattccagttagacaagaggaatgagttctggtgatctcttacagcatagtgactatagttaataataatatatgtttcaaaatagctaaaagaatagatgttaaatgttctcaccacagagaaataagtatttgaggtgattggtatgttaattagcctgattggatcattccacaatgtatacatgtgtcagaacaccacattgtatcctaaagatacatacaattattatttgtcagttaaaaataaaacaaataaatggaatatagtttggtgcatgttatgtgacagaaatttgatactttgaatccgtaaatggatggtcagttgactcacaaccacttgcagaatatattatttctcctctagactaaaatgccatattcaacaaatattatacaaattaattttttttttaaatgccaggcaaagggataggccctgagttaggaaagagtgtcttgtgtcttcaagaggaattgaaaagaggatagtacacttagatttaggggatatgagggtggttataaaatggggttacagaggtgatattttaatgttacactggatatcatagaagacttcttataatctttgtgattgttaaatcataaatctcccaaagatctatggttgttagaatcacctctcaattttcataatccggcacttgccatcctactcagctgaatgtcattttggggatgtgagaattttaagtaaggaaaaataataatgagacaaacaccacattactaagaaatacagcattatatatccctggtgttggactgcttagtttagtattcctgttttaaaacttgctagccgtgtgactgtggaaaaacgacttaaccatatttttgcttgggtcttcttgtctttgaaatagaggtgcctacttcataatgttgttatgaagtttgacagaaaccctgctgttagaacataggctggcacaaggttggtgctccataaatgctgagtattaagattcgtattattgtcactcttattaacattttgatgcaatggctttagatttataaaaaataaaacattacagataaaattggatctcatatctcttgctgattgctttttaaaaaaaacgatttccaaactacttctcccttttaaataaaagttttattgtctactaatcttttagctctcttaaaccagtttttttttttaaagaaatcttagaaaattggctcatatccttttgctctgaacttaaaaagaaatttcatcctaagtctaccttcagtgttttccttgcctgttacaaactctagtagcgtccttgcaggcctttttttccccctcactttattaccttattttttcgagttggtcagaattaggtttgaagtactaattcttctcatcagtgaaacatgacattcccagtatgaaaagcaagtttcactgggcggttattagagtcagtgtttttccccttggtatttttttggtactttttctgaatttgttatttttctcttatgatatttgtcacttctagttattttagttacttgtccacatgttttttccactataagctcatgttcttgaaggcagatacccagtttgtttcaactttgcattttccaaagcatttaaaacagtgtctcataaaatagcatcctcacaagacatctgttaagtccacatatctatgatgaacagtggtattgtgtattttaaagcgccagaaaccatgattattgtcttttcattataggtttttacaggtgcttcctgcttgcactgaagatgagaaactgctaatagatatcatacattttttaaataaattaataaaggaacaaagaaaaaattcttcactagaacttctaaactggattctcgaattacttcttagacatgtaagtggtgttaaggaatttggattttaagtttgggaaataacttatttgtagaaatcattaacattatattatggaaaaggataattttatattgtctatgcttggtaaagtagtcttcatgtaatgaatggctcataacaacatggctttcctgatacgattgtgaatgtgtttattaaaattctgtacagtgaatgggacctacagtcttgtgtttaataaaacctgttctgcatgtgaactttctgctgcaactgtatttttaagtggggatttcagttcaggtggcaggggacagggtggatgtccagataggcatgttgagagttagctaacaaagccagatggaggcaggagggggtatagtgatggtgcagttataaagataaagtgtgttcaggccttaaataacggttactggaatatttacccttctagcccccactactgtcagatttttagctcttctaaaaattctaaattttttttttttattttttttgagacggcgtctcgccctgtcacccaggctggaatgcaatggtgcgatcttggctcactgcaacctctgcctcctgggttcaaatgattctcctgcctcagcctcctgagtagctgggattacaggtgcctgccaccacgcccagctaatttttgtatttttagtagagacagggtttcaccatgttggccaggctcgtcttgaactccggacctcaggtgatccgcccaccttggcctctcaaagtgctgggattacaggcgtgagccaccgtgcctggctctaaaatttttctaaatagctattctaaaaattttggctattcagatttcttattctaagaagcgtgtgaagaacccaagaagccaggtccctgttgttggtctatctgtctctttatgtatttatttgcaaataccgtatgaatttactcaacttagctaagataaagctttacacaaataagaagaaaaacaaaacaaaactagaaaagagggcctaaactgatataggacatagtggatcttataaggcaaatatgtttcattatatattaacacatttgcgaaacttagagataattttatgtaaaaatatgaattactgtgttgtcagaaatgctaactgatatgaatgtttgtgtgtatataaaacttatttagaggtttattatcgtcttaggctgttttctgttgtttttaacataatatcagaagctgggtaatttataaaaaacaaaatttatttcttacagttatggggtgcaggaagtccaggtttaagagggcatatctggtgagagccttcttgcagtggggactctctgaagagtcccgaggtgatgcagggtatatgtggtgagggggctgagcatgctgatgtgctatctcaggtttttctcttcttacaaagccatcagttccccttccatgataacccattaatccactatccatgaatggattagtctattcatgagggtagggccttcatgatccagtcacctccaaaggccccacctctcaatactgttactttggggattaaatttcaacatgaattttggagggaatgttcaaaccatagtaattatcttttcctttattgtagattggtgaaggtagggactgttttgttcattattgcatacccagcatttattatagtgccttgcacatagtgagctctcaataaacatttattaactcagtaataagctatgtagttaattacaagaagcacacaaaaccttaattttatcactagttaagatttaacaaaaatggaaaccatgtattactttcaaggttacttatatatgcaagtatatttatagactgaatttctagaattgtaattgctgagtcaaattgtagaggtgcgtgtgtgctgaggtttttgtggttttataaatagataacttattttgaattagatggagattttttcatattcggtcttttcatgaattgtatcttgatgtccttgctggttctccgccacaattgggttgttagtctcctttcatttcttctttcctgtcctttcttttcctcccttcccttctcccttccctttctcctttgctttttccttccattttcctcttccctcccctcccctttccttggagcgtgatttcattctggtacctgcaacttggacattagtgtagagatctttcaccttttgattaaatttattcctaaatatcttaattttttttggtagctattttaaatgaggtttttttttgggggggcgcggttactgtatagaaatgctactgattttttataagttgattttgtatcctgcaactttattgaattcatttttaagatcaaagttttttggtggagtctaggtttttctagatttaagattatatcatcagcatagagggacagcttaacttgccttttttctaatgtggatgccttttatttctttctatatactaattgctctggctaggatttccagtaccatattgaatagacatggtgagagtagacatccttgtcttgttcctgatcttagagaaaaagctttaaacttttcaccattgagaatgatgttagctgtgggtttttcatatatggcctttattgtgttgggattccttttctacttaatttattgagagtttttattatgaaaggatgttgaattttgtcaaatgctttttctgcatctgttggtataatcatgtggtttttgttcttaattctgttaatttggtgtatcacatttacgcatttgtgtatgttgaaccatccttgcatccctggaatgaattccacttgattatagtgagtgatctttttattgtgctcttggtttcagtttgccagtatttggtaaaggattttttatatctgtgtttatcagggatattagcctgtaattttcttttcttgtagttcccacgtctggctttggtatcagtgtaatgctgccgtcataaagtgagtttggaagtattccttcttcatttggttttaggagtacagagattagtattaattctttaaatgtttggtggaattcagcagtgaagccatcaatcaggtcttgggcttttttttggtgaaagactttgcattactgatttaatctccttattattggtctgttcagattttctgtttcttcatgattccatcttggtagctctatgtgtctagaattttttccacttggttgtccaatttgttgacatgaaattgttcataatagtctcttacgattccttgtgtttctgtggtatctgttgtaatgtcttcccttttcgtttctcattttgtcttctttttttattagtctagctaaaggtttgtcaattttgttcatcttttcaaaatctcaattcttgattctgttactgttttctattgtttttccagtttctatttcatttgtatctgcccttatcttcattgttttctttttactaagttttggcttcatttatgcttctttttctagttccttgaggttgtttacttgatatctttctttttgacatagatgtttattgttatgtatgtccttcttagacctgcttttgctgtatcccataagttttggttggtttggtgtccatttttgtttgtctcatgatattttaaaatttcccttttagctttttctttgacccactgattgttcaggagcatgttgcttaatttttatgtatatgtgaatactccagaattccttcttttggtgacttctagttttttatcactatggtcagaaatgatattagatatgatttcagtcttgttatatttgttaagacttgtaacaccatacatgtactgttaattttgtagtatgtcataaggtttatgtatattttataatttattcatagttatgaaattaaaattaaattcctacaagactctagatgattgtactataattttaatgcagtttttgaaaaggatttttggtacagttacatttacttatttggttttgtatggtattaaacctttcttcggaaagcttctactttatctcatatattatcaccacaagtgttataaataatactacttttaagagtgcacaaaagtgaacttaagtgttcactatcagttgggtttactccctaaatattatgctacaagataaattaatatatgttatataactaccaatgtttaggataaagggaacctggaaatagaaaatcaagtaccttttaaagtttatcctttgaagtgagtaaaataagtgagaaatgatttaagaagctcagtaaaataacatttccaagtaaattgctttgaatgtatggacatacatgaaaagatatacaaaagttgtggttgcaaaaacaaaattaggcagatatgaacgcctgattagtcagaagaatgctaagaggaagtgaaaagaaaaatcagctaacttcccgagggaagatttaggaactttctcttgtgaaatttttttccatgtgttttatcaagacattcacttattacaaacatattgtaattcttaggcaatttaggagtttattgcacctctaatctgtttttaatatgatattttgtttatagtaacctagaagtgctgaatttgaatacctttctttttggaatgcatttttttgatggaagttcacaaatgtggggctgttagtttttttcttcttttggtgaagctcagcagaactacacagcatatatattttccttggctggctttcccgtaacgggctcaatgtgcactcagacattattgagggtcttgcagttacttttggcatagcttgctgatggatgtaaagttggatatgatgagtggtaactgtgtgtgtaaacaaaatgagccatcattatagaaatggttgccttttagaggtcaacagtgacaaaataatggcccaagtagttggtttaaaattaggattgaatcctaacgtctaaagacaaaaacttcagatatgattaagcacttgacatctgtaggcatcagtagagacatcttattctactctattgtacttgagaaatggtaattcaccctatattttacaagtggtattgctgaggttcactgaatttcagtgttaacatgtaaatcaaaggtgaaaagagaaaaaaaaacttcagtaatcttcaagtggaagcaagttattaataggatgagattctttgggagaatcttaatttttaggtatacacatactgtttcagtatattcatgtattaatagtagcttctacttaatttttatcagcatatcagaattaataattcctaataataaaattgttttacaagatggagtttgcgtcttggtataaacagtttgttcattttgtcagtagttttgggagtcagaaggcacgtgaatgtgagtcagcttttggatatttagggctcagaacattatagaaaatttatttatttttatgatttactaaatgtgtatttcgattcttttattcatgtatgaaacataaaagttgcagttatgtcttattcaatcttaatttatccaaagacatatattgcttaagataaaagaaaaagttgggaaaaaaactatttagatgttaaaatactgtaaaataagagcaaaatgtcactactagtttccaaaagctctcagttatattatttataattgtatatatctctatatactataagcaatttagaggtttctttacatattttcatttcttttccctaaagagaatgcagttaattttgagttgagctcttttaggtgaaggattttataagaacaatagttacattttgattgtatctctttttgtatgtttttacatgcactagtgatgtgacactgtgctgaggatggaatattaactagctttggagtaagatgcttcttgctctgcccttgtctgtctaagacttagacaattatttaacctctttataaatctatgttcccatctgtaaaacaggaatgaaaatgcaaatcttctagtttattcaaaaagtcaaatgaaatcttactatcttttttttttagcacagtgcctgaggcatcatagatgattaataaatatcccatatatctattaatgcttctgattaatgtaacgttttcttttgtcaatattattagaaataatcctcttatattcctttatctattttttttttagttgggaaaagaggaaaaactttagaaagaactagtatttgtttactagcctatcaaggtggcaaagattattgcagtaataatccacatagcactggcttgggtgctgtgggtcttttcatgtcctgtgtaattgtatgtattggtacattttttacagggacaatttggcaatatatatcaaaaaattaaaactactataatattttgatttagtaattttattgcagaattcatacataagataaaatccaacttgagtacactgtgtgttgcagcttagtgaaattatgcatcattgattatccaggagttagtgtggtaaatccttattgttgaaaaacaatcagatattaaactaatgtttttgcagaaatattgttaataacgggaagtaggaaaaaatggttacagtagtgatttttttcacttgatacgggtttgtgaaaaatgtactgttttaattctgtttatattctcagaaacaaaaaggagagttatatatcaatatataatagtggcaatttctgtgtggcatgattatgtgtggttttgtttttctcgtcctttttttctattttatatgataaatatgtttttcttttgttgagaatatattaaacatcttttgaatttagaacatctctactaatgcagtaaaggcccacacctactagttaggtaatatagctcttactagaacttgcttagcaaccaaaccctttataggaaacaatatatagttcaattagtaaatacattttttacaaatttcattttttagagtgcaaacccactgttagacctcttggttctgacagagtcacaggcacgagaagaaacagatgatatccggactgctgtcaggcaacaacttcagaaagaactgattgctctttttgataccttgctgctcaatttcatggaagttactgacaggtaccatttgtaatattgcaggtttaggtgcatttatatagaacccaagttttctttgattttcaaagttttactttgtacttctttcaaattaagaaatacttctttcaaatacttaaataataatcagttatagtgttctgtttgtttttgtttcagtttaatctgttacagcctgattgtacctgcttggtctctttcactacacacatgcactcacatatgcacacacacagttttgttctctagggtttaattcctggttctctcttaattatctacaaatctacttgagcagtcatacctatgcctatgactttatgattatctttacactgatgactttcaaatacatatctctagttatgaattctgttttttaaaaataaaaatattaagatgaaagtcactattttaaccattttaaaatgtacatttgaatggttttagtatatccgcaatgtttgcaactgtcaccactacctaattccagaactttatcatcaccccaagagaagccttgtatccatgaaaaagtctctccctattcacacattcctctgggccctggcagccactagtcttctttctatgtctgtggatttgcctattctggatatatcacataaatgaaatcaaacaataatgtgacctttagcgtctagcttcttcacttagcatcatgtttccaagctccttgcatactgtagcaaatatcactacttctttctatgactgaataatattctatttatagatatgccatgttttgtttatccattcattcattggtggacatttgatctgtttctaccttttggctattatgaatagtgttgctgtaaacactcatatacagatttttgtgtggacatgtgtttcagttctcttgagtatataattaggagtggaattgttggttcatatggtaactgtaatggtaactctatgtttgacttttcaaggaaatgccaagctgttttccacagcagctataccattttacattcccaccagcaatgtatgagtgtttcattttcttcatatcctcaccaacacctgttattatagcatcctaatgggtgtagactggtatcattttggtttttatttgcatttccccaatgaaaaataattttgagcatcttctcatgttcttatggctatttgtgtatcttcttcggagaaatacctattcaacatctttgaggatttagtatcagtgtgcatcagggatattggcctgaaattttccttttttgttttgttttgttttttgctttaaatatgtcccagagattctggtacattgtgtcttcgttctcattgatttcaaagaacatctttatttctgccttcatttcgttatttgctcagtagtcatttaggagcaggttgttcggtttccatatagttgtgcggtttggagtgagtttcttaatcctgagttccagtttgattgcactgtggtttgaaagactgtttgttatgatttgcgttcttttgcatttgctgaggagtgttttacttccaattatgtggtcaattttagaataagtgcgatgaagtgctaagaagaatgtatattctgttgatttggggtgaagagttctgtagatgcctattaggtccgcttggtcaagagctgagttcaagtcctgaatatccttgttaattttctgtcttgttgatctgtctaatattggtagtggggtgttaaaatctcccactgttattgtgtggtagtctaagtctctttgtaggtctctaagaacttgctttatgaatctgggtgctcctgtattgggtgcatatatatttaggatagttagctcttcttgctgtattgatccctttatcattatgtagtgcccttctttttctcttttgatctttgttggttttaagtcttttgtatcagagataaggatggtagctcttgcttttttttttttttttttgctttccatttgcttgataaatcatcctccatccctttattttgagcccatgtgtgttttttgcatgtgagatgggtctcctgaatatagcacactgataggtcttgactctttatccaatttgccagtctgtgtcttttaattgtggcatttagcccgtttacatttaaggttaatattgttatgtgtgaatttgatcctgtcattatgatgctagctggttgttttgcccattagttgatgcagtttcttcatagcgtcgatgttctttacaatttggtatgcttttgcagtggctggtaccggtttttcctttccatatttagtgcttccttcaagagctcttgtaaggcaggcctggtggtgacaaaatctctcagcatttgcttgtctgtaaaagattttatttctcctttgcttatgaagcttagtttggctggatatgaaattctgggttgaaaattgttttctttagaaaggttgaatattggcccccactctcttctggcttgtaggtttctgctgagagatctgctgttagtctgatgggcttccctttgtgggtaacctgatctttctctctggctgcccttaacattttttccttcatttaatctttggtaaatctgatgattatgtgtcttgatgattatgcattcttgaggagtatctttgtggtggtctctgtatttcctgaattggaatgttggcctgtcttgctagattggggaagttcttctggataatatcctgcagagtgttttccaagttggttccattctctctgtcactttcaggtacaccaatcgaacatagatttggtcttttcacatagtcccatatttcttggagcctttgtttgttcctttttattcttttttctctaatcttgtcttcacattttatttcattaatttgatcttctatcactgatatcctttcttggtgaccttcggttgggatctttgagtggacgtgctgttcctttctgtttgttagttttccttctgacaggcccatgtgctgccggtctgctggagtttgctagaggtccactctcgaccctgtttgcctaggtatcgccagcggaggctgcagaacagcaaagattgctgcctgatctttcctctggaagcttcgttccagaggggcacctgccagatgccagccagagctcttctgtatcaagtgtcggttggcccctactaggaggtgtctccccgtcaggatacacgggggtcagggacccacttgaggaggcagtctgacccttagcagagcttgatcggtgtgctgggaggtccactgctctcttcagagtcgtcaggcagggatgtttaaatctgatgaagttgcgcccacagcctcccctttctccaggtgctctgtcccagggagatgggggttttatctataagtccctgtctggggttgctgccactttttcagagatgccctgcccagacaagggaaatctggcaatctggccatggcagccttgttgagctgcagtgggctctgcccagttcgaacttcccagtggcttagtttacactgtgagtgtaaaactgcctactcaagcctcggcaatggcggacgcccgtcccctcaccaagctctagcgtcccaggtcaatctcagactgctgctgtgctggcaacgagaatttcaagccagtgaatcttagtttgctgggctccgtgggagtgggacctgctgagccagaccacttggctccctggcttcagcacccctttccagcggagtgaacacttctgtctcgctgctgttccaggcgccactggggtatgggaaaaaagaactactgcagcttgtttggtgtctgcccaaatggccgcccagttttgtgcttgaaacctagggctctggtagggtaggcaaccgagggaatctcctggtttgtaggttgcgaaaaccgtgggacaagcgcagtatctgtgcaggagttcctcaggctcagtctgtcacggcttcccttgggtggtggagaaaattccccgaccccttgcgcttcccaggtgaggcgatgctccaccctgcttcagcttgccctctgtgccctgcacccactgtccaaccagtcccagtgagatgaaccgggtaccttagttggaaatgcagaaatcacccgccttctgcgtcgatcttgccgggagctgcagactggagctattcctatttgaccatcttgccagcaatccccccaacctttttttttttttttttaaaaagggatgggggtctcactatgtcaccccggctggagtgcagtgacacattcttagttcactgtaacctcaagctccagggcttaagagatcctcctgcctcagcttcctgagtagctgggactataggtgtgcaccaccacacctggctaattttttttactttaattttattttatttcatttttttagaaatgaggtctcactgtgttgtgttgctcaagctggccgcaagcaatcctcccacctcaggctcccaaggcactgggattataggggtgagccacagcccctggcccagtgtaatcgttacttgtattttatatgacattctctagttggtattttatgctttccttgaaaagtctcattttgatagagactattttctgccattttgtctggttcatttttttctattactatgagtttaagtaaccttttatagccagtaagatagcccattaagcccattatactttcttggtggttgattttccctcttttgcatacataggaaatgctcggaacttctttacgtttttcaaacgcagctggctctgaaactgctccagtgtctgaaagtgacggatgcgcctcatttctatggcctgccgtcccttgagcggaccttacgagggatggctaacctcactgcgtttccgggatggagctcacactctcctctcacaaagcctctagatatctgtgtgaagtacttgtcaggtctccttgaggtaagtaaaaatagcatatggtagttatttactattagttgcttttactttatgccaggccacaagtgcattatacgttactctattcaatgtagaatattatacattatttatataagtcataatagtgaaatgttttagtgatttttattaatagttaagtaaggaaggtcacttttataaataccctcattttcaaaagaaataaatggaaacttttgatgctcaaaggaagtgttcgctagagcatttcagattttggatttttggattaggaatgctcaaccagtaagtatatgatacaggtatttcaaaatccaaacaactccaaaattcaaacacttctggtcccaagcattttgtatacggcatactcaggctgtacaatgttaaaggatatttgttttttctttttcttccagtttgtgcagttctagatgctactgctatgaacattcttatcttttggtgaaaatgagcatcttttttgaaattttatcttctgttattgaaatatgtaaatatagccaatttttatatgttgaccatgtatcaggcaattcttatttccaatatcaaaacaaaagcctttaatttttcacccttcagtatgctgtttatagtttttttttgtcaattaagaaagatcaagttaaggaagttttcttttgtcctgttttgctaggagctttgttttttaattcataattgtatattgcttttttctgtatcttttaagataatcacatgatttttcccttatattccattactgattgattttaaaatgttaaacaaccttgcatttctcgaaacatttcagttaggttgtgatgtattactctttttatatgttagtggatttcgtttctcaattttttagaattctgaagtttttagaattattctatttcctcatgtaaaaaagtttttcgaattttgcatcttttttctcttaaagaatttgtcaggtttttaataatcaaaatcattccgttcttatgactaaaatgggagaatgtgagattgtaagaacgtgactttttcaaccattttaaatcttttcctttatataactttcttttttggaatagctgatttgcattggtgtgattttgttctctaatgttaggtagaatttgatcgtgaaacaatcttggtttgcagttttctttttgggaagattgtaaattgtgaaatgaaatgactttttttttttttgagacagagtcttgctctgttgcccaggctggagtgcaatggcatgatctcagctcactgcaacctctgcctcccgggttcaagtgattctcctgcctcagcctcccaagtagctgggattacaggcgcctgccaccacgcacagctaatttttgtctttttagtagagacagggtttcaccaggttggccaggctggtgtcgaactcctgatctcaggtgatccacacccgtcttggcctcccaaagtgctgggattacgggtgtgagccactgcgcctggcctgaaatgactttttaaatagatctaaaatcgttcagagtttctttttatgtgtgtcagccttagtaagttatgtttttgtagaacttaaaaactttttatctaatttttaaaatttgttactgtgaaggtattcatcaaatcatcttacacttttaatgtctgctgaatctgtagtgaggtcccctttcattgcagacattaattattcctttctcaatttttcttggtttatctttctaatagaatgaacctttggctttgttgagcctctctttaacttttttctcctgttttatttctgccaatatttattatctccttctacttttagtttagtttacagctcttttttctaacattttaaggtagaggcttacgtcattgatttttttaaaagtctttctcaaatgtgtgtttttagctctaatcctctaagcatggccttatgccatgtttttatcatcaatttaggtcaaaatatttctactgtgatataataaatacgacaatgatatggttgtacatagttctatgagaacagcctcatcacagtggcctgacaattttgcatatctgcccttgggcttcatagacaaggcttaactacagccaatctaaatcttggcagaatttcctgtgatccttctggaacatgagaatatgaaaggcttatgagcagctgactatgcaagattgattctcacttacttcacagtctattaggaagtcagttaggagcccgtttcttattggttcctaggttccgacgagcactgggctttctgccttgctctccttggggcatagctacagcttataaaactgctttactgcagcacggcatgggcttctccgcaacagagtgtcctacatctttgttatagtcatctggcccctttgtttcaatgtcatcctgtgcaagggatactagtagctggcacctttgtctattcttgcttttgctgtttatgtaggtaataaactgtctgaatccaaaaattactcattgttttcttactggacaaatctgtcagccttgttttgattgctaactgtgttcggacctcaagaatgattcttgtaggaagcactgtagagttagattttgaaagataagtaaattgatagtgatagcaatagacattctagacatggaattttctgataaaattgtatctataacctcctgtttttttttcatgctgtgggtgacttcttgacatcatataatctctacctattgccagattatttttcagaaacataaatttttcaatccaaacctctttttttttcaagagcataagactcaatattttgcatttagagatttgcctccattgtagttttttcccacatctctgaattttcagttatatctggctgtttttccaaaataaaaatgcactttaaaaagactgcttctttcacatagtttcctctcttttagggatggcaatatctacaaaaaatttaagatctaacttatttatttaccttcatttagtaaaccttttcttattcttccaaggttggatacttacctaatactgtttggcctttcctgtaggttatatacctgtaacaatttatatatgtggctattacttaatacattatatttttatttattttactttatttctttgagacagggtttaccgtgttgctcaggctggaatgcagtggtgcaatcacagctcactacagcctcaacctcctgagcccaagtgatcttcccacctcagcctcccaagtagctggggccacaggtgtgcaccactacacctggctggtttaatttttttgtagagatgggtctcactatgttgcccaggtttgtcttgaattctttggcgcaaatgatcttcccactttggcctaccaaagtgctgctattacaggcatgagccactgtaactggacctttattttgttttctgcattgctctagtagactatgagcttataagtatcatctttgggctatttctactatcccatggctactgcattgacctagcaccatggtttttacatagtggttagtgaatcagttaattaatatatgtgctacataatacatatatattgtgtatagtttttaaattaagatacagtttgaaaaacattttggaaatgtagcataaatgattataaaaatatgttttattgttgtatttttattactaaataatgatttaaataatgtatatatatattttatctggtcttatctagaacttttttccaaaagcacatattgtttttaaaacaagtttaaagatcataaatactctttgctgtactgtaaaatttaatatgaatttcactggagtccctttaataaaataaatttcggagaggttccaagatggccaaataggaacagctctagtctacagctcccagcatgagcgacgcagaagacgggtgatttttgcatttccagctgaggtaccgggttcatctcactggggcttgtcggacagtgggtgcagcccacggactgtgagcagaagcagggcggggcatcgcctcacccaggaagcgtaagaggtcagggaattccttttccaagccaagggaagccgtgacacatggtacctggaaaattgggacacttccaccctaatactgtgcttttccaatggtcttagcaaacaatacactaggagattatatcccacgcctggcttggagggtcccacgcctatagagcctcgctcactgctagcacagcagtctgagatcgaactgcaaggtggcagcgaggctgggggaggggtgtccgccattgctgaggcttgagtaggtaatcaaagcggccgggaagctcgaactgggtggaacccaccacagctgaaggaggcctgcctgcctctgtagactccacttctgggggcagggcatagctgaacaaaaggcagcagaaacctctgtagacttaaacgtccctgtctgacagctttgaagagagtactggttctcccgttacagagtttgagatctgagaacagacagacagcctcctcaagtgggtccccaacccccgagtagcctaactgggagacacttcccagtaggggccaactgacacctcatacagccgggtgcccctcttgagacgaagcttccagaggaaggatcaggcagcaacatttgctgttctgtaacatttgctcttctgcagcctccgctggtgatacccaggcaaacagggtctggagtggacctccagcaaactccagcagacctgcagctgagggtcctgactgttagaaggaaaactaacaaacagaaaggacatccacaccaaaaccccatctgtacgtcaccatcatcaaagaccaaagatagataaaaccacaaagatggggaaaaaacagagcagaaaagctgaaaattctaaaaatcagagcacctcttctcctgcagaggaacacagctccttgtcagcaacggaacaaagctggacggagaatgactttgacgagttgagagaagaaggcttcagaagattggtaataacaaacttctccaagctaaaggaggatgttcgaacccatcacaaagaagctaaaaaccttgaagaaagattagacgaatggctaactagaataaacagtatagagaagaccttaaatgacctgatggagctgaaaatcatggcacaagaactacatgacatatgcacaagcttcagtagctgatttgatcaagtggaagaaagggtatcagtgattgaagatcaaatgaatgaaatgaagcgagaagagaagtttagagaaaaaagaataaaaagaaacaaacaaagcctccaagaaatacgggactatgtgaaaagaccaaatctacatttgattgttgtacctgaaagtgacggggagaatggaaccaagttggaaaacgctcttcaggatattatccaggagaacttccccaacctagcaaggcaggccaacattcaaattcaggaaatacagagaacgccacaaagatactccttgagaagagcaactccaaggcacataattgtcggattcaccaaagttgaaatgacagaaaaaatattaagggcagccagagagaaaggtcccgttacacgcaaagggaagcccgtcagactaacagcggatctctcggcagaaactctataagccagaagagagtgggggccaatattcaacattcttttttttttatgatttgcttttttttttttttttgaagtatttattgatcattcttgggtgtttctcggagagggggatgtggcagggtcataggataatagtggagagaaggtcagcagataaacacttgaacaaaggtctctggttttcctaggcagaggtccctgtggccttccgcagtgtctgtgtccctgggtacttgagattagggagtggtggtgactcttgaccagcatgctgccttcaagcatctgtttaacaaagcacatcttgcaccgcccttaatccatttaaccctgagttgacacagcacatgtttcagagagcacgtggttgggggtaaggttatagattaacagcatcccaaggcagaaaaatttttcttagtacagaacaaaatggagtctgctatgtctacttctttctacacagacacagtaacaatctgatctctctttcttttccccacatttcccccttttctttttgacaaaactgccatagtcatcatggcccgttctcgatggtcgctgtctcttcagagctgttgggtacccctgcagacaggctgtcacttcatgcttggaagattgcacagcggccaggcagaggcgctcctcacttcccagacgaggcggccaggcagaggcgatcctcacttcccagacggggtggcggctgggcagaggcgctcctcacatcccagacggggcagccgggcagaggcgctcctcacttcccagacgggacagctgggcagaggcgctcctcacttcccagacggggcgcctgggcagaggcgctccccacttcccagactggacagctgggcagaggcgctcctcacttcccagacggggcgcccgggcagaggcgctcctcacttcccagacggggcagccaggctcaacattcttaaagaaaagaattttcaacccagaatttcatatcctgccaaactaagtttcataagtgaaggagaaataaaatcttttacagacaagcaaatgctgagagatttgtcaccatcaggcctgccttacaagagctcctgaaggaatcactaaacatggaaaggaacaagcggtaccagccactgcaaaaacatgccaacttgtaaagaccattgatgctaggaagaaactgtatcaactaacgagcaaaataaccagctaacatcatgatgacaggattgaattcacacataacaatattaaccttaaatgtaaatggtctaaatgctccaattaaaagatacagactgggaagttggataaagagtcaagacccatcagtgtgctatattcaggagactcatctcacgtgcagagacatacataggctcaaaataaagggatggaggaagatcaaccaagcaaatggaaaacaaaaaaaggcaggggttgcaatcctctctccgataaaacagactttaaaccaacaaagatctaaagagacaaggccattacataatggtaaagggatcagttcaagaagaagagctaactatcctaaatatatatgcacccagtacaggagcacccagattcataaagcaagtccttagagacctacaaagagacttggactccacacaataataatgggagactttaacaccccactgtcaacattagacagatcagtgagacagaaagttaacaaggatatccaggacttgaactcagctctgcaccaagtggacctaataggcatctacagaactctccaccccaaatcaacagaatgtacattcttctcagcaccacatcacacttattccaaaattgaccacatagttggaattaaagcactcctcagcaaatgaaaaagaacagaagttatgataaactgtgtctcaaaccacagtgcaatcaaactggaactcaggattaagaaactcactcagaacagctcaactacatggaaactgaacaacctgctcctgaatgactactgggtacgtaacgaaatgaaggcagaaataaagatgctctttgaaaccagtgagaacaaagacacaatataccagaatttctgggacacatttaaagcagtgtgtaaagggaaatttatagcactaaatgcccacaggagaaagcaggaaagatctaaaattgacaccctaacatcacagttaaaagaagtagaaaagcaagagtaaacacattcaaaagctagcagaaggcaagaaataactaagaacagagcagaaatgaaggaggtacagacacaaaaacccttaaaaaaaattggtgaatccaggagctggttttttgaaaagatcaacaaaatagatacaccactagcaagactaataaagaagaaaagagagaagaatcaaatagatgcaataaaaaatgataaaggggatatcaacaccgatcccacagaaatacaaactactatcagacaatactataaactcctctatgcaaataaactagaaaatctagaagaaatggataaatttctggacacatacaccctccgaagactaaaccaggaagaagttcaatttctgaatagatcaataacaggctctgaaattgaggcaataattattagcctaccaaccaaaaaaagtccaggaccagatggattcacagctgaattctaccagaggtacgaagaggagctagtaccattccttctgaaactattccagtcaatagaaaaagagggaatcctccctaactcattttatgaggccagcatcatcctgataccaaagcctggcagagagacaacaaaaaaagagaattttagaccatatccctgatgaacatcagtgcaaaaatcctcaataaaatactggcaaactgaatccagcagcacatgaaaaagcttatccaccatgatcaagtgggcttcatccctgggatgcaaggctggttcaacatgcacagatcaataaacgtaacccatcatataaacagaaccaaagacaaaaaccacatgattatctcaatagatgcagaaaaggccattgacaaaattcaacagcccttcatgctaaaaactctcagtaaattaggtattgatgggacgtatctcgcaataataagagctatttatgacagacccacagccaatatcatactgaatgggcaaaaactggaagcattccctttgaaaactggcacaagacagggatgccctctctcaccactcctattcaacagtgttggaagttctggccagggtaatcaggcaggagaaagaaagaaagggtattcagttaggaaaagaggaagtcaaattgtccctgtttgcagatgacatgattgtatatttagaaaaccccatcgtctcagcccaaaatctccttaagctgataagcaacttcagcaaagtcgcaggatacaaaaaatcaatgtgcagaagtcacaagcattcctatacaccaataacagacaaacagctaaatcatgagtgaactcccattcacaattgcttcaaagagaataaaatacctaggaatccaacttacaagggatgtgaaggacgtcttcaaggagaactgcaaaccactgctcaaggaaataaaagaggacacaaacaaatggaagaacattccatgcttgtggataggaagaatcaatatcatgaaaatggccatactggccaaggtaatttatagattcaatgccaccttcatcaagctaccaatgactttcttcacagaattggaaaaaactactttaaagttcaaatggaaataaaaaagagcctgcattgccaagacaatcctaagccaaagaacaaagctggaggcatcacgctacctgacttcaaactgtactacaaggctacagtaaccaaaacagcatggtactggtaccaaaacagagatatagaccaatggaacagaacagagccctcagaaataataccacacatctacaaccatctgatctttgacaaacctgacaaaaagaagaaatggggaaagcattccgtatttagtaaatggtactgggaaaactggctagccatatgtagaaagctgaaactggatcccttccttacaccttacacaaaaattaattcaagatggattaaagacttaaatgttagacctaaaaccataaaaacccaagaagaaaacctaggcaataccattcaggacataggcatgggcaaggacttcatgactaaaataccaaaagcaatggcaacaaaagccaaaatagacaaatgggatctaattaaactaaagagcttctgcatagcaaaagaaactaccatcagagtgaacaggcaacctacagaatgggagaaaatttttgcaatctacgcatctgacaaagggctaatatccagaatctataaagaacttaaagaaattttgcaagaaaaaaacaactccatcaaaaagtgggcgaaggatatgagcagacacttctcaaaagaagacatttatgcagccaacagacacatgaaagaatgctcatcatcggagaaatgcaaatcaaaacgacaatgagaaaccatctcacaccagtcagaatggcaacattaaaatgtcaggaaacaacaggtgctggagaggatgtggagaaataggaacatttttacactgttggtggaactgtaaactagttcaaccattgtggcagacagtgtggtgattccttaaggatctagaactagaaataccattttacccagccattccattactgggtatatacccaaaggattataaatcatgctgctatattcatggaactagcccaaatgtccatcagcaatagactgggtgaagaaaatttggcacatatacaccatgtaatactatgcagccataaaataggatgagttcatgtcctttgtagggacatggatgaagctggaaaccatcgttctcagcaaactatcgcaaggacagataaccgaacactgcatgttcgtgctcataagtgggaattgaacaatgaaaaacttggaaacagggtagggaacatcacacaccagggcctgtcatggggtaggaggagggtggagggatagcatcaggagatatacctaatataaatgacaagttaacaggtgcagcacaccaacatggcacatgtatacatatgtaacaaacctgtacgttgtgcacatgtactctagaactttaagtatattaaaaaaataaaataaacttcattttttaattataaatattaaaaaaggttcaactgtcagtatactaattagttattttctgctgtctattagaaatgtatgaattttaaaaaacaggtatattaaagagttaatgataatatttcttagaaagtcagctcctctagtgcatttaaaatataattcagttagtctagctagtggcctatctatctcattaagtttttcaaaaaaacaactcctggatctagtgacctttcgaatggtttttcatatcttgatttccttcagttcagctctgattttggttatttcttgtcttctgctagtttggggttgatttgttattgctgctctaattctttcagttgtgatgttaagttgttaatttgagatctttctaactttttgatggaggcatttagtgctacgaatttccctcttaacactgccttagctgtgtcccagagattctgatgtgttgtaactttgttctcatgagtttacttgtgtaacaaacattcacgttacccgtgaacctaaaagtttaaaaattaaaaaaaatatataattgaacctataagtacctagtttatagcattttttgtcatgtgatttataaatactctatttatcaaccttttacagagtcagtctcctctagaaaatgagttttactctttgaaatcaggaataggtgaggacctgccacagcggtaactaaagaagaagtgaagtgttgcctcatttatgtttagaaactatcagaagtgcttttgttttaaaattacgtgcaaagactttagatcacacctacgtttcaaataccagaaattgaaatgaactgttaatgtattggagaacaaaagggcttagttttaggtaagaagtgtaggcaaaaaggcagtagtccattctgtgttcagttgtctttgaggtaataaaatttagtaacagtttgttagctaaaggatacataaaaagcacagtccctgttatgtaatgtttcgcagttataaaaaatttgattagccaatcttgctttggtttaaaaaggaggtcgttttgtgcttcataaaacatctcgagcagaaaatctttatgactttatgttaaatggcaggcaaatattaggaaagaatccgtcacttttgttaaaaattgtagcagggtaacatttaatcttgggactatctgcttagtttattaattacataaacaggtatccctgttgtactactaatgactaaattcatcttttaaagaataaagtaaggcttatgtgagagaacattgaaacaaagtcattgttggtccaaatgatttgcttcatagtttcttagtaattaaagctgtttcctttttggaagggagccatatttctaataaaagattagcttgtttctgcacagtgaaatttgaatatgagtatttgctttttgtagctgtgaaatgagactttttaactaagcatgattaattatgataggtgaataaactatgataattaaatctttaaatcagatacatgatgtataattccagaggtctgacaaaaatatcaagttgaaagaaaatactggcaaaggtcttggcttgtcatttataagctagaattaaaaatcattacacagatcacagatgttagatatctccaaagatgacttagaggaagataataaggatctgatcatttagatattttatttttcaagtagtcacttaaaattttaaatttttgaccttggggaaggggcagctgtgggcacagcttcagcaaacttaaatattcttgcctgccggctctgaagagagcagtggatctcccagcacagcactcaagctctgctaagggacagactacctccttaagttggtccctgaaccccgtgcctcctgactgggagacacctcccagcaggggttgacagacacctcatataggagagctctgctggcatctggcaatgcccctctgggacgaagcttccagagtaaggaacaggcagcaatctttgctgttctgcagcctccgctggtgatacccaggcaaacagggtctggagtggacctccagccaactccagcagaccagcagcagaggggcctgactgttagaaggaaaactaacaaacaggaatagcatcaacaccaacaaaaaggacttccactcagagaccccatccaaaggtcaccaacatcaaagaccaaaggtagataaatccatgaagatgaggaaaacccagtgcaaaaatgcggaaagttccaaaaaccagaatgcctcttttcctccaaaggatcacaactccttgacagcaagggaacaaaactggatagagaatgagtttggtgaattgacagaagtaggcttcagaaggtaggtaataacaaactcctccaagctaaaggagcatgttctaactcaatgcaaggaagctaataaccttggataaagggtagaggaattgctaactacaataaccagtttagagaagaacataaatgacctgatggagctgaaaaaaacagcaccagaacttcgtgacacatacatgagtatcaatagccgaatcgatgaatcagaagaaaggatatcagagattgaagatcaacttaatgaaataaagcaagaagacaagattagagaaaaaaaaaaaacaaaagggaatgagcaaagcctccaagaaatatgggactatgtgaaaagagtgaacctacgtttgattgatgtacctgaaagtgacagggagaatggaccaaattggaaaaaactcttcaggatattacctaggagaacttccccaacctatcaagacaggccagcattccaattcaggaaatacagagatcaccacaaacatgctccccgagaagagcaaccccaagacatgtaatcgtcagatttaccaaggctgaaatgaaggaaaatatattaagggcagccagagaggtcgggttacccacaaagggaagcccatccctgttagtcttaccagcggatctctctcagacaccctgcaagccagaagagagtgggggcctatattcattaataaagaaaataattttcaacccagaatttcatatctagccaaactaagcttcaaaagcgaaggagaaaatcctttacagacaagcaaatgctgagagattttgtcaccaccaggcctgccttacaagagctcctgaagaaagcactaaatatggaaaggaacaaccagtaccaaccactacaaaagcataccaaattataaagaccattgatgctatgaagaaactgcgtcaactaatgggcaaaataaccagctaacatcgtaatgacaggatcaattcacacataacaatattaatcttaaatgtaaacaggctaaatgccccaattaaaagacacagactggcaaattggataaagaggcaagacctatcagtgtgctgtattcaggagacccatctcacatgcaagacacacataagtttgaaataaagggatggaggatgatttaccaagcaaatggaaagaaaaaaaaaagcaggagttgcaattttcatcactgataaaacagattttaaaccaacaaagataaaaaaaaaaacaaggcattacataatgataaagggatcaatgcagcaagaagagctaactgtcctaaatatatatgcacccaatacaggagcacccagattcgtaaagcaagttcttagagacctacaaagagacttagatttccacacaataacagtgggagactttaacacctcactgtcaatattagatcaacgagactgaaaattaaaaaggatattcagaaaaaaaaaaagggatattcaagagttgaactcagctctggaccaagcggacctaatagacatctacagaactctccaccccaaatcaacagaatatacattcttctcagcaccacatcgcacttattctaaaattgaccacataattggaagtaaaacactcctcagcaaactcaaaagaatggaaatcataacaaacagcccctcagaccacagtggaatcaaattagaagtcagcattgagaaactaactacaaaccgcacaactacatggaaactgaacaacctgctcctgaatgactactgggtaaataacacaattaaggcagaaataaattagttctttgaaaccaaagagaacaaagacacaatataccagaatctctgggacacagctaaagcagtgtttcaccaaatgcccacaggaggaagggggaaagatctaaaatcgacaccctaacatcacaattagaagaactagagaagcaatggcaaacaaattcaaaagctagcagaagacaagaaataactaagatcagagcagaactgaaggcgacaagagacacaaaaaacccttcaaaaaaaatcaatgaatccaggagctggtgttttggaaaagatcaacaaaatagatagaccactagcctgactaataaagaagaaaagagagaagaatcaaatagacacaataaaaaatgataaaagggagatcagcactgatcccacagaaatccaaactaccgtcagagagtgttataaacacctctacgcaaataaactagaaaatctagaagaaatggataaattcctggacacatacaccctcccaagactaaaccaggaagaagttgaattcctgaatagaccaataacaggctctgaaattgaggcaataattaatagcctagcaaccaagaaaaggaccagagggattcatagccgaattctactagaggtacaaagaggatctggtaccattccttctgaaactattccaaatgatagaaaagagggaatcctccgtaactcattttatgaggccagcatcatcctgataccaaaatctggcagagacacaacaaaaaaagaaaatttcaggtcattatcactgaggaacatcaatgcaaaatcctcaataaaagactggcaaaccgaatccagcagcacatcaaaaagcttatccaccatgatcaagttggcttcatccctgggatgcaaggcccgttcaacatatgcaaatcaataaatgtaatccatcacataaacagaaccagtgagaaaaaccacatgattatctcaatagatgcagaaaagtctttcgataaaattcaacatctcttcatgctaaaaattctcaataaactaggtattgatgagacatatctcaaaataataagacctatttgtgacaaacccacagccaatatcatactgaatgagcaaaagctggaagcattccccttgaaaaccagcacaaattattcataaactctttaaaaggatgctataacatttttaaaaatattataagcatattctaagttacaactgtgtactaggagggcaccacacatctttttttttttttttacagactttaaaaggaaaaatattgaaactaagaatttttgtttttgttttgaaaaattacaggatctcactctgtaacttaggccaagtgcagtggtgcaatcatagctcaccgcaagctccagctcccaggctcaagggatcctccctcctcagcttccccggtagctgggactacaggtgtccactgccatgcctggctaatttttttcttttttaaagtagactgggtcttgctatgttatgtaggctgaagaatattttcttttaacaatggtaaaatacccataacataaaatttaccatcttattcatttttaagtatataaactaaaaatattacaactttataaggtaaggattcaattcatacaagtcagtagacagttatatatttatctttatataccattgagaataaagccaccatgaaattgtttacatttgtttttcaggtcattacttctttttatgtggagcgtggaggaaatgctatgtccttcatgggaaaaggtgttacaaagagcacaattctttgcttgcttcacttatcccatgagatgatggcccaggctgggagcttggtgagcgcgttaaagctgtctatcttctgaacatttgcttgaaagggaatgtgctgtgtccaacacatttcaagcatataaacttgccacatgaaaatgtctcttttgacttttctttttaggtaacgtgaatgatttttgactagaatatttcttagaagttgtatattaacaaatctgaatcttatttgaaattgattcaaatgtgcatacactggaaaactacattttgtctacattatgggaaaaatagcttctgtcaaaaaattgttatgtttaactttttaaagagaaacaaatttttttgtttgccttttttggctgaataatggattaaaaccaagtctaaaatacattttcacgttgttttcattaaaaattcttgttttaaccttcctgcattttatttttagaaacttacctcaaatatttctgtttcccttttttccctctaggagtggatgtcactttggttcttgcctttgggtagtcatagtgaagaacatattcctactcaacaaggattggcttggttgattccattatgggttgatcgggacccagaggtgagtgtgaaggagaatcaagtgtattgtgtttagattaaaaaacaaatgacacggggccaggtgcggtggctcatgcctgtaatcccagcttgttgggaggctgaggtgggcagatcacgaggtcaggagattgagaccatcctggctaacacagtgaaaccccatctctactaaaaatataaaaaaattagctgggtgtggtggcaggcacctgtagtcccagctacttgggaggctgcagcaggagaatgctgtgaacttgggaggtgaagcttgcagtgagctgagattgtgccactgcactccagcctgggcaacagagcaagactccatctcaaaaaaaaaaaaaagacacaaaacatatatacatatacatagttatattatgggattattgtagtgactctaccttatgttttatttaagccctgttttagcttaggctgccataacaaaataccacagactgggtggcttagacaacagacacttcttttctcatagaagttttggaagctgaaagtccaagatcagagtgccggcatagtcaagttctggtgagggctcttcttctggcttgtagacggctgccttcttgctgtgtattcacgtggcctttccttggtccatgcatgtggggcaggggagggaggggtggtatagagacagatttgtctttttttttttattataatgttaccagtcttattgagataggaccactcccttatgatctctttaaaccttaattatctcctagaaaccctgtcttcaaatgtagtcacttgagcataaagacttcaacatatgagttttggagggacgcaattcagttcatagttttccatccctgagcccctgaacttcatgttcttcttccatgcaaaatgcttttattctccctcaacaacctcaaaagtcttaacttattcccaaatcaactgtaaagtctaaagtccaaaatctcatctaaatgtcatttaaaccacatctgggtaagtctccagatataaaccctcctgaaacagaattcttctgcaggtgtgaacctgtgaacccatacaagttatatgcttccaaaagatgatggtagaatagacattcccattccaaaagagagaaataggaaaaaaaggaagaagtgatgggtcccaagcaagtccaaagcctagcaaagcaaatttcattagatgttaatgctcaaggataatgttctttggcttgatggtgtgccttacaggcccaccagagtgacagcatctgtctagatggctctgtgggatgaccccacccctttggctgtcttcaagagccccgcccataaagctgtcttcaagggcagccatgttcctgaagcactgggcagggtcatcattctggcccacagaaatcagaggtctttgaaaccaaggaggaaaagccacccttgagtcctgtggtgggattagcagcctggggatctctgaatcattttttgggtcattcttttcattgaagaatacagtagtcctcccttatcagaggtttcattttccaaaagcaccctgaagatcagtagtagccaaaccctccctcacaatgcctacatcattcacctcacctcatctctttatgtaatcattgtatcatctcacatcaatacaagaaggctgagtgcaatacaataagatattttgagagagagaccacatttatgtattttgtattataacatattgttgtaattgttctagtttatttttagttattgttaatctcttactgtgcctaatttgtaaactttaccatagatatgtatgtgtaggagaaaacatagtagttatagggctcagcactatctgtggtttcaggcatctactgggggtcttggaatgtattccccatggataagggagggaccactgtagcacatatttgcttacagaatccaggaagtccaacagctttccttcattctctgcatctttctctgtcctctttagttcaaactggcaatgtctttgctgatataatcccatctctattcctggcttctgctgagatgtctgattaagtccatgaattgcacccgtgatctttttcttaaatgggtattcagccacaccctccatgttctctttagaacaagctttctcattttttttgcacagataggctgagaatttttcaaatcttgttcttgtttctttttgcttacccattcttaattccttctttaattcatctctctccctttgcattttgctataagcaatcaggaggaaccaagccaatttttcaacactttgcttagaaatcttctcagctaaatatccaatttcattgctcacaagttctgcctttcacaaaacactagaacatgaccacagcttaaccagttttcttgctactttataacaaggattgcctttcctcaaataaccttttttaaataacactttcctcatttttgtctgagatctcatgagaattacccatgtctacgtttctggcatccacctcaaaactcttctagcctgtaacccattacccagtgccaaagtcactttcatgtgtttaggcatttgtttcagcagcatccccactccttggtacaaaaatctgtattagtgtgctcaggcttccataacaaaataccattgtctgggtggcttaaaaacagaaatttatttcttacagttatagaggctgcaagtccaagatcagagtgtcaacatggttggtttctggtagggcactcttcctgatttacagagggccaccttctcactgtgtgctcatatgacctctccttggagcacgcacatggagaaagatttctctccttcctgaggccaccattcctagtgcagtagggtcccacccttataacctcatttaactgtaatcacctaatagctctgtctccaaatacaggttggggattagggcttcaacatacgagtcttgaggagacacagttcagtacacagcaccctcattttcaatcaaatttgttcgagtatagattgaaaatataaaagagaaaaggttatagtatctattaccttcagaagagtggaaaattattggagaagcttagcaattttgaaaaaaataaaaaggatctggaaattatagacatgcaacacttaagtgtcatataatgaaattaaattaaatgcaaaaaattgcatttgcattacaatacaaaattttgtattatttctttccagttttagccagtttacttttttcaagtaaaatatgctattacaataaaatcttatttatagaaatatttgaaatacattttttagtcacattgaacttggacttactacttgacaattttatgactgcatttttaaaaaattctatagctgtcattgaaactatatttttggattcgaattcagaaatttaccaaaacgtgtggcttgaacagcagtggttctacagcaagcatattataccacatcaatcttatttgggaacgtttttctcttgaataacttttgaggaaaatacgaaatgccttgtaaaatgataattgcctctttgtttagaagttttaagaaagttaaaatcatttatttggaagaaacaataaaaaattaagaaaggtagaacaaagaatagctaccttttttaagaatgaagaattgaaattgtgttcataaaatgtaagtgccctatgctttccttagaaaaaggcttgcaaactataatttttatgcatctttttatacccagttttactttgctttgaaatttgcttatatttaatttttcctatattactgctttcttgaatcatggaatggaggacactgtcttctataggtgtctcttataatttaggatcataaaaccaatggatttttttaaagtgtgatatttatgtaccagaaaaactaagaattcatgttaggaaaaaggcttatttgattcaacaactttctctttaatttgaacaggtgagattcacttcactgggattaggatcagcactgaccacccttgaaacgggctgtgtggccttagcaaacagttgtcagaacatttccggtgggctctggggaactgtggtgaacattcttctggaccagtcagaatgtagtatggtgcgccgggaggtatgtctgtcttttctcctttttttccttagaaattctttgtgatggtatccgtaagcgatacttgactgccgctcaacatggtggactgaccactgaccatgatctcttctgtctgtgaacacccaaacaaaatgacagtagaggatttaaaaggtattcatgcacaggaaaaactggagtccttccttccgataagataaaatcggaatatactatattttaatgtgaactttttttattatgcattgaaaggtagttcacaggaaaaattacttttatattatctcagcatttatgggtctctgatatttatgaagctttagtatagataagaggctgtcaaaataactctttgtagtatttatcatataacatgagagggaaaaataaaccctattttaattctttctgaatagcttgtggtttttttttattgctgcttttgttaaagtaatgattcatgtaaatggttttaaaacaataatcaaattgtacttagaggcttatgaaaaaaaacagcagctcctgggtccaccattagcagtcgccagttccaagctcaaaaggctagttttgttgctgtttgccttcatgtttttaagtagtgatgtttatatttatggctgcttcttgatttatcaactttaaagcttttccatcacttctagttatcatggttggaaatgtcagtttcttagaatcctcttgttaatcctgtcattctcccattatggttatttcatctttcattaagcagacaatcaatgctcctatttgtatgattatttaatttgatcatcttcaggatctagtcaagttggacatttgtggtttgtatttctagttagcaagtttttattgaaaggagtctgtataagagaagggagaaagcggggcagaggggtgcgtgtgtttgtgtgtgtgtgtgtgtgtaatctgaaaggggatagtagaaacctaaaattatatttcttaaatgctaccagaagaatttatgttatacaaatcattttttaataaagctgaattctgaaataggaaaagatatatttcctgatgaaataatttcatatgctgttaggtcattacctaacaaggtcattacctaagaaggtcatcacctaacaagaaatacagtttgacaattctcataatgacctctcagcatgtgcagttgaccagagatgtcttttgctattaattacaatatattggttatttcagagatgaccacaagatggcagtattgacctttttttttttttttttttttttttttttttttttttttacattttcaggcggcatttattcttcagaatctccttgtaattccaatgcctacagaaattataaaggattatacttggcaggtgggtgattttaaacaattatcaacctagtagatgtttcaaattaattggtgataaattttcagtataagtagtatatttcattattgatgaaactatatacaagacagcaagggcctcttaaaatagaacgtagaatttgttcttatgccgaccagacttaaaaattcttctctatagtgttcacaataatttaaagcaaataataatagttaacatatgtttactatgttttaggcacccttctagaaatgtaagacatagtaacttgtataattgtttgagttgtgaactgttactatccttattttctaagcttaggaacttttgcatagagagtttaaatagtttgtcctaaatcacacagctagtcagtggtacgcctttgctttgagtctaggcagtctcttacccactttgctgtattacttctctaatttagtaataataaacaaatttgtagatagttaaatatgtgttgatgttaacatctttttttccttttctaggttagtgcacagtgcgggttatagtgtatcttgctttgttttctgttgggttaactttctttttcatgttctgaatatcacatcagtaaatggttacctaacatttttatagcttacattaaaaaaattctagcttcatgggatatatgtacatgtttgttacataagtatattgcgtaatggtggtggggattggggttctcgtgtactcattacccaaatattgaacattgtacccagttaggtaatttataacctcagccgcctcccccactccctccttgggagtctcagtgtctgttatgtctgtctttatgtccatgtgtattcattggttagctcccacttatacgtgagaacacgcaatatttgattttctatttttgagttagttcacttagataatggcctccacctccatccatgttgctgcagttttaggtaatttggaagatacaaaagtacacttattggggatataagatgtgctgtttctgtccttttacctatccatatattttcaccttatagggatatatttatcatattgctacacctcactcctcaaaatcctgtataaatctaaggtttatttttaagttttaattagactatactcttagaggagttagtgaaacaagctgaaccgtagcaagggcaagtttccgcacatgacccgaagcatgaatccaggtggttgtcaaggcccaggtagcatttaactcttggaaggcttacctctccaaactttacaaacccagggtaaccctaccagtcattgtaaatcccaggcttgtaatttgctcgtaatttctttaacattgccttctgataatggctgcttatctactttccatgttgtaataaaaccaggagacaaaactggagggaatatgcaggattaatagttatattaatagtgtagtagttttggtacctgttatccggagactacattttaaaacatgttgtttttggctcaaatacaaataatctctactcccattgttaaactagtgacccatgtacatggatatacttggtgatgtactaccaatgaatttttaattattgaaataagtataaaggcagagtatattaaagttcctgggacattatgttgtaatacagaaccgtatgtagctgttcatatttttctcttagaaattaaatagtaaagttcctgtttgttgctggtggcatgcttactgcagtttattggttttgttattctccagtcttcatcatggaaatccttttctactaaaaagtggaaaatagtgatttaagttagcttttggagttttggccttgctaagttggccaaaataaaaaaagttggagagccactgctgtcccaaacaatagttgattacaacttttgctagtcttaggaaaaattagataaataaggacaatcttgtatgctttttaataaactcagattttcttcctctcttttcagtctttttttttttttggttatttttgtttgtgtaagtgtccttccttggcagtgaaaatagttaactcagtatatctgtcatccaattttaagaaagtttagtggggtctgaaattccaaagtagaaacagcttctgcaagaaggaaacaagatggttgtctctgggtgcagctagtggggcacatggtcctttgcaaccatgaaaaaggggccacatagccagtattttaaaattcaaacagtctttggtagaattatgaataataatcttattcaacaaaatgtttcatttacttattttagtgtccctttcatagtgttgtggaggatatagcatgaaacagcatgtttaggagctttgttaaaattttattttggttgaggtaaatatttgattttttttttttaacaaagagaattgcttctattgctttgcactttgttttcctgcctgcagtctaaattaatgcccgctagtgctcttgtttcataggctttctgaagcattctctttataattactactccttttcctctccttcctctgcacagtagcataaattcctacttcatgtcatgacatagaattgttgtacttgtgaatagtaataatatgcatatatgaattatgaataatattatagctgagtttcccttttattgttagatgccagaaagtagagcccttttatcaattgtgactttttctgtatgtacttaaaaaaaaaaaaagatggggtctcactgtgttgtccaggctggccttgagttcctgggctcaagtgatacgcttgcctcagcctcctgagtagctgggaccccaggcacatgctgccacacccagcttaccttctaagctttattcatggttgcactttttccatatctctggcttttttctttcttttattcctgatatgcatttactatcatgttacaatttacctttccttgtaatgggccttaaatcttttctcggacaagataggaagtaaataatttaaaacaatttatttttttaaagtattaaataattttaccaaccactgcaattcccattttaatcttccttttaaagacactaacatttaatgtcttaccactaaattaggttattttccatatttgcattatttcttaccatttaacttaatcttcctgtgtagaatgtttgtttctgacaggactacattttttatattttaaaaaatgtttctcccaacccctaccacagagaaagtaagtgctccatctgtcttgactgattcattaaaatgtgcaaaacatttgagttatccttttggtcttaatatcataagtaaatacagttagaaataaagccttaattttcatagcataagtccccttttatttttctgtggatgcagaagcatactggaagtggggtggtcaccaagaggaggagcagatgaagtatctcggcctgtcttcccttgacatctagcactcctaccaggggccttgataccaggcccctgctggatatgagaacccagttcctgctgtgtcagtctttggtgtgtcacagctcttttatattcaggacactaacttttcagagggatatttacaaacattggtcttgttcttgagtcaaactcagcctcattcaaagctacatcccagctgggtgtggtggctcatgcctgtaatcccaacacttggggaggctgaggtgagaggatcacttgagcccaggagtttgagactagcctgggcaacatagtgagaccccatctctaaaaaaaattttaaaaattggcctggaatggtggcatgcacctgtagtccctagctactcaggagactgaggcaggaggattgcttgagcccaggagtttgaggccacagtaagctatgattgtgtcactgtgctgcagcctgggtgacagaacaaaaccctgtctctaaaaacaaaaaccctgcatactacattctctgccaagaagagaaaacagagccaatattcagttgacacgaaactgtattgtggctcccaactgtccagtgtttttcagaccagtttcccacagtctgactaggagttaagactcctgaatgtggatggtttcataactgggtttagtttgaagactagtgtcagaaatccgtatccctgaaactttaacaaccaattttagagttgattataacaagaaatctattgattagagatggattattgatgtaattttctcagttcatttctgtaaacatttgttgagtgtctaaatattggagattcacagataatccaatttagtattcttgggcttatggcctacaggggatgacatgtacccaggaaacattgttataatcatgttatgtatgatgatggtagcttatgcataattttaataatatttcagttctttccacttgaaaatgatctcacatttaaatgtaaagggtaatttcatgcacttaaataacataatgggttgtcagtttgtgatttaaataaacttgttcatgctctagttgctttccatgtttgtgacaggactttgaattggtacacagactttttaaactttattttgaaaaaacttagatttataggaaatttgtagaaacaatacaatttttatgtactcttcacccagattccccaaatgttattttacacatttacttcagctctgtctagtgtcttctttctaaactattggagagttgtagacataatgcttcttttcctctgaacacttaagtgtggatttcctaaaaataaggatatcctcttacataatcacaataataattatcataattaggagattactcaaggattttcagttgtcccactgctgtttttaatagaaaaaaaagaaaaaaaaatccaatcctggatccaagatccagctcaggaatacacattgcatatacttgtcttacatatttgctttcgttcatctgaaatagtttcaaaattttaaatatttatgatcttaacatttttgaagaatgcaggctacttatttgttgtaatatacttcaattagatttgtccttttccccaggtttagatttgagttacgcatttttggcagaaaaaccatagaagtgatgggttctcagtgcaacatgtcaagagatattatatctctctttcccattgttggtgatactaactttgattacttagtaaagatagaatctgcctgttttgtcctttgtaaagttacagttttttcttttggaaggaggtgctctgagactgtaaatatctgtttctcatcaaactttctttcactagttttttgttttgttttgttttacttttttttcccccataggttattggggaacaggtggtgtttgattacatgagtaagttctttagtggtgatttgtgagattttggtgtacccatcacctcagcagtatacactgcacacagtttgtatcttttatccctcaccccttcccacccttttccctcaagtccccaaagtccgttgtgtcattcttaagcccttgcatcctcatagcatagctcccgcttatgagtgagaacatttgatgtttggttttccattcctgacttacttcacttagaataatagtctccaatctcatccagatcactgcgaataccattaattcattcctttttatggctgagtagtattccatagtgtgtgtgtgtgtgtgtgtgtgtgtgtgtgtgtgtgtgtgtgtgataccacacacaccagtttatccactcattggtggatgggcatttgaattggttctacatttttgcaattgcaaattgtgctgctataaacatgtgtgtgcaagtatcttttttgtataatgacttcttttcctctgggtagatacccagtagtgggattgctgaatcccactggtagttctacttttagttctttaagaaatctccacactgttttcctagttttaaattccattcatgattcttacctgaaacagttattacagaattgttgccaaatgatttcctaactccatcatttctttctatgtttattacatgctactgtaaggaagaacttttcattcttccttgcttatttagtgattcacttatttacaccagcatggattgaagattcttaagtttgtttaatgggctataatctgtttctatcattatttgtttcaatgttcaaatcattcttgctttggccaggggaaatttcttcataatggttcttgtgtctttatcaatatttgagccatttccttacttctggtacagcaaagtgttctagactgtccagctccatcctggaatcagatatttgctccaagggctctgatttcttttcatggagaatggtatttagaaaccaagatctgcgttctagatgtattcattgttcctggggtgtcattgcttctatgtcctgtgagtgaacaaagctagtaattgtctgtgtatatgttttaaatagtcagctcatttatagttatatattattttgatatttgatatgattaatatgtattatttttatcttttgtttgttatgaagcatcatgagtatttccagaagacaatgagtacttggtaaactgatatcattgtaatgatattcatattttacatgtagttttggatttctaatgtatttagggtcatttttacagtctttggattatagcatttttgttatatatgacaataattcatttttctccttgaaaatattatatcttcttaaatgttattcttactttgcttctagtaccttttcaattatagctaatgggtatattagcactgacactaggagtataatatgcattttaaaattagtattctgatttattgcattcttgataaagatgttttcaaattaattggagcttgatatgacataattaatttgcagttttctttgtaaatgtatttgtaatggcattctggtgatttgaagagctttcttactttccttctcagctctctctggcaattcagcagacgatctggcagccccagaactcacctgagggcaaggctagtcatgatacagaagtcttgagacagagcaattagacctgattgctctaatttccccactatgctagaagataaccccatcaattactgatggatgtatggagcagagcctagtgtgtgcatgaaagacttcattgttctggcccttgaaccattagttatctgtgaaagcctgagcctggccatcctttgtgcatatcctgggcttggctccattataaagctctcttaataagtgtagagaatggggattcaggcttaatgcttagttaaataaaaaataaaataatttttatgtaatatgtgcctatttcagattactcggttttcttttgagcagttcaagaatattttgaatgcactaattgaactttttagaagaaatttttttttcaagtaataaatacatatggttaaaaaaaagctaatagagcttatagtgaaattcactgtccctctccattcactgagacagttttacctctgattttaattcttcagggagttaccactgtatatctaaatagcatgtttgcaataatatatttattcatacactactttagtacctaaggatttagctcatgtacacaatttcctgcagataccacagtatctcatagtaccatagtggtattactgctcttatttctccactggtcacacttgctcttcctggttttgtcacccatgcatcatatcttttgaccccaacccattttgagatgagtaagacatggctgagattgtacctgtcctttcttcagtctttcctctgccgtttctaatacccatctttaatagttttatttttactttttgctttgtgagcgttgattatgtttacattctcatctgcagtctcaattttatctgtaggttgcttctaaaagttgaaaaccgtaactcactacagagacacttagtgggctgtgattacactttcttatctcggcttccaggaccaactcatctaatactcagaggaaaagttttctggtatttgtatgtatgtatacatgtatatgtgtgtgtgtatatatgtatatataaaaatataatttaaaaattgatttgggtgatttattttcccttgaggttcctgtttgttttttcttacattgtgggtccatatcatgtctcatgtctaaagtttttctaagctcttaatcatcctttctcttctgttagaatttcttttcctagtcataattctcaaaatgattgtagtggtaactagtgacaagtgcatgagagataaatatcacaagttcttgcatatttgaaaatgtctttaaattgcactggattgatagtgtggttagttaccatatgtttggtgaagattgttcctcccaagaattttgcttcactgtattctagcatccagtgctactgatgagaagttgaattttcatctgactctttttacttctttatggctgatgttttctttcattatcatctctttgtcctcaatgtttagaatttttttattatgtaccttttttccatttttcttgcttgacatttattaagctccttaatttgaagatttggatcttctatatatttttttggctctgacaaatcttttcatatttatttcttttaagatgaatttcctttttttgtgtgttatattttatctttccagaaattgtaagtcccttattaggcctcttgaatttattttctctgatttccttttgtatttctatatcttaaacctttttgcactattttctatgatattaaattttttgttcataagctaaattagcttcttcaatcttggtaggctaaataatttttaccatgatttataaacagaggaaaaatagaacagattctaaactttatttgatagatttagttataaatttgtgtctcttattatgactttcttacctatattttctaagtctgtgtttatattaataggaactagaaaagaatttttaatttattgaagggaaaatgtgattaaactaggttctttatcactgtgacaattttacatatttagagaataattgcaagagttctaataccatatttacatgtgtaacttctcacttctaaaatacttaaaaactaaagaaatgttagattttagaagacagtgggtttgtaactcttgtcttcctaacagttggtatggccatcagcctcagtaggccttgaacagaataaagaatcagcagatttaagatctctcaaagagctgtagatgtcatttttttctgtttttaagatttatacagtttacattctcttctctattttcattaaaggtttgtgaattttgggttgtggtaactgatagaggaagcattcatgtagacataattttgcaaaaatatgaaaaattgcataattttatataatctgtatggcaaaatatttttaagtggttctttgtatcattataaaatatattttgaaaactagtttttgtacaactttgattaatcacttttgatttattgaattttttagatggagtgaagctagtaaaccctctacaattcttgtcttatttgttaattccttccctatattattataatgaggactctaatttgtgatgttaagcagtttattgcaaatctcttgggtgtttggcgtgttttgtacgtttaagtatgttataacttgcttaaaagatagaatttcttgaagctgtgaatgttaagattgactgtgattttgggtgaatacttcattctatataataaaataaggtaatgtattaaagggcgccagtacctgtaacatataccttggttaataaacaggagccacataaccccattcactttgtattactctctattttacctgattcttctagacctctgcatttaaaataacgacagtgaccaccatgtgctggctgttcattacagtagtcttatttcttatataaattgctctgtttaggacgagtaagctcacagtgttggtagatttattacaacacagcagtaacaacttcatagtcataaaagacattgaatattgaagaggtttaattataatgatgtatataaatgtccttaaaaagaagtgttaatagaaataaccttgttagtgtaatcgtgcctttaacttgtgaattcctttgtcttcctgaagagtaagttaaaatatccatcttcttttggtgatggggagggtgagagaacagacacacatacaaatcttatggttaaaggtcaacttgcaatatgttttgaacgtatctttcctgttggctcttagatttctgtttgctatcttttatttttctctctcttatggcctgttttgaaatcttaactttattatcatttcccagaaaatagaaatatttataaactaatggtaggattatttgcaaacttcaaaccaatcctcattgcttgctttttgctattagatactccaggaaaagtagtaagtcacaatgcaaaaaattgtttgggaaaaatgcaaagagaaaaattgtgtaatagcagattcttttcagcctcctggtggcagttcatgtgtgtgtatgtatacatgtgtgtgttttttttccttgtcaggattaattcagtgggaagtaatgtgacagattttgccatatggatattgatggaccttttcattttacctggcttagtgataggtataaaaaataattctgaacataatatatggaccaccttatttcatatattttaacacctattattttactattatatgtaggttgaaaaatactgcttttattgtgtttttggtgcaagtatatgatttcttggttaaagctgatcattccatagaaacattttaaatgaaatggcccctcaagagaaagatcagctttgtcccttcacgggggtgtttaggcagcaaagacctagagtattatggaataatttgtcctaggtcaggctgctataactgtgtaaggacaaaagcagagtggaaggagatgggagcatctgggacccatttgtttcctcgagaggagacaatggatctttttaaggaaattgttggataaatcagtgtctcctccttctttccctctcttcctacagggtccctgtgttcatgatgaggactctggcctatcgctcattggaaaacctgcccttcaggctcttttatatcactgccatttttatgaacatttgaatcagatggtaaagcattgttacctaggacggtgtatgtttgatttgaatttttctgcttttgatagaaattcagaaagcaatgatttaaatggtaagtacgatatctttgtatttttatttttgtaatatgtaacttgtaaaaactgttaaaaatacatatatttgttttaaaaatttgaaaaatgaaagtatacagggaaaacattcatttccagttctaccacccagagagatgtattttcttcccgtcttctttctctgtatagcctttgtttgttttatgtaattatgttcatatcttgtgtacatttttgtatttccttctttcactaaatattctgcaagcatttttctatgttataaattcttcatggaaattatttttgacatcttattaatactttataagttatgcccatcagtacagttttatagtttctttctctgttaacgtctcaaacttttttggaactttcacttctaggcaatgtacagtttttttatccttcttgtgaatgagactttttcccactatattttctaattcattttgctcatgtatcaaaaagttatttattttagtatgttacttatttgtcacaatattttcctgaaacctttttattccttttgtttgtaggttcttgtagatttgctaagtataagatctgagcacataaaaataattatatcttgtaataaatagtaatttaataatataaatagcttttatttttaaattcatttttataataattttttagaatcttgccatagtttcaaacttacagaaaagcttcaggaatagtacaaaagaattctcaaatgttaacattttacagtatttacatcttgccacatgtgtgtgtatgtgtgtataaataaacggatatgtatgatctatatatactctttttgagccatttaagagtaagttgaagacatgaagttcctttatccccgaattattaagtgtgaatgtgtgattcacttttctgtttacttcttggaagaatcaagaaaatgagatttgatgaagttttgaacattttaaatatccctcttagaaaagtgactcacttaattgtttagatttctctggatcagttacttagagcatggcccttaaactaacagcattggcatcttctgtgaacttgttagaagtgaacactcagggcttccactctgacctggggtattggagcctctggggctggggctgaagcagctgctttagcaagctctcagtgattcttatgcacattaaaaaaaaactctccttagatttttttttttttaaatagtggtctatctcagaagccagatccatataagttttttcctttctttagttttgaattggtttcctgtaatgcgtacccttttaattaattgttacagttcctaggagggtgtccatgttaacaattttctcgttgttgcaggtttagatgactcattcaagttttggagggctccatctaggacaagtcaggatcgagatccaagttctctctccacctcagaaacaacggtacttgcaaagaatgcataagtcctttattttgaatctctgaaaaaatttgagtttgcctagtgggagagttaagaatacaaagtgtaaggttataacagctatgatttattcgaagtgctttctgcagaattttgctaaattattgtattcaagctgcacatcagtcatacattatagatacttatcttgcttttctgtgtgcgcaagccactctgaagtaaagtaactttgtgatcattagtgctataggtagcagaactggagtttgaaccagggtgtgtcttgctacggtatagctacactgaatatccctttagttgagaattttcaacctctctttcctaccttttttgatagtacgaaagtgtgaaaatatgtttttcgttagtattagaagagaacaaatcctacatgttaaaaatggttgattaccctgaaattgtgcttaagggcagggcaatatgaagaacattcaaatgattctagtgtggtgctgacagctttaaacacacttctaaatacttgcatcacatagaagtttatctggaatacctgaaatttatatatgcctgtttgcatgccttctttccttcccctttcattcatgcattagttgctttttttgcagaaaagtttgaaacactgagtatttataaggaatgattgatactaggtttcagttatttacaaacatacagaatcatttattctcaactgggaaatgttacttttaattttaaagtgtttttgaaataattagtgtattatacaacatatcaggaagggaaagatttgatacacctgtttccaggaacaaaaataatatgagaataataattatacagacattataatgtaaagattatgtttaatctatctcctagtttctcaaaagactgatactttttgctacagttttaagtctttttttccctagattcaagagaagtatttgtgtttagtgctacattggacctttgtatggaaaagtaagataattacccgagttccactagatgtcatgctttcctttccaaggtggagatagtgtgtacctttgtctcaacaagagcagtaatatgataaatgccaaactgaattgtcttaattggttatttagttcacagaaggacagcatgaaagtgtgcttaaaagtaaattttgtttgttagcctatttgtcaaaagggctatagactagccttgaaatctttgtacatatttcagtttttttgcttttagtaggtactcagtaaataataattgctctaattaactttgagttatcttagctattttgtggtgagcactgaagtcatatttatcctatacaagaaaacctaaatacaaaaagcaaaagcatatcaaccttttgaatttctctattttgtaataacatttaatcttacaggttagaatactagattttctgagaaaatttggaaatatgttattaattgtagtcattattaaagaaagaagcaccccaattaaagtgaaggtctttaacttgtttgtgtttgaatgtaacacagacttttagaaatatataccaatggaatcttttcagtttttttaaaagaattttgtaatatgtgtaaaatttatttcttattattttctctaaaggctagtgtattctgttagaatttttacagaatttactttttactttctttttcgggaggtttccaaacaacttttagaatgggtgacttttagttacaaaaatagtcttcgtaccctaattctactagttatattttctttaccatacccaagatgatgtgtatctttgtcccaacaggagaaaaatctggagagtgttttcattctgccagtgttactttaaaccaaagctgtcagtacttcgaccaaggcatactttcttatgtataaaaaaatgttgaagttacaaattgaggtataagttgagtggatgtaaatcttattaatcagcttatctgcttatttatatctttgttttgtttatctcagaattgagaaaaaatgcaatcctttattggttagttggctggtttttccattttatctttccaaggaaagcatcatcttttgatttgggtcatgtcatccagcatgctctcctgggttactatccattttgtgctgttaatgccaagttagggactttcatgctgttacctaatgtgtattagttccgttgtttggcaagcttcgtaaggattgttgggtcctgtatgtttgataaactgcagatagagtaagcagagtgtcattgttagctttggggcatcgcccttgtaaatgcttcctcaggagtggcctctatcgaactcaatattctcctcctctggggtaggaggatgcagccattaggtggtgtttttcttctcgaaatcacgtttatatccaagatggatagctgtttgtgcctcttacacacctgtgtgcagcaacagctttatgaccaaaatttggtctcttctgttgttcctgagcagaactatgtctgtatttttttaaatttatcaattgtcaaaataaaatatgtgggaaatataattcctttctttttgagcctttctttgtgaaatatgtgatctttcaaacttttttctggaacacagatttaaagaaaactgattttagtttttctaaacatttaaagagaatttttacacttcatagtcttaaaacaactgaaaagcattgttactattttgcaaaagaggaaattagggcatggagtgaggtcccactccatggagtgcatgcttgttcaagttcctagcatggtaactggtagaccattcttttgagtccagaagtatgtttgcttcctccttcactctaaggccagatgtgattgatcccataaaagatggtgtagtcaagggacagtgaggtttctttagagggaaagatgaaatgaaaagtggttttgtgtaggaagtggccactgaaatgggctttacaatattatccccttctcttttatatgcatacaaacatttgcaagggactgaaaagattcaaatattccttaggattcagtgaccacttaacaaatgacaaaagtctacttgagaacataaagcatacttagactttctaactaaatatgaagttgtgttgtactgaaggcattaacattcagaaaatgcaagaggttgtttggagtagaatgtgggacggaaagctaaagtttgatgacctgactaatcagataggagttagttaagaaagctgaatcagcttttggatttgaagaggtaagatataagagctataaagataaagatgtaaggatatttcagcagcatggaatggcatgaaacattacaactgatatgagagaaataacgtattgacactcatttgatggtagttaaaattgttttatagaaggaagagtagacagaggatagtttaagcagggatggatccaagaggctttctaaaagaaaaatagttttgacataggcatcactgataggacatacaaatacctccagcatggtgaccccaggaaaacttgaggaggtggtagtttgtgtgatgatggagagagaaagaaaatgttatactctgtttaaataaatttcagctacctgtggattatccagagtctaacaacctcttatatttagttaggaggaaaatacaagtgagacaagctcttggaaatttgtgctcttagattacacacaggatggcacaggaactgtgactgtgttgtggtgatgatctgtctctttaagtggtcctttggttagacatgcaagaatcgtctatcatcttctgctcattccttcagaggacttttctgagctttcttttttttacatatattgtacataatccatttgaattatgaatctattagttgaaataatttaaacttcttgttataatttggttagaattaatgattacaaattgagaagcatgccaaagctttcctgctcctgggcatatagagaaaggtattatttattaaaatgaacacatgaagcttagaatctcttagaaacccttcatatcttatatttttccatgttttcaaaatgtggctagacttgtactttatttttttcacactacaatccttattttctccctttgtacctttttaaaaacaattaaataaacttttttggcaccagtactgcttttgagggaagttgatggaactattacaagatcattttggcaaatacaatattcaagttctgaattaactttcaaaaaaagttaaagtgtctagtgaaatcacttgcttctgtaaggcagatacaaagaaaatcatttttgtacattgatgcatttttgcttatatgacagaaattgttttttacattccagttctacttggatatggcaaatgactctgctattttcagtgatttcaaagggactttcttaattttagctgcttattttacactgaagcataatttagaaaccttctttagttaccaaatctgcttacaaacacactgaagaacaatttttttcagtttttataagcaagatttgagtccattttatttttttattttcccctagttttgagctaaaatgacaaataaaattgtatatatttgagatatacagtgagattacttgacatatgtatatgtgatgaaatgattaccacagtcaaattagttaacacatctgtcacctaagagtcaaccttttttttttgtggtgagaacacttaagaactactctctttcaagtagactgtgcagtgttattaaccatattaaccatattcaccatgctacacattagaccatattaaccatattcaccatgctacacattagatccccagaacatactcatcttatctgaaagtttgcactctttgaccaaacatctccccttttccccagctcctatcccctagcaacatccattacactaatctgagtctgttttaggacagtacctttaagtagcatcagcctgctctaaaaagcttgtattgtcttttgtaatatctgtaaagtaataaggctagaaatatattcaaattcagatttttttgtcttaccgagggattataaattgaagatctcaggatatgtcatgtggcagatgtgaaagcgagggaaaagtctagattgtgattttgcacttagaccattctaatgaattgagcaagtgatagatacaagaattagactctcgctgttgtaagaggacaaccctagttatcctacttactgtgaggtacagagcagagcagcgagaagcttgacaggaacggatgacttcagcagactaagtttgctcttaaactaagccaattcctcctccttcacctgggatggggcagctgaagttagtctagctgaagttccgcggggacacagggggatcagggagaaagaagcaagcctctcctcgcaaacaaggccagccagctttctcaagaggtacgtctgaggacttcctctgattctaacgaatttatgctgtcatgaatgcagttctggactgagaatcctagtctcaactcagacaaatcccttaacttgtggtccttttctctaaatgaggacgtggactaggtcaggctttttgtacctatagcttcgtaggctcatactgcaccttccagtagctaatacttaatgccaaaattgtctagttattacttggattttaaggtgaaaagtaacatgtttacatatcgatgtactttatcaaatgtaaccaaatactatcgattggagattatatctaaacaagcaaagatttgagcatagaactgggacaatttgctttaatacttttttgcttttagttattaaaatagcaatatattagtttagcacacttaaaaaatagaggctagtagaaatataaatcatccataatcaattttaaagcaccatataaagcaatcattgtgtttccccaaccacatggggtaagttataatacaataaggtactttctaaaagcatcttttctaaacttgtgtatcccttctgtggactatactaaggaaaatcacatctttattaatgcctgacctttgtcatgaatcacaactttgctttcttctaatgagccaggtatttagtgggcccttataagctttcttttcccacaccgatcgttgaaaccgcaaaccaggtacctattctatttatatcagtaataaggccttcttgagtctttatcagttgaaagaatgttcagtgaaatgataaaggatttcagcatcattatccccttaacttttcttatacaaccaaaagagttgtggcaggagccagatatattagcttgtgcatagtttgtgatatcagtcttggcataggattattttcttcacagaactataaatgttgtcttgatatctgttgacaggaacattttttcacatatctctcattgccaaattgtaggcaaatatatttttaaaaataaacaagcttgctgggcgcggtggctcacgcctgtaatcccagcactttgggaggcagaggcgggcggatcacgaggtcaggagatcgagaccatcctggctaacacagtgaaaccctgcctctactaaaaatacaaaaaattagccgggcgtggtggcgggcgcctgtagtcccagctactcgggaggctgaggcaggagaatggcgtgaacccgggaggcggagcttgcagtgagccgagatcgtgccactgcactccagcctgggcaacagagtgagactccgtctcaaaaaaaaaaaaaataaacaagctttaggttatttttacttagtatctggatctaatactatataaaataaggcatttgatgtttgtttatgattgacttatttagactgaacttttttccagatttactttttagattatgtgcttagcctacattttttagctgcagctttctcacttatttcttggcatcatgactgttatacttacttaatgtggtgaaagatggttaagggctcaagttaaaagggggatttaaaaaactgtatattccatttttagtaatttcttcaaatttatattctctttactattagaaactgcaaatgaaaataaccttagtttttgctttcatttcatcatggtaattctaaggtactctaagtgttaagatatatacacaatcaatgtacaaatactgtgagctatataggatctgagtctggaatgatggtttataacttctatggatagctaatgttgtgttgcatgtactgatatggaggctacccaggtatgggcacttcatgttacttcacagaagagaaattgatggtaaggaaaagagttatctgacctcaccacataagtgtttttcaactaagaggtgcttagttgaacacctcttagcgcaaacacatcactttgcgctttttcagtcttagaaggtcggtctgctcattataaacctgtaggtgaaattgtacttgctttccacggattttgttatatttaatgttgtattctgaagcaatctcagcaaactggcacaattttttagtgttcttccttgataggaggtgaggtagagaaaaatcttttaatacttctaattttttaggcactattaaaatttatatgtgccatttggaacattaaaaatatctttattgtcaatcaagaaatgcaaaatatcacaataaattatagttaaggtggtatattttagcctttctaacatttgggcaatgagggaattggccttatgggaaccttaaactcctaaatgggcctgaagtcaatactgctcctttgagttactgatttatgtaaatgataacaattcctttaagaagtggaaatgccatttaaaaaaactgctgtaactcccaagatatggaatcttttctagttatcctaactagtataattttgtcttaaacctccttgtttaaggatatcttgtgtgtatgttgcctgtgtttcattttccgtactgtaacattaataagtaaaataatttactgattcataggtggcaccttcattggggagtactgaatttcagccacttgtgcagtcaacaacacttctacctgaagcctcccatgaccagtttgtggctcaaggtatccttttagtgaagacattctaccttcaaaaagaaaaatgacaagttggtccagacagatattttgaaagtaaatgtctaaagaacaaaattttaatgaaataagttgtagaccattatgaaatacatttagaaccaatatatcagaaattaataaaataaatgctcttaactaataaatggaatttggctcttaaataaatagtccaattcctgtgtggctccttattaggcgctcgtaggtatttgacatttgaatttgggaactgatgggtataacttaactttattttttcccttcttttgagaaaacactttgctacaagtaatccacttgaaagtaaagcgattctggttttaagtattttctaaggctatgcttccatttaaaggcacataaaatgtattgagtctttattttattagaaatgcacaatatacaacttgggacttatttttattaatggcaatatataaattttgctccttgtgctgggaactgcttccaaccctgctgtgcttcaaatttgcaactttgctttttttttttttttttaaattctagagagtatataagccttattcagtagcattaaatttttgacttgaaaggactatactatctaaaaagaaagtaattttaaacactggcatacatataagtatatgcagaaaaaatactttctgaaacatttagaaaaacttgctgaattaaaactttgaactttcattacaatatttgttccaataatttcctaaacagtgttccatattggtttttagtaattcatgttcactatatataaaattatttaactgtagaaaatactcatttgatcttcttaagaacaaaaggagcaaactcagattatttaaatggctcaggacatagggcatgaaatgaaattcgatcatgaatttcatgaacatttatctctaaaagcatgttgccttactctgatttttaacatctttattgagatataattcacataccatataattcacttgtttaaagtgtatactttattggttttaagtatattcagagttgtgcaaccgtcaccacgatcaattttaggatatttccatcatcttgcaaaaaaaccctatacccattagcagtcactccctgtctcccccattcttggcactctacggaatcactaatctactttccttctttatagatttgcccgttttggacattttgtatgaatggaatcatataacatggtcttgtgtgactggcttctttcacttagtgtgctgttttcaaggttcatccatgttctagcatgtatcagaacttcatttatttattgacaaataatattccactgtatgaatatattacagttacccattcatcacgtgatataggcatttgtgtggatatacaggctttctgttttttgtttggattacctttgattttaaatttattttattttcaagtattaacgctttttttttttttttttttttttggaggcagtctcactctgttgcccaggctggagtgcagtggcgcaatcttggctcagtgcagcctctgcctcctgggttcaggagattcttctgcctcagcctcctgagtagctgggattacagaggtgtgccggtacacctgcctaatttttgtatttttagtagagcttgggtttcatcatgttgcccaggctggtctctaacccctgacctcagatgatccacctgccttggcctcccaaagtgctgggattacagacatgagccaccatgcccgtccacaaatagtatgctttcaatgtatatttatgcaattttactctttgccaatcatttcagcacatatatatgaccaaaaaaaaaaaaaaaagcatataaaagaaagaatacccacagaaaggggaggcatgaacagaggatgaatcctcacaattttttggtgatatatgacactatcaggtatattccttttttttcaaaacttggaaataagagatcagggtgtcaaatgtcctccttagttttacaaaataaattagcaagaaaattgaaaaaatatgtatcaatttatattctgaactagctctctttacagaaaaattcaaaaaaggtttctatatatgcttgctctagaagtgctgaagatatgtaatacatattttatgaatactgaaagatttcccttgaaattgtttggacaattttcattagaattatctcaatttaattttttccatttttatttccaaagatttatcattattttttaagagacagggtctagctctgtcacccaggctggagtgcagtggcatggtcatagctcattgtagtctcgaacacctggactcaagtaatcctcctgtctcagtttcccaagtggctgggattacaggcgtaatatttgaggggaaaagaacacaaactctcatgtaaaaatgagcagaaaacatgaaaagataattcacaaaggacctaaaagtagcctttatctttggaaaaatattatacaaattaatactacccgaagatacttttttatttattaaattgccaacaattaagtattggcagtacattcttttggcgaggctgtggaaaataagcactttcatacattgttagagaaaatgcaaattagtataattttggaagggaatttggcaatagataacaaaactatgtatttacctttgattaaacaattccacttctaggaattctcttttatttatctccagcaatataaaaatacatatgtacttgataatttagcaagcattgtttgtaattataaaacatggaaacaacacaaatgcctgtaagtagaaggatagtttttgatagatatataacaatatatagataatgataaacatataacaaaattacttataaataaaatttatttttaaaataacaatggagaactacagctattagaaagagggggctgggcacagcagctcacaccaataatcctagaacttttggaggctgaggtgggagatacttttcacgatagtgagactgtatctctacaaaatataaaataaattagccaggcatggtggcacacacctgtggtctcagctactcaggaggctgaggtgggaggagcacttgagcccaggctttgaggcttcagtgagccatgattgcaccagactccagcctgggcaacagtgagaccatttctccaaaaacgaaaaaaaaaaaaaaaaaaagaggggaggatatcttcaaacagatatggaccaaattttaggaaatattgtcaagtgaagaaagaagcacaatgataaagagtatttatagtttatgatatttacagttttctacttttgcatatgaaagaaggggaaatttaaaatacgtgtatctatttgtgtagaaagaaaacaggaaggaacagctggaaatgaatgagattaattatgagaatgggtgggagttagttaggaaataagagaggatgggaacagtgtagaagagattgaggggtgggatagtgacccttctctgcatgtatcttcttgtataggttgacttttataaccatgtatgttttacttgctgaaaaaaataaaatcaacaaaaatgggaaacaataacatggaatacaaaccaattaatccagctacatttcacatgaatagcattgaagtgagagaggaagtaaccccagtaactctcagacatatttttaggactttagtcctcagactattggcaaaatgaactgtaaccaagcattgaactctagttactagttttattttttgcagtattattagttagaaattctgaaactacttattgtgttcataaggcaaggcaaataagtaaatatattgtagacaatgaaagccagaatttttactttcacataacggaaattacaaatatggaagggaaggaagatgtttaatgttggattatatttggagtgttggattatatttggagctttcagtatgaatcaattattttgttttttaagagatgaggtctcattctgtcatccaggctggaggacagtgctgtgatcatagttcactgcagttgccacctcctgggctcaagcgatcctcccacctcatcccgagtagccaggattaaaggaatgtgccgccatgcctggttcatttttaaatctttttgtagagataggtttctgtatgttgctcaggctgatcttgaactccttgcctaaagtgatcctcctaccccagcctcacaaaattctggaattacaggcaaattaatgatttttaattcgtagataaaatatgtttatgtgcccaggggtatgtatgtgcatgcatacgtatatacacacacgttttctagcttagaaacaatgacactctaaatagcaatgtatacatttagtgcccaaatcttgctttccaaactccattctccactttagggaatcgacactttggaacaaatatccaattttagagcttggacgaggaaagaacaagatgaacctggaacatcttgctgtgccagaaagtaagggaatgctcaaaggttaatggaggtgttcactaatgtagggtgcaggtaccttattactgttctaaagtctaaaagtattttggagaaaagggagctctcatacagtgttgttgggaaccactgtggagaacagtatgcaggttcctcaaaaactaaaaatagaacctaccctctgatccagcaatccagctgctgagtatatatctaaaagaaaaaaaaagtatatcgacgagatagctgcactcccatgttgattgcaacgccattcgtgatagccaagatagggaatcagtctaagttccgtcagcaaatgaatggataaagaaaatgaaccatatatgtacacaatgaaatattactcagagaaaagaatgaagtcctgtcatttgcagcaacatggatggaactggaggccattgtgttaaatgaaataagccaggcacagaaagacaaatattgcaactcatatttgggaactaaaaaaaaaaaaagttgaactcatgaaaatagagagtagaatgagggttaccagaggctaaagagtggagagccagagataaagaagggatggttagtgggtacaaaatacagttaggaggaataagatctagtgttcagtagcacaacagggtaactatagttaacaataatttattgtatagttcaaaataactaaaagaatggagttggaatgttcccaacacaaagaaatggtaaatgtttgaggtgatggatgtcccagttaccttgatttgagcattgcacatagtatgcctgtatcaaaatatcatgtgtaccccataaatatgtacaatgattatatatccataattaaaaatttaaaaataataaaaatagtaagattttactctgaagaaaacctaaagattatttgaatttggacacacctttggcccctcgagtttcagaaaaaggattgtaaatcatctttttgttctcagtgtctgaatacgtggggcatgaagtcatgttctgccctttctgacctgtctcttctgcatacgacaatgtccgtgtgtacacatctacacatctacatccacacatggtggaaggtggaggtcaggagtagtaggggtagcctgacccctaacctcaaggttaagatgagccaagaagctaaggcaattccccaactatacattatcattttcaggaactttcctatgattataagaacttttgagtattgtacatagctgtaaggtaaataataattcttatgtttattttcaataataggtcaccaggaaagtacatcaccacggccacctcatgattcatctctttctgctcccctgcccaaactgtgtgtttttgttactccatctcttctttcagcaatgtgcagcctcttggacaacctcttgacgattgctcccagagacactgcaaaggcttttcgacaagctcatctcatagaacttctctgtaggtaagagataaatactcctagagaggcatgttagttgagataaatttacacaaactgtattcatgacttgatacaagatttcttgtgacctggaaatacagctttattcttttttaggctcattgaactctaggattttgcttttgccagaattgtcttggtggtttttattttacatctattaaagcacttgtattagtttgttatcttgactattaaggccaaagaaaaactcctgctttctaaaattcatggattctaaaccttatttatcctccagcacacttaaggaatatggtgctatcccctgttcttaatggatgtgagggactttgggaattcatctttttagtggtcatatcagaataatgtccctgggttgaaaaattattggttaaattcatttggagttattttgttaagggaaattaaacttttcatcaaaaagtattctgataaaatttagggaaattaaattcaaagaaaaattatttgaatttttattacttatttgatattaatcagtctgtaacataatttttctgaatttctaggaaggtatagtagaaaaggactagatattgaattcaggttgacctaaggtctaattatagttcattcactcagtagcttgcagccttgggaaattactccctactgtgtcattaacacctatttaatggggttagtgtgagaattaaaagtgatggtatctaggatacccccttaagtattacttctcttttcttctggtgttcagtttattctagccaaccatacccacctccttttgaccacatgtttatttgcatttctctgtctctctgtccctttacctttgaacatacaccatctgaaatgtcttgcatcttcttgccaaatcatagtgtcttctctttctttctgggatattaagaaaactctagaaaatataaactctaaaagaagtattccttgtttcacctcattcaattgtaattattcctttaacatgtatgatacgcaatggagtatgagtttgttctggctttaatatttattgatcatttttttactgtacctactcggattggaaaagtaactgctagtcagttggctttccttcctggatgctcctgcctgaagatgaccaaaatagagctctagggataggatcttctttgcttcttacgagtcagctaagagtctgatgtggcattgaggccacaggggcattaaaagaccttttatggcaaaggcttatcatatttccgtacctgtttttcatttttgactttaaaaaaatcctacttgttttactttatttttatttttttatttttatttattttgagacggagtttcactcttattgcccaggctggaatgcagtggcgcgatctcggctcactgcaacctccgcctcctgggttcaagcgattctcctgtctcaacctcctgagtagctgggattacaggcatctgccactacacccagctaatttttggtacctttagtagagacggggtttcaccatgttcaccaggctggtcttgaactcctgaccccaggtgatccacccaccttggcctcccaaagtgctgggattacaggcgtgagccaccgcacccggcctgttttactttattttgttttttactttctaaatatgaacagtgttcttgctattttagccagtatttttgctattttattaggaaaataaccaccaagtttcctgttactcatgggctgtattatattttattctgcttttaattaggtttccttagatattttcttcacagctctttgcttctcacttttctctgacaagatattttcctgtttgaaggtaacccaggatacaatttgaaattctttgagatatctttttataaacattttctttgcttataaagatcctttctcttgaattgtattcgagttacctttaaacttcaaattctgatttcttaatctttaataaaaagtatactaatcttctgaaggattttctttttctgatcgtcacagcattgcagatgctaccctcatacagacatgtgtccaggaactcagagccctgctgccttcatcacctccagctgaacacactcaggctcaggtaagcatctcaagtctgtttgtgggtttgtttacgttaggtgtcaaaaataaaaatcttgctgaggagatactagtcataggaaaaggatgaaaacctctcaaaatatacatggtatgatgagattattcgaaatacgttacttgaaattttaatatgggacatgtctggatgttagaaaagagaggtggggtttgaagacctagattctattcttgactccatcattaaccagctttaaatgtatgatcaagtgtctggatatcttggagcaccactttaataataaagagggacattggtatagttcacttcctgcttctgtgattttaggctatctctgttatttacaccaaagttaaagttgttaaaatatttggtggctaagttatgtgtattttcaaaacccaatttgataaaaatgatttattcttgttccttcacagatatttagttttaaattcttgcctatagctagaatctatttataaaacatgcttaacaattattcatgtagctgttgctaacagaaattttatttcaaaatcaaattttaagaagggctacaagatttatttaggaggtgatgaattaaaggtgaagtagaccaatatctcttgctttgagatgtgttctttgagctgaataagacagaccccattacaaagtttgggaatgctacacgcatggtctttgaagctgttgtcctggtgcagtgttttcacctgagcatgcctattgcataatgactgtctcctccatttttctgctctccatccagcaaatctttgttgagtacttgctgtgtgcctgaatcttctccaagtgaataaaacaaagacccttccctcaagttgggagaatagataattagaaaatccatatatgcctgaagatgatagacatctcagaagaaaaactaaagcaggggacaggaagtgatgtcagagttggaagggtagggctattccacttaggatgattaggcagtgtcgtgggacccaaagttagtgaagaagctagtcctatggtcattgcaagacccctgaggttggggtatgcttggcctatccaagaaacagcaaggagggtggagtcgctggagcagaatctatgagggcaagatgaggccagaggggcacagtcagctccatgaagtcaggaccttgctggctgttatgttccattgtgttctgagtgtctggcatagggcttgtctcatgacaggtgctcacttgatacttgtgggatgaatgaataatagcagtagcaaacatttatgggcatttgtttttgttaattcatgtaatcttcacaagaatcatgaagttatcattaatgtcattttataaaggaaatgcctgaggcccagagagatgagtgacttgtccaaggtctctgacatagattccaacctatgcaggtcagttccagggcccacattcttaaccactgcaccagctggccttatgtagattaaatgcttctgggctcttggtatttatataagatcattcactcatttcagaaaattcttgagcctctgctttaccagattctgttctaggtgctagtgatatatccttgaacaaagcagatgagcatctctcctcacgtagagtctgtgccataaatgcaggagacagacagtgaacaagtaaataaaatgcattgtatcagatagtcacaaatggtatggaaaaaagcaattgaggatgggtaaaagggtgtgtcagaaaggggaggggcctcctgaaggtgacacttaagcagaaagctggggaggtgagggagcaggctgcgagtgcctgcggcagatggggtggccagagccctgctggtggggtgatactctgctaaaggtatgatggattaaagtctgtggtcagttggttggtatttttttttaagagggccatacatagaaaaagagttactttatcaactactcttaagatatgaatattttatttaatcttgaatgtgatcatatacaaaagaatctttagcaattcagcgttttctctataacacttcttcttgcctcacctggcatggtttatctatttatggtaatatttcatacatccagaggtcagacttgctataatttcagtagtgtagagtatgaatgtaatatgaagtctcaagacttcacggcagtaaacaaattaaatttcacaaactgaagagtttgtgaagcctggagccacctacacttttatataaagtaagttggcagattagataaagggaggacgtattcatcaggagaagtagggcagaactatttgtaaatagtctgagaccattgacctcagagacacatactccacaaatttacaacaggctctcgactcttcattacactcttacaaccccagaataaggtgagaggaaaaaaagtgtgtgtgtgtgtgtgtatgtgtgtgtgtgtacagagagagagaatgactgatttcagaatatctttataaaattcacttatatgtaactggctcattgcttgagggtagtggacaaatgagacatcacagctcattctttaattgttacatattcagaggattatttttctgaaaagtacttttgccagttaatacttaacaatattagcatcaggcaaattccagagatggttttgttggtaatattgaagatgatttaattttttcttttataattaataatagtaattttatgctgagggcaaaaatagaacatatttgcattttatttgtagcaataactaggctagcttccccccacccctgcttatgcactttgaagggtgtttttgtaatctttctttctttacaaaattatagactttatggctttgttatacacttttccacttcttccataatattgatttcataatttgactacttgaaaaatatgggacttttttttttcttttgaaacagggttttactctgtcacccaggctggagttcagtggtgtgatcacagctcactatagcctctaccttctgggcttaagtggtcctcccatctcagcctcccaagtagctgggactgcaggcccggctaatttttatattttttgtggaaacaggatctcaccgtattgcccaggctggtctcaaactcctgggctcaagccatctgcccaccttggcctctcaaaggactggcattacaggtgtgttagctaccacacctggccaagactttacttctttaaatggaattcaaaacttgactttgaaaacattgctttgtttggtgtatagttgacagtattaatatggctgttaatgacatgcttatgagaaaaataatgctttgtctgctatgtgttaatttcagatcttgaaaaattatggttaatattttattttttattgtgttacaaaagtaaaatgctgtatcactgagatgggctttttatatggcatgtttgatttgaccctgtctccttttcaaacaggtttcctttctcctggaatacctatcctctttgtccaggcttctgcagtcatgtttattggtggagcctgaccttgtgattcaggatgagcttgtgaaacctcttatcaccaatatcattggaattctcaccatatgtaccaaagatgtattaggtaagcttaattgttttagtttagaatgtaagtgaataatactgaggaaaaaaaacttactctgtttcagatattcacttgaaggttactttttgagtttctttttgctagtattttggaaggctttgataatgtgttttatagtttggatgccttttaatggtaccaattaagacaagtgtgtagtataataaaggactacccttgagttttcagtttaaatgagggcaaagctctctgtgtgatgttagaaagtacagtgagttctgggtattaactattcttataaactatggctaaggccaaaagcttaataaaacattcccaataacaagtataagccaatctagaatatatcacaaatttcctaaggtcctaaattattgaaatgtatatatattttgtgatctaatgttatctccaggggaaaatattctatgatgaaaagttgaatgtaatgcttagtggagaaaattaaagcaaagtaggatctttgtcaaaatctaatataattgttttgaaaatgaaaacaatcatttataatgaagtaattgaccatttggtaattctctttgcctttcagttttatttgaactatggatttacttggttttaggtctggaaaatgaagtgtgttatgatacccagcaaagccagttctcagcatctcatcagtgttaaaatgatctcgatgttaaaggaatagtaattccttagaaattcaacaagtggcagtgataccctaactaagcttattaggttagactggacaagctcaacaaggtgatatcacccccagtctctaaggagtgaacattgattctggggagaagagggtgaggcaaaaacatcttagaaattaaaatagtttgtaggcttccaaagctcaactctacctgagacaatcttattactatttctcttcctggtttttcttgagaattccttgagaagcattgacgttgagttcatggaagatacacaagatgtatgcaagactagtgccacaaaactgtggtgaatagatgacagcagctggaggacctttggttgattgtttgatcccaaggtcatatagcaaaaggtggtctgtgtatcttggctgctattggctgccttgtgaatgctttttattgatcctcttgcttttctgtatgatttgagctttgaaaattaattgaaagtagtatatatttaattacataaaagttgtttaacccatcattaattatatcaagcgctgaaaggaaaaaatgtcaatatctgaatgtatatctattagctggttaaattaaaaattgttttctcatatctagcaaaaagttttaaaagttcactaagaatatttttaaagaagtttttaaaatttttttctgaaaaaaataagttttaaatgattttataagaatttattatattgctgttgtttttatatgaattgctaatttatgtatgtaaattgacacattgtgatgatatatatatataagtaaataaattacatgaaaagttattcagcaagtataggtgcaaagctaaatttggtattaataggtctttaatttttaatttaattttcagcttaaatgttttattcggctcttcttaagcctgtattgaataaaaacagtaagctctatacttagcctttttatgtacaaagtacagatatacatatagtacataaagagatatacagtatatgtgtggaattaaaatcttgtggggatggcaatgaggaaacattttctgaaataaactctttagagagccactaatgacaaaagggttgagaaacaccaaggattgccctggggaaggtgcagttttcaagtatctcataggtgctgaagtacacctagatggatctcctcggggttaacgtcctataaagtttacattatagtggaattagataaaagatgacagatccccctgaaggcatggtcagagagagtcctcagcgactgctctccagcttccatttacctgagtggagagaagggaaaatgggtcctcatcctagaattgctacatccttagccataggaaaagctgcagaatcttcttttgcgtcatacttttctttgtgggatgatacttttcttggttcttcaaagaaattctttcttttctaccttgaccttggcacactgtgctttcctttcacccctgcccaaagctgctggaggggataaaggaaataggggaaaacttactctgacaaaagtagcacaaacaatgacatatttttataatgtgccaatatgtagttctgcagtcatggcttaatatttagtttgtcacaccttctgattgttcttgagtatgctttaataagaggagagtttgtgagtgtggctttatatgcaggagggtggaggggagatatcttaagaagcaatggaaaagaagttaattgaaataaattttggataatgctgaattagatttgtcttcatttgataagtgcacacccctcattttaagtgtaatgaagcgtctgtggtaagttttatatcttgaaaggttcttttccttctttgtgttaataacttgaagtgttttgattaattttatagataaagagttaatatcagctttttatcacacatggacacatttatttaatcttctggccatgctcctgaggaaagctggtgccatcacactcccgtttgttaccgtggccctggccaagcactggacagcggcgattggtaagaagatacttgcataatcttgggggctttctgctaataaaacgagataatgattctgcctgtttaggtatgtaaattcactaaagttaagtaattatagcatggcatataaaagaggtatcagggtgcttgctttgaaaaatttgcagtgttcttgagccccccaaaaatgcatttttgaaaaattgaaacacattttgagataacataaaagcgagttaggaaagcctgtggttttattattttttaagctttttaaagatgtcatccctgaagctctgttttattgagaacattatattggccactgttggtttttttaaattttactttaagttctgggatacatgtgcagaacgtgcaggttttttacataggaatacatgtgccatggtggtttgctgcacctatcaaccgatcatctaggttttaagccccacatgcattaggtatttgtcctaatgctctccctccccttgcttctcatcccccgacacggtgtgtgatgttccctaccctgtgtccatgtgttctcattgttcatctctcacttgtgaatgagaacacacagtgtttggttttctgttcctgtgttagtttgctgagaatgatggcttccagcttcatccgtgtacctgaaaggacatgaactcattctttttttatggctgcataatgttccatggtgtatatgtgctgcattttctttatccactgtgtcattgatgggcattgggttggttccaagtctttgctattgtgaacagtgccacagtaaacatatgtgtgcatttgtctttacagtaggatgatttataaaactttaggtatatacccagtaatgggattgttgggtcaaatggtatttctggttctagatgcttgaggaattgccacactgtcttccacaatggttaaactaacttatactcccaccagcagtgtaaaagtgttcccattttctccacatcctcgccagcatctgttgtttcctgacttttgaataatcaccattctaactggcctgagatggtatctcattgtggttttgatttgcatttctctaatgaccagtgatgatgggttttttttcatgtttgtcggccgcataaatgtcatcttttgagaagtgtctgttcgtatccttcgcccactttttgatgcggttgtttgtttttttcttgtaaatttgtttaagttccttgtagattctggatgttagacctttgtcagatggatagattacaaaaattttctcccattgtgtaggttgcctgttcactctgatgatagtttgttttgctatgcagacgctctttagtttagatcccatttgtcagttgtaagcctgtggttttataaaggtacatatgatatgattataaaacaatgagataaattttactgtgttggtatagaaaccagtatcctttctgacatatgtacattgtatgtggatacatcttcatatataaaatctggtatacatgataacatggaaagttaggatacaaataactttctcatcacatcagaattttcttatagtacagaaatgccaagagtatagtataattatttttatgtttttcatgatagttgcccactaaaataaacatgattattttaaaataactaatctttaatttttcatgaagcctcctaaattttagcatagaaaaaagctgttttttaacataaatattcataactgacatttatgtaacctttttaaacaacctacttaaatgtactcaaaattgagttattttaagcttccaaagtacctgctaattcaactgaccgattttttttaacatttattttatcatttgatcattcagtaaacttaaatgcatgatacaatttttaaccaaagcgatagtaagaattatggcaaatgcatgtttaacaaggaacagaattgttaattttctggatgtaggagttctgagtctaccatggagtacagtgtccacgtaggatatcattattttgtttaaaatataataattgaaagagattgactgattaagacattgggattttcttcttgtatttattgggggaaaattagtttatcacctgaatcaccaataatatcaatagaaagcatgatgctacccacattagataaatctggcctgcagcttgttttggtaaataaagttttattggaacatagccacactcacttacatattgcatatggctgctttcatgctacaaaagttgaggtgaatagttgtgaaaaagccagttacctgcagagtataaaatacttactacttggacctttacagaaaaagtttgctgacctctgacttaaacttatttatctaacactatttctttagtgataaaataaatacatattaaattcaaaaccttccttcaaaatatgtgtacagttttatgtaataatagtactaatcaaaagtaacttactgcataaatggttttcataatagtaatgttaatgaaaacattaataacaattatcattttttttgccatggttttatttttgtttatttttatttttttaaatcaattgccatctcatatgcccatatacatttaaaacatgtcgtggtcactccgtaacttgtgttatctataagagtcttttctcgaacttgactaatatttggacatcatttaaatgaacataattctcatgaaaccctactgctgactactttatttttcttatgtaactttaatttgtacaagccaaaatctaagtaaaaatttttatggttataattatcacacaagcataaatctaaaatataaaatcaaacaaaattataaatccaatttttcaagtttataaaatgtaaaacaacacatgtaattttgattaaacaaaatcagttctcacaacaggaaattaataatgactgtttcagtgtaaattcctttcagtttggtctgttctttccactctgtattaagtttgtgaatcagttcatgaccactcatgtgctgtctgaactgctatgaaatatttgtttgtacattgtgccaacactgcatactaagtcttgcttttaagttctggttggcaccagctcctttaacagttgcaacacaatcacacaagttggtaatctagatgatccagagtatagttactttaaaatcaacttgatttcctttttgttgaattttgaagaaattttcaaacattcacatctgaaattattcctttagatatgttctgcacatgtgcaggcttgtctgccacgtgtcctgccctgtatactgccagcttgcaattcctttctgttctcttgaccgaagaagcaaaagggcatctccaggctaagagcaaaacacatttatgctgtagtccaacagtggcttcacttcttgatgactctcaggaaaatcagaaatctctagaacaacttagtgatgtaatccttcaggtacgtcatttcttggtttttcaaaaactttatttagcgtttaaataaattgactttcagtcatggtcttgttaaaaactgtctcagtcatttaaattaagaaatagtaatgcttattatgactgtttaaatgatacaaaagtttataaagttaaattaactatctcctccttagccccacccgcttatgttgaccagtttcttcagtgaatatgatgtaaagatttgaagtgaaatattactaatctaaatctaacagttgatcaaaacagtgtttcatatcatgaccaaaatggatatatttcagaaatgcagttatggttcaaaatttattgtaattttaaagatatatctacgtctctgaaaatatattctaagtgacatttgatttctagaaatggaccacagatttttggggttggttacatgtataggtaagtggacttgtctggcacatttggaagaaaatgccccctttccaagccctgttgcctgttttatcttataaaattatgtttacagtctaaaatgtgaatcaagaattttgttaatcagaaaacattctaaaatcactaaagtattattttataagtagatgagtaattttttaaaaactgtgtgtttactaagttaaagttgtacattgttttttacaaataggaatatttttagatttttcagtatttagaattattctttttaatcatgtggttttatgatttttgtcttctcactgaaaggcagaaaagtagtagaattgttgattgaagaatttgcttcagcttcccaatcagccagccacgtttggcaaagatagaagattgtctgtgtgctggtttgttataattcctttgttgcttagaagattgttcctgtgctgatttgttatagtccctttgttgcttagaatttggagatttttacccacttctttgcctgtgagagtcatgatcatgcagatatttctggtatgactgcttgtgcattttgggcacaaggcttgatgatgttgagatgcagaaaggattgccagtaagaagaaaatgcttcctggttcacccaggagctgtcctgtggagagtgtcacagggtcctcaggggactttgtctcccttgtgctacaaaatctggttacctttccagcatagataagaagcctgttaaggcatcccccattttctcatccatctccagcagcgccttcagaagcctggatagagctctaggggagaagcgttcctcaaagcatttctctaaaagcctcttattcttgggaggccatagctttcctgtacctactacctcactgtcagttcactcaaattttcttagttgaaaacaaaaactggacgttgtcccagttttctcattccccatcagaacaacagactttatttcccaatgattaactgagtctccagttttgcactttaaagaatgttgtaaggaggaaaattcaaaccttttcaaaagtctcccaaccacaacccctatgtaatttaattataaatttcccaactttggctttggttggagcacggtactgcttggggaaaggcttttgctcttgctgacacacttggctcgtcagagaatttcagtgacttcactcagaggactgagtgcagtgagggcagtgtgctgggccctgccctccctgctgaggccaaaatggcaataggtgtgggagcctggctctgcatggatgactgtgggtgtcctgcaaccaatcctcctggacctgggaaatttaaagacttccagccaggcaaagccagggctattttatttcccaactctttaatgttgtttgtggtgctgtgtttgaagggtctctgatgagactcatgatgcatatggatccatgtagggtaatgaatcagtttataatagtatacgcaggaaaaaaaaaatctgtgctagaggaatttgtgaaatttaccttgcccttatttttacctaatactttgtaatattattcattataaaagcttttgtttataatttttttgttacctttttggacaaagaaaatgagatagcctacagtcacagaatatctcaatgattttcctaatgactagctaattttcctctttatttctctaaattacaaatcacgtattttgtgagggtatggatacattaaccaattatttaaaccatgtttcctaataaatcatactctttgtgttcgtgtaagcagtagaatttggatacatgacatctgttagaaaggcacaggcaagtttaagacaaagaaagtgaagagaggaagtatactcctggcacactcatgacaaaatgtgtacctaatgtaagttgggacagttaatgggcctattaaattacaaacactgttttctttgccttatagaaataggatatgtgaattaaaatattattagaatacattcaacagcaacacgttttgataagtaataaatgtagcttactatatgtccatggaggctgtggtttgggccaggtgctgtatgaagcaaagtaaattacagtctttaaattatctgaagaaattatattctaaaattgatgtctttcaaaggtctaagttttctgtaaaatcatactcaaaaaacatttgatatgggaccttaggcaaatcacttaacttcttgggattcagttcttcaagtgcaaaatgataggcttttattacattattactaagtttcagctgcctctaaaatctccatcctcctaacaaatcactgtattggaacttcagttaaatgtctggtcagagttatcttttaaatggtgctttatagcagtatcccataggggatacatgttgaaagtattcatacttacatcttaagtcatgtgtaagtgtttttttctaagtccattttgaggtggtttcagactttgagcattttctaagaaatattcagctgtcttttgtccataaaatactgaacacatttgacttagcagagattttaccttccctagtttatgaagatacagtagtctcctcttatctgtagttttgccttttatagcttcagttactcatggttgactgtagtccagaaatattaaatggaaaattccagaaatacacaatacttaacgtcttaaattgcatgccattctgagtagtatgatgaaatatgctctgtctcccctcaggacgtgaatcatgctatgtctagcttacccatgctgcatatgatacgtgcccattcatcacttagtatagcaatcttggttatcagactgatgaatcacaagacgaagaaggatgagtgcattgtagtaagatattttagagagagagacagagaggccacaatcacataatttttattatactattctgttattattattgttagtctcctacctgcctaatttataattaaactttattgtagttacatatttataggaataaaacttagaatatatggagttgggtactattcatggttttaggtatccactgggggtgttggaatggatccctcaaggataaaggggcctactgtgctcaatatgttttatttgcaaatacatatagataacaagatcaataaaaatctctctatatgtagtagattttgtctataattgatatattaatcagttgagataatgaattaattttgctccttatatttgatctgatatctaaaagtagtaatgcaaatgaggaactcttgtgccttattttagatgtattttgtgctcacatttagtgaatggtaaaattcaagggtaaatctgttgaaaggaaggcttatatatttaagatcccattgtgttgatgaatgttcactgtaattaaaaagcctattttttacattaagtaccttttggaaagaaagcaagaaagtcttgacctagaataccctacatcacttaaatgtacagaagggattaatctagaaagagcatgacatttaaatgaattttggttgatgaaaagacattatgtcttgctctgtatatcgtcttgatttctttttctctttttgtgtatttgctagttatctgttgcttgagtttattctcagccttgctgcctccaggctcctcacacttccagtcgtgtccacttgctctttgcagtgatgctcagactgcttttcagtctgcagtaagtactgtatggaaactgatagaaagtcagttcttcactccagcctttccttcagtatatgttggaaagtatatgaatttaccatagattaattctgtttgtttcctttttgtctgtttggttttggtttggggctttgatttcagttttaccatgtacacattttagagaaccaaacagttgtatctgtaagtttttactaaaagtaggagatttctgccttcattcctcatattctcagaggtgaccacttatacctcatttagctactttttatagcttctctttcatgtctctaaataacatgcttatatttttttgtcttgattattcagttttaaatattatctgttgaattcctactatggaaaatgagactttagcttttttttcatgcctcacccacctaccctgccaaaatgggttcccttctcattctcctaatattgatataccataatgccaattagagaataggcagcgtgaatggtattaaatttatgacagtgttatacacagttgaaccgtgttgcagagtgtttaactttcttttcttgcacagcttttgtttgccttagaggtaattattgtattattttaaaacgtgctgactttcctgttatcacttacaagctccatgctctttgccagaattaaacatcctctcagtgtgttcagaattgtcagaacttcatcgcttcatcttttggaagaaatctcttcccaattccttctaacctacttggtgcctgttttcatcctgggatatccattcaccagtttctgggaattcctttacctctgtgctaggtgcagtttcctgtcatcctgggatatccattcacctggttccaggaattcctttacctctgtgctatgtgcagtctcctgcatcctgcatgctgtctcccatctcctgtggccttctctcctggttaatgctcttcatttttgcgtagcgtctcttctcccttagctttcagagaaaaggtactgaggaggtcttttgagatctaaatgactgaaagtcttttatcgcccttacatataatttatagttaggctagtgagaattctggattggaaatcatttacttcagaatttagaagccatagtctgttctttttaattccaaatgttactatagagaattctgaagccttggctgggcgcggtgctcatgcctgtaatcccagcacgttgggaggctgaggcgggcggatcacgaggtcaggagatcgacaccatcctggctaacacagtgaaaccccatctctactaaaaacacaaaaaaattagccagacatggcggcgggcacctgtagtcccagctactcgggaggctgaggcaggagaatggtgtgaacccgggacggggagcttgcagtgagcagagatcacgccactgcactctatcctgggcgacagagcgagactccgtctcaaaaaaaaaaaaaaaaaaaaaaaaaaagaaaattccaaagcccttagaattcctggtttttctcttcctggaagtttttagaatctttattttttctcgtattctaaaatgtttagatgaagcatccaggtgtggatctgttttagccattgtactgggctctcttggggattctttccatctataaactcatgctttctaaattacttcagagacattccctgtactttgtatgctctgtacatttggaactcctgtgaagtttttttttttcgctatgtaatctctctttgctgtcttttcctctatttattttagtctctcttttctatttggcagcttttcttggtgtctggtaatcttgattatgtgctgtatttaagactgggaaactcaaagcagattgacatccctgagcatatgagtgcaacttgtcaattgctgtccaaggggaccaatgggggttattttgtaggcttgtcttctggggcttatcagattccctggagaatggtcttctgatctctttcctggaggtgaaaacccaactgccaaatgttatgtagccaagtaggagacgacagctgaggtctcagaatttagtttgcacaatttcacttaatccttcaaaggttttagtagaatacccttgcccacaaattttcctgtctctgccagttcagaatcctaatttatcctctccagagactaagcatccgggattttgcaagggctgggaggaagagtggcttagttacatagaaactggtggctggcgggcaggatctgggcatgtaactgcattttagagacttgaagcaatccttcatcctcacgtccagggatgcctggtgctaaatttcttcagccttgggcacttcagtggatagattggggtagttttcagctttccccactcaccacttagaattcaagtttcccaagcctaatacacttgcctctcatccatctgctttctcgttttcaggcttgtgtgtgtgtgtgtgtgtgtgcaatcccatttttgtcattttaatgggatttcaggagggaataaaagacatatctgtgcacacaactatttccttaggagtcttaactccgacccaaccctgctcccaattgctagtgagcaattttttatttttattttattttttatttttatttatttatttatttttgagacagagtctcactctgtcacccaggctggagtgcagcgtggcccgatctcagctcactgcaacctctgcctcccaagttcaagtgattctcctgcctcaagcctcccaagaagctgggattacaggcgcttgccaccgtgcccagctaatttttatatttttcgcatgtttgttggccaaactggtctcgaactcctgacctcaggtgttccgtccaccttggcctcccgaagggctgggattacaaggcgtgagccaccacacctggccccattatcatttgtttcaagaaatttttcaattttcttcttaattttttcattaacccactggacattcaggagcatattgtttaattttcatatgtttgtatagtttccaaaattcctcttgttattgatttccagttttattctactctggtcatagaagatgcttgatattatttcaatttcttgaatgttttaagacttgttttgtgaacctaacatatggaatatcctacagaatgatccatatgctgaggagaagaatgtgtattctgcagccattagatgaaatgttcggtaaatatctattaggtccgtttggtctttagtgcagattaaatccagtgtttctttggtgattttctttctggaagatctgtctgttcaatgctgaaagtagggtgttgaagtctccagccattatcgtcttgagatctcgctctctctttagttctaatatttgctttatgtatctcagtgctccagtgatgggtacatatatactcacaatcattgtatcctcttgctgcattgactgcattatcattatataatgatcttctttgtctgtccttacagtttttgttttgacatctattttgtctaagtatagctactcccaattttttttttgttttcattggcatggaatgtctttttccatccctttattttcagtctgtatatatttttattggtgaaatatgtttcttgtaggcaacagataagtgggcattgttttttcatcccttcagccactgtgtgtgtttttattgtagagtttagtccatagtccatttacattgaatgttgttattgacaagtagggactgccttctgccgttttgttatttgttttctaattgttttgtgatctcattctttaattccttctgtctttcttttagtgaagatgattttctttggtggtatgttaatttcttcttagtttttgtgtctccatttgtatcctttttggtaaaaggttaccatgatgaggcttgcaaataccttcttatagcccattattttaaactaatgacagcttagtactgatggcatgaacaagcacacatgcaaaagaaaactaataaaaactctacactttaactttatctcccctgctttttaacttttagttgtttctctttatgtcttattgtactgtctttgtcttaaaaagttgctgtagttattattttcgattggttcataatttagactctctacttaagataagagtagtttacacaacaccattacagtgttacaatagtctctgtttttctgcgtgcttactattaccagtgagttttgtaacatcagatgatttcttcttgctcacgaacatccttttatttcagattgaagaactcactttactatttcttgtaggacaggtctagtgttgttgaaatccttcagcttttgtttgtctaaggtttttatttctcttcatacttgaaggatagtttcatcgtatgtactattctagggtaaagtttttttgttgtttttctttttttttttccctgcagcacttgaaatatgtcatgccactctctcgtgacctgtaacatttccagatatattggaggtccattgtatgttgtttcttttctcttgctgcttttaggatcttttctttatccttgacctttaggagtttgattatgaaatatcttaaatgtcttctttgggttaaatctgcttggtggtctctaaccttcttgtacttgaatattgatctttctctaagttttgtaagttctctgatattatccctttgaataaactttctaccactatctctttgtcttaaatttgccctttcgaggctattttttaggttttataggcatgcttcattcttctttattctcatttttcttttatctccttcccctgactctgtgttttcaaatagcttgccttcaagtttactaattctttcttttacttggtcagctctactaatatgagactgatgtatttgtcagtatgccaattgaatttttaaactccagaatttctgtttcattcttcttaattatttaaatctctctgttaaatttatctgataaaattctgaattccttctcttattttgaatttcttttgagctcccctaccacagcaattttgaattctctgtttgaaagttcacatatctcttgtttctccacgcttggtctctgatgccttattttagttcatttggtggggtcattttttcctggatgatcttgatgcttttagatgttcgtcaatatctggacattgaagagttaggtatttgttttagtctttgcagtctgggcttgtttgtgtgtgtcctccttgaggaggcttcccaggcattccaagggaattggaccttaagcccaataacacttcgtttcttgcagacttgtagaggtactgccttggtggtcttggataagatctggaagaattctccagattaccaggcaaagactcttgttcttttaccttactttctcccaaacaaacagagtctctctctatatactgagcagcctggaactggggatgtggtgatattagcatccctgtggctaccaccactggaactgcactggattagtcctgatgtcaacacaacactgggtttctctcaagcccactgcagtcgctacctgcttacctgtgttcactcaaggccctaggacttcataatcagtaggtgacaaagccagccaggtttctgtccttcccttcagagcagtaagttcccccagaccctgagcaggtccagagatgctatctgtgagccagggattagagtcaaaaaccttagaattttacctgatgttctattctaatgtgactaacctggcactcaaaccacaatactgggtcctttctgctcttctctcccctttccacaggaaaaggagactctccttttggccaccaataccacggtcccatgggagttctaccacgctgctgccaatgttcacttagagcccaagggcacttctgtcattctgtgacgaatgttgccagacctggggctcacccttcaggacaatcagttcccctctggcccagagatggtccagaaatactgtccaagaggctcggcctggattcagggagcccaagagcctacttgttgctctacccactgtggctgagctgatacctaagatgcaagacaaagtcccctttactttcccctctgcttttctcaaacaaaaggagtcttttgttgtagccaccacagctgcgaatgtgctgggtcatacctaaagtcagcacgtcccagagcccaaggcctgtggtgtactatctggatattgctgctggttattcagggcctgagggctctttagtcagcaagtaatgaatcctgccaggactggtttcttcccttcaaggcagtgggttcccttggcccacattttgtctattttgtcatccaggaatgggcctggaatggaggtctcacaactctgcccagtgccctgttctattgtgactgagctggtatctaagatgcaagacaaagtcttgtttactctcttcctcaagtagaaggaaggagtcacttttgttgctgcgagccgcactgcctgggattgagggagaaatggtgtaaggcctcccttagctgccctggctgttgtctccctgtgtcacatgccaccatagtccagtggctctaagcccagcctaatactaggagttgcctaggaattgcaggccttgtgtccaagactgcctttcaagtttacctaggaccccagagcactggctttacggtggcaaggcttgccaagaaactccacttctgactgctggtttgggcagttgatctaaatgatctctccatgcatgggtgttggctgagcccagcacagctttgctctccactgtgacagagcagcactgaattcagtgtgaagtcccccagtcgctgctctctccctcctccaagtgtgcaagttagctcgccataccaggcagctgctgctgatagataggggaggggtggtgattcaagactatatctccgacacttttcagttcctcttttagccgtacacattaaaaccaggtactgtgattgctcacctgatttttggttctcgtgacggtgcttttctgtgtgcatatagttgttaaaatttggtgttcctgttgggggaggacagacagtataggcttctattctgccaccttgctgcactcacccagccgattcttttttaactgttaggttcggggtacatgtgtaggtttgttatataggtaaacttgtatcatgggggtttggtgtatagattatttcatcacccaggtactaagcctggtacccaatagttattttttctgatcctctccctcctgctacccttcacccactggtaggccccattgtctattgttcccctctttgtgtcccggtgctctcatcatttagctcctacttataagtgagaacaagcagtatttggttttctgttcctgcattgtttcctaaggatcatggcctcgagctccaaccatgttcatgcagaggacatgatctcactcttttttatggctgcatagtattccatggtgtatatgtgccacattttctttatccagttttccattgatgggcatttaagttgattccatgtctttaccattgcagatagtgctgcagtgaacatttgtattcatgtgtctttatgatagaatgatttatattcctttgggtgtataccctgtaatgagattatagggttgaattgcagtcctttttttagcttgttgaggaatcaccacactgccttcccaatggttgaactaatttgcactcccactgtgtataagcattcccttttctccacaacctcatcagcgtgtgttattttttgacttcttagtagccattctgactggtgtgagatggtatcttactgtggctttgatttgcatttctctaatgatcagtgatgttgagctttttttcatgtgcttgttggcaatgtgtatgtcttcttttgagaagtgtctgtttgtgtcctttgcccacttcttaatggggttgtttttttcttgtaaatttaagttccttgtagttgctggatattagacctttgtctgatgcatagtttgcagatattttctcccattctgtaggttgtctgtttactctgttgatagtttcttttgctgtgcagacacgctttagtttaattagatttcatttgtcaatttttgcttttgttgcagttgcttttcacattttcatcatgaaatctctgccactttctgtgtccagaatggtattgcctaggttgtcttccagcgttttaatagttttggggtttatatttaagtctttaatccatcttcagtttatttctgtatatatgtaaggaaggggtccagtttcaatgtatgtatataattagtcagttatcccagcaccatttatcgaacagggagttctttccccattgtttgtttttgtcaggtttgtctaaggtcagatggttctaggtgtacacccttatttctaggctctgtattctgttccatcggtctatgtgtttattttttataccattaccatgctttggttactgtagccctgtagtatagtttgaagtcaagtagcttgatgcctccagcttttttctttttgcttagaattgccttggcgatttgggctcttttttggttccatatgaattttaaaagttttttctagttctatgaagaatgtgattggtggttcgatagggatagtattgaatctacaaattgctttgggcagtatggccattttagcaatgttgattcttcctagccatgttcatggaatgtttttccattcattcgtgtcaccactgatttctttcagcagtgttttgtatttctccttgtagagatctttcacctccctggttagctgtattcctaggtattgcattttgttttattttattttgttttgttttggtggcagttgtgaatgggattgcattcctgatttgcctctcggcttgattgttggtatataggaatgttagtgacttttgcacattgattttgtatcctgagactttgctaaaattgtttatcagcttaaggagcttttgggctgagacgatggggttttctagatataggatcatgtcatctgcaaacagggataatttgacttcctctcttcctatttggatgccctttatttccttctcttgcctgattgccctggccagaacttccagtaccgtgttgaataggaatggtgaaagagggcatccttgtcttgtgccagttttcaaggggattgcttctagcttttgcccattcagtatgatgtagacagcaggtttgtcatagatggctctcgttattttaatatatgttacttcaatacctaatttgttaggagtttttaatatgaaaagatgttgaattttactgaaagcctctgttgagataatcgtgttatttttgtttctagttctgtttatgtgatgaatcatgtttatttgtttgcacgtatgttgaaccaaccttgcatcctagggataaagccttcttgttcgtagtggattagctttttgatgtgctgctggattcagtttgctagtatgttgttgagggtttttgcattgctgttcatcaaggatattgacccttttttttgttgttgtgtctctgccagttttgggtcaggatgatgctagcctcatagaatgaattgaggaggagttcctacttctcatttttttggggaacagtgtctgtaagaatggtatcagctcttctttatagatctggtagaatttggctgtcaatccatctgatccatggcttttatggtgtgcaggctatttatttctgattccattttagagctcattgttggtctgttcagggattcagtttcttcctggttcagtcttgggaggatatatgtggccaggaattcatccacttctagatttttagtttgtgtgcatagaagtgtttataatcgtctctgatgtttatttctctggggtcagtggtaatatcccctttgtcatttctcattatgtttatttggatcttttctcgtttcttcattaatctagcctagtggtccatatattttattatttttttcaaaaaactggctcctcacttcattggtcttttgaatggtttttcatgtctcagtctcctttagctctgattctgattatttcttgtgttctactagctttggggttggtttgctctttcttctctagttcttttagttgtgatgttaggtgcaaacttgagatcttcctaacttttcaatatgggcatttagcgctcaaaattttcctgttaacactgccttagctgtgtcccagagattctggtatgttatcattgttctcattagtttcaaagaacttactgatttctgccttaatttcattatttgcccaaaagttattcaggagcaggatgcttaatttcaatgtaaatgaatggttttgtgcaattttctttgtattgaattctgtttttattgtgctgtggtctgagagtgtggatggtatatgtattagaccattcttacattgctgtaaagaaatacctgacacggagtaatttataaagaaaagaggtttaattggctcatggttccacaggctgtaaggaagcatagtgctggcatctactcagcttctgggaaggcctcaggaaactttcaattatggcagaagggggagcgaggcatctcacatggtgggagcaggaggaagagagaggggcaagatgccacacacttttaaacaaccagatctcacgagaactctgttacaggaacagaaccaaagggacggtgctaaaccattcatgaaggatctaccccaatgatccagttcccaacattggggactacagttgaacatgagatttgggtggggacacagatccaaaccatatcagtacaattttgatttttttgaatttgcggaaatttgttttgtgtctgattgtgtggttgattttagagtatgtgccatgtggcaatgagaagaatgtatactctgttgtattctggtggggagttctgtagatgtctatcagatccatttggtccagtgttgagttcaggtcttgaatatctttgttaattttttgcctggattatctgtctaatactgtcaatggggtgttgaagtctcccacgttaccctatgggagtctaaatctctttgaagatctcttaagaacttgctttatgaatctggatgtttctgtgtttagtgcatatatatttaggatagctaggttgccttgttgaattgagtcctttactatttgtaatgcccttctttgtcttttttatctttgttggtttaaagtctattttgtctgaaattagaattgcaatccctgcttttttctgtttttcattgcttggtagcctttttccatccctttattttgagcctatgtgtgtcattgcatgagatgggtgagtgcctgcaggcaaggcggcatgaaggaggctgcagtgggggaagaatgctggtgcgtgtccactggggtcactctgctagagcactctgctagtcaggcagtctgccagtgcaggagctaccgtatgggcccgtacctgggagcttcactccaagcaggtgtggctaggctcgggctctgggagaagccagcagaccaaagggtggaccagattggccccatctcatgggcaagaccaccctgcagagttgaggtcccacagttcccctagggataaagtctcctatgggagcaagtctagcctaaggggatgggcatccttggccatgctccgctatagacactcccataccaaactctctgggctctgccccagctggagttctgcttccactgcttccctaagcagctttccctgacaactcaaatgtccatggtggtccaggggttccttcctaccaggattccagcggcctgtggggagagcgaattttgttccttgccttttcaacttccccctctgcaggagttgttgggggccaggaacaagttgtggtgcttggtagccccgagcagggtccccagcttcctcccccttcagccccagctctgtgttttccctccatctgctctcgatgccctccctctgaagatctgctaggagtgtgccagtcttcctggtgtcccagtccctcagtgggagatgttcctcctggctgtatctagttggccatcttggagcagaaatttctagttttgatttttaataaaaatgtatggaatctgttattgtgtctgcttttgtacatattagaaatttttaagtgaaaatttttctagctcataaatttaaatgtataaaggaaatatacagaaatagtagtttcggaattacaaatgattttccatttctctgaaagtcaaaaaagttacacactattttttgagaaaatgttatatgacaggtgcatgttaccatagaaacgaaagatggaaagaaccaaatcacctgagatataggggtagtttagatagaaatggagagaggggaatgtgtccccagaaggagaaaggaggaaattgatgacagttctcctgttcagcagttttacaaggacccattttaataaggtacacacatatatatacaatatgcgctggtgaatttgagtaagtatatgagcttgctacgtgaaagctaaataaagcttttttctgtagatgatgagtctttaagaatgattgttgttcttttccatattataagcaacttatacagtcttatccacgcagaacattctcaaatattaatgatttatcaaaatccagtgaatttcacatgatagttgaaacctagcaatatcttttaagtagaaaatgttctttattcacaacagttttgctccagattaaatatttcttcaaggcagtttgatttatattctctgcagtgctatgaagggaaatcctccaaagatatcctgaaaagagtagctgcaaatgcattgatgtcactgctggctgtcagtagaagagcacagaaacatgctttgaaaggtgagccacatgacacatcagctgttttgatggcattatcaattcatatgttttgttgcttgttcaagttaattttctttggactcaaaatgtaaaaaacgtatagtataatctcagtgtcactaaaaataattttttttcccatacagaagcagtaaatatgcattacttttcaaataaaaagattagacatagtttgtttttgtttgtttaatatgtgatggttcttgctctaaagaacctatatgtaaatattagggaagctaaaaggtaacacattgagtttcattataattaaatattactatccagaagcactcactgcatacctgaacaaaacccacatagttttgatggtaaaaacagcaacagatgattccatattttcgtataaatttccctcttgagtgttgtaatttctcatttgggaatcggagaatgtagatctgagaattaaaagagaataatggcaacatcaagtccattaatatcaattgtgatttgcgactacaacaaatgatgtattcctcaagttgtaaattggatttgggtagtatcttactaaaaactgaaaacaagtggacttcagcattttagttctcttacttatcccccctctgattcattaatctctgactgaaaattctaaaatgaagtgggtcagaaatagaaaatgttacctttttgagaatctgattggtatatgtggttataacttacttggaaatagaatatccttttgactactgcagattttgtctttcagccaatcttatagacaattgcatggagcagatgaaacacataaatgcacaactgaacctagattctctgaggcctgggaaagcagcattgaaaaaaaaggtaacattctgggataaatgaatggctatatatagagaccattctccagtcctcttgtgcctagaaatgagcacgagcttgaaatgagtgtctcatttagaagaaaggtacagatggataaattaatgagacttctacattagcagattgttggctttttttggtcttaattcttacttgaagatctttagacaacatctgtctattatgtactgttgttattataaacattggaaatatccacatatacatgatactatgccagataaattttttatactacaaaaagaaaatctttatctcaaaacaagcataggttaactaggaatgagatctgtaacaactataatttattaagagttttctatatgtcagccactattgaaacatttcatatttattatctcatgaacaaacactcattacagcatagtcacacaactggtaattgatggagctaatatttgccccaaatctgggtggttgcagagctggtattcctcatctctgtttatctcctcctgtgccttctgaatatctcctctagcattgaatctgctggactcatgtttaaactgcatgctcaggtaaactgaaaataacatagttatataataactactgtggttaacaagatctgccacccacttattcaacaaatgaaagtgtgtgaatagtataaatatataaatatacatatatgtgtgtaggtaaggccgttatagcagcactctatgtaataactagtttctactgcatttaagaaaccaagacaaagtcttatttaataatgtaattgatgcaggagattgattgtatgtttatcagttctttttttttttttttttgcctcttttcctccctagccaaaggcccttcatcattgagaaagtcagccaacacctgatattattgaaaatctctcagtatctgcctcactttattgagatgaaacatggaggctatcatatatccgagttcctccatgcttgatagaacagaaatagctttttcatggtgaatgtgcttcttgagatatggtcatctttcagagatcgttagcctgtcagttccctcaaagttacagtggttgggcatgattagagcacacctgcattgtcccgtgacccaaaggggagggaattactatacacaaaaagtgaagtatgctgttgcattcacagttttcaactgctttttgtttaaataggaggatggtgttattaaagagttaagcattgccatgcagctcctaagaaactgtctttatcaaaatgaggaatgtaaagtaagtagaactacttttcaaaattttaataggagtactggtattaagcagtttaatttttatgtgagataatgtagtaggaaaaatggaaagctctgacttttaaatttttagacacacagttgattggtccttaaactcagtgttaattgtcagaaatgtgtgtatctaatcattattcatcgacactgattacatttcttcgcaaacttcagcctcattctgtactcttaggtattttaaatgttttacatatggaatgaatggctggatgtgttttataaggtagattctttcaaaacgggttgtcaaaacaactcttcaaggaaataagtgaagctatctgtatctataaggaaagaaaatgaagagtttcctgcttcaaaggagaagatagttagagctgctacctagtgtggccacatccaccgagaggaagtttcttctagctctgctgactccctgtgaccatttacatggcccttctgtctaaaaatcactgagatgttttgcttcgtctgtaagcactgatgatgttttaaaccattgtatcagtactactatagaggatataatcttgtgaacactctgatttgctttgtctatagttttacaacacttttgaaatactagattgatgctttaatgcagaaatactagattattctttataaaagctggccacgaaaataaaaattttaaaaaatactaaattaaagctttaatatagaaagcaaagataaattatggaagcttttattgccttataaatttttacctgttttgctcttacttgtggtaagagcacaactggaaaaaccataccacatctggaaaatggacatgttgaacacacttactccttaagcgatgttaaaaagccagatacatgactcacaatttatatttcaaagtagtttgatggaaattaagtatttatttatacaatttattaaaattccctatatatgaatttatatgaactttttctcaagacaaaagtgccattaataaacttaatgattccttcatgcttatgatattatgcttgtgactggatgtacagtcagtatttgtgtgtaaatttaaatatataaatttcatgtgtatgtgcagttaatattcattcatgacaccttattcagggaaatactctggaatactttacatgtgggatctacctataaagatttatgaagtgctaacctggctactagttataaatattgtgctcaatttgtatcacattagccatttacaaaagtgtgatatctcaataagtcaaagcatttctgtatttctaagttgtttaataagaagtaaatccaaagaatattaagattatccttgagtataaatataatattatggaggtagggattgttaatttcaatttcagcttttatcaggtgtatggcatgttctcattattaatagttggccactattgggtaattcaccaggtcacccactgccaccccaccctgctgtttgcatatgcataacattaggggttttcatactggaaggagcatggtggctgtgaggtaaatgaattaaacagtggacaaggttagacggaggggactgtcatagtccagacaagagatgatgacaccttaacttgagcaggtagaaaggagaaggagggtagggagtaaatttgaggcattgagaagaggaggaatgtagaatgacttccaaactccagtttaagccactgcattatcatgcattaagagtgcatgatagagcagagcacaggtgtgagagacccgatattcatgcttgcacgtgctagcctcaagagtctttggggcatccaggtgaaaaatggcttgtggcctgtagattttatgggtctgggactctaaggagtgatacaagctggggatattaggagttatcaatgtgtagatggtgtttgtggtcctcactattgttgaaatttcccaagaaagtatgtaatgaaaaccaaggtcatatctttggaaaacaggaacatttaagagggggcagaaaacaactgagaagggaatactggagaaggaatttggagattgcattaggccgttcttgccttgctatgaagaaatatctgagactaggtaatttattaaagaaaagaggtttaattggctcacagttctgcagggtatagaggaagcacagtggcgtctgcttctggggaggcctcaggaaacttccaatcatgacaagaaggcaaaaggggaacaggcacatcacattactagaactggagcaagagtgagagagctggcgaggaggtaccacacacttttaaatgaccagatctcatgagatcactcactgtcttgaggaaagcaccaagccatgaggaatccgcccccaagatataaacacctcccaccaggcctcacctctagcactggggattacaattcaacatgagatttgggcagggacaaatatccagactcttatcagaaatgatccaggatagagcagcagcggggaaattaagagacatatagcaaatgccaccgtgcttaagcgttgttggcaaccacaaaagtagaagcggcctcaatagaatcatcagggcagaaaataaacggtaatgagctaaagattaaatgtgaggcagggaaattacagcaataataatgtagaagtttggtcatgaatagtggcattaataatttaggacatataagatgaaaggaaatgagtatgtttgtttctcttaacacgtaaactacttgaatacaggcacagaaatgagcaaattggggacgagttgtttaagagatagcaagaggagaactaactggtggattaagatccctgaggaggcaggaagagctgtgtttcagaacacagatggatgtatcaatctctggcaggcaagaagtggaacacctctttgtcactaccgggcagacaggaaggatgaatggatgaaaatacagataaactatgtggacagaatggcagagtagataaaggagtttgtacttaatcgtttctgtcttctctgtgaaatagtaaacaaggtcatctgctgcagatggagggccgtgtgccacagagagtggtgaacaagggaagaactttagggagagcactgggaatgacttcagtgcttacggagagtgttgaacattgggaatcacttctcttctgccacttgatgctatgtgaaatcgtatagggtgtgtgtatttatgtgcatgctcacgtgcataatcatgggtctacaaattacctcggaattcttgttcatttaaaatagatattgctgcacttaaacagctatattttatctgcaatattgtcccagggtaactgatctttgtaataaagactctgagttacttcagaatttttcaatttatcataatatttagactgaattttatatattcaaattactcaaaaactgtaatttactttgagtatatacacacatacacagagagagagaaggagagggagagagggtgggcaaagaggactcagagttgatcagaatgtttacttaaccagaaattctcacttcttggccagttcatagcatttacaggaatttattcagtgttgtgagatatcactttgctgtttaatttacatgttacacaggctattttctatgcttcctaacttagtggtacatcttaaccaccctggtgttgaagcgacgtcctgagattggtcaggctcgtggtcagggcagccatgtgtggagcccaatggggctggggcaggatgctgaagccatccacagggttctccttgggtcttatgttgatggctttctgttgttgttttgattttaatgttatattttcatatattcagactaatgctgtctttttcccttccttcaacaggaagcagctcttgaagctcaccttgtccctgtcttgcactctctctggccttggattttgatggatgattcattgatgcaaatttctctgcagctcctttgtgtctatactgcaaattttccaaatggtaataggatccaatactgcctttcaataatataccaaaatactagttttataaatgttgttaaggtggactggaaaaactaatacatattttgaagtatttctctgatttattgaggatatgatgggcaaaggcaagctttctcgtaggtattatgagagcagacagatattttagtgtgtttgttgacatgagagagtcattggcagcgcagggaatagagagggaggactggtctgattatctggcaatgggaaattgagtttagtaggaaaattgagaggataaaaattatgatgtaagacctcaaaagccacgtgaaggttagaacttctcatagattctagagcaggagactggcatgttgaaagttctcataacagttggtctggtgatacttgatatcactagggctcctctttcgctcatgcacttgatagacactttatcaagagcctgtggtgggccatgcattgtgagttctggtgagagtgatctgaaatgagataggaggacaggtcatgtagggcctcagaggccagagtagggagtttggatttttatgtgagtgtaacaggatgacattggcagttgtaagctggtgagtggcatgatttaatttgtgtttaagaaggattaggctgggtgcagtggctcatgcctgtaatgccagcactttgggagacccaggcaggcggatcacttgaagtctggagtttgagactagcctggcaaacatgaggaaaccctgtctctactaaaaacacaaaaattagccaggcatgatggtgcatgcctgtagttccagctactcaggaggctgaagcaggagaatcacttgaacccaggaagcggaggttacagtgagccgagatcacgccactatactccagcctgggcaacagagtgagactctgtctcacaaagaaaagaaaagaaaaattgccctgggtggtatgtggagaatgaatgattgggagcaagtctagaagcagggagacttgtcatggagatataatggtggcttgggcttgagtggtagctggagagattgagagaagtagacagattcagtatatagctcaaaggtagagtcaaggatacctgttgtgggaggtaggaaggaaaaaaaggtgtccggggtgaacttcatttggagaaatgagcctgagtgcacagtagtgccatttactaaaatggggaagatttaaaagaagcagacttgaagtgagaaagtagtaggaatcaagagttctgtttggtcttgttaagtctaaggtgttgatgttcactcaagtgaaaatagtaagctggagttgaattcaatggagtgtagagataagtttgaagatttcaaatgttgggaatattattagttatttattgctacaaaagaaattactctaaaatttagcatctgcaaacattaatcatttcattatgccacggcttctgtggctcaggaatctgggcgtggctaatctgggtggtcctcgctcagagtctctgcaatcatctgaagtcttgactgggatagaggatccagtgtgactatgggagcctcaattccttgctacttagggctgtctcaaacgacccagaatgagtgggctgagggcagaagttatagtctcttataatccagtctcagaagtaactgaacagcactcctagctcttgtgggtcacacataccaaccctggtacagaggcaggcgccactgggaccatcttggaggctggctaccacaggagtcattgtcatgtagattgtacttaaagccacgtggctgtttgcgattacccagggagaatgtgtagatggagaagcagaaacccatgaccaagttctgaggcacatcaacatttggagttaatcaaaagatgagaaaccagcagaaaaaaaagagaaggagcagccaatgagataacagtgcacagtcacagaaagtcagagaagggcatgctcagttgtgtggaatgctattgaaaattctgctaaagtgaggatagaaaaaatggctgttggacttagcagtattgatgttcttttggaccttgagggtaattttagtgcagtgccagaacagaaacctacttagtgtgagctgaggagagaagatgaagaagtagaggagacagcttttccaaaatgtactactcttaagaggacaaagaaatggagcaacagcaagagacagatgtggagtcaaaggaggagtttttgctcgtttttaaagatgtatgtttttaaggcatgtttattaacttaagggattgggagaatgaggtgcaggaaagagtgcaggtaagagcccagcctgagagggtaagagaggtgagagctagagcacagctgacaacagaagcggagggaaggctgagaggaaggatgtggatttaggagggctggtagacttgatgggaatgatgagaaaattcccattttgaatacttctgctttcttcatttaggagagaacactgaccactaagaatgagcaaagacaaggagtagaggtgatgtgagaagaggagaaagtgtgaagtagctgtttttagaggaaggaaagtaaacacaccagagaagcaaagtaggattgctggcagtgttaagtaccacttatggtcataaatttaagaaaataaattagaatttatggtcataatttatggtcataaatttaagatttaaattttattaaatttatggtcataaatttaagatttgactagcaagtttttgtactttcttctaacaacactcagtagcccagcaactggggtctctgaatatcaaaggttatacagagaagggactggaactcacaacagttaaggagcccatctagttactgccagatgctgttgatggcttattcctttgaataatctgccagatgctgatgatggcttattcctttgaataatctgacacctctggagctgtccatttcgatacccaactcaggttgtctccagtcagcacaaagagatataaacagaccttcaagctcttgaacttgaactgtcattgaagcatatgtgtacaggattgtccttgccttcattctgtgctgttaactttctccattccttaggtctggtgggaatgtctcctttcagtgcattttccagctccactagtatatcttttgtttgtttactcatcttttatgagtttcttttacagaatgtatttgattctgatcagtttatacttaagttggcctcctcgtatgaactttcacaagtcaattataccttaggtttatgtataatacagtcttattgatttaacattaaaatatatttctaatttttttttctccctcaataagtctcattcagttacttaatttcctgagaaacactgaaccctggaaagcctgtagatgccacttttggctcctgctatgctaagctgtatgaccttgaacaacaaactggcttttctgagctccatatctttgttgaccaaatatagaaaatagtatttgttttgtccgctttcccagggatattatgttccttatttgtatgttatgtaaaatgaaggcattagacaagttatctcccatttctaaaattctgttcctttacacaggcctttatttagatgttttctttagcaactattaaaaaccctagtatgtttattttattctttttttaaaaataaacctggtgtcttaaagtgctttagtgagataattaggccctcagtgaggacagtatatctattaggttgactgtagacaccaacattagcctccattgctaatttgcagttcacaggttaatggcctagtcattttgttagacagatatgctttgccacttagtgtcttcaaaaactaaacagggaaactgagaagacattgtgataggctgttatttttgaaggttgcagttctctttgttggtcaagttgtggacaacaccctgttcaagctacacatagaggagccgtgagcaactctctgatgctgtgtatcctaaagttggcttcccagatgccactggagaacaccacggttcagcagatggtttttatgcttctttcaaacctggccttgtcgcatgactgtaaaggagtaattcagaaggtacgcacttaaactccccacatatcttaaaagggtactcagtgaaataatctttccaatcaaaagtttacaactcaatttctaagattattatgattttgaggcattttattttaaaggattataaaagggttaagaggttcactttgtttaaagccagttgatagatgacacgtgcagaaggacaggagctagagtagagtcataccatttccttctcatttatcttcttagctttcggattgtattttatcattctcaaagatgagggttttagaaagatagccgtcttacatttattggaaataataaaagtaatatattggtctttaaacagaccaaattgggcagtaacaatttcagtttaatttcattgacaaaatggtttatgaaatcacagcccacttcccccagttagacttaacttccttatggcatgttaagcaattttatgagttctctaggattccagttcccaatctagacttctcatcactgattttaacttaaggtaatttaaaagggatgtaatgagttaaataaattctagtacacatgtgcacttatattctgtatttagatgtgtataaacagaatccctaattgggaaaatcccttcaaatttgaatgtaatcagattatatactacttactagtattgtaatttgagtgtttccatttcttttacttgaaggccaagataaattgcagaagttgagagcatttataagaattgagtctccttttcctctactgtttcttctccctgaactcctcagaagatactttgttatcaccacataaatagaaagttcggtctttctaaggaaatggaaagatcaatcttaccaaggaaagatgttttcagtggcacgttggagccagcctcctactgactcatgagtgtcatcttaaatttgcaggaattttataaaaattccagttgatgttacattgttattttgaaatcagccacagtgggcatatcacaccacgtaattcagcgaactgtacaaatcttggatcttttctaccctcaccacaatcagttgtttatttaccagcacatggctggatattttcttcatgtatatgttcatgtatgtcatatatgtatatatatttgaatatattttcttcatatatgtattcatatacatgcatcacttccaaaatgagacattctcttgaactggatatatgtgattagcatccataagaatgagagattctgcatatgtgagagcagagcgggggcagtgctttccaccacttccttatagagcatgttggtgggaagctaagtgggagcacccagaaggaatgtaagtgccaatctcgagtctggtctgtgactttgagctggagacctattctctttcagcttcatttgggtttaacaaaataatctctaagatatgttcaactcttaatctgttattctggtgctatacttaagaatattttgatgaagtgtgatcagactctctttccagggacggattaatcaagtctttttcctctgctctaattaggaaatgcctgagacttcctctgctgcattaagtaataatgagcccagacacttaacacttctacttcttcattactcatctgtaggacatagaaaatgcagcaggtggtattgtacaactcaggctccgaaatatcctgcttgtttgtttttttttctaccatggtatacatctctacatattctacctggtgtaggaaattgtctgaaaacatctttagaagcagcaaaaaaaaaaaaaaaaaaaaaaaaaaggagtgcccacagcacatttatatttgagagcactgacatctgctttatcacccttgtcagtcccaaatccagcaagggttgaatctaaaaactgtcagtttggctgacagtaggtgtgagtgacagcacatgcagctgaaagtgggcatgtaattttacagtttacttattgtgtgggtaatgttgataatatttctgtagctcatttcattcttaacactcagagtccttttgtataaaaacgttaagtttattttatagattaaagccaacatcttgattttggtctaggaaaacctaagagataaactggagtagatttaaacagagagagagaagagttattctgtgcaatcataaaagttaagtgattgcatttcatttctaaaatgtccacctaactgtggtttccatgctgccatgggctgcagcttgatgcagcacttttatactttgcatatagattagtctaagcaataatttattatctttcttatagtgaagggtttggtggggttttttggaaggggctttatttggaggttgaaaagactcttacagttcaaataatagagctttctcatctgtaagcataatagaatgacgtgtagccatcagaaattcttacttgtaatgataagtacctgggataaagtgaatgtaagatgtatctatagatttgataaaaacaacaacaacacctgtagctataatgattcaaaataccctcactacttccagagttgttaactagtattcaagactgatttggatttttgccttttttccttccatagggtagcttttaatagcaaaatcaccagaaggcagagagaagagaaaactcaagagccctgaaataatctccaaacttaattaccaattctaaataattaagagttaactatagtatacttcatccatcatgaggaaataattagcaggaattaaaacttgagcactattttgttcttcttacctttttcacttatgcttggaaataatatagatggaatattcagaagctattagaaaggagaaattaatgtagagggagagtatatcagaatgttagttaattggtcaccaagggactaggaaaataatgaaaaagatgagaagaaaataatattctctctatttatccacagagtaacttcttacagaacttcctctctctagcattgccaaaaggaggaaataaacatctaagtaatctgactattctttggttgaagttactcctgaatatatcatctggagaagatgggcaacaaatgattctgaggcttgatggctgtctagacttactaacagagatgagcaaatacaagcacaagagcagccctttattgcctcttcttatctttcataatgtttgcttcagtcctgcaaataaacccaagatcctggctaatggtaagttttcacacacacatacatttatatatgtagttattcatagactgttcaggtcaacaccaaataattttataaataattttctaggcatttattaagcacccactgtgttcaaagcactgtggaaggcatgggaatgaatcaggcatggcttcagccttccgtgggcttccaggagtctcctgaggttagcaaatcatgtcattccagtgcacatactggacacctggaggaaggggagccgtggacgagggctccctggccttaccttctgctccctctcctctctccttgctcttcctctaactccagctcccctcttctgcatcttcaagcaaatgctactatgtcaatgaagcctctcgggaaccatgtgttaatataatagccccgcacccagggggccttctctttcctcctcctcactatttcctttcctggttttgtttccctccgtagtattatcgccatctgatagattatgtgtttcatgtatctgtctattcctagtcttcccacactagaaggtaagctcttatggggtcaggaggcttttgtctgctttgtttatgtgtagcacctagaattgtgcctgcaactagcgagcactcaataaatatttgatgattgagagagatcccaagcagaccggagagagttcagggcttgagatcagatggtgcagtgagcctcgcagagacttcattctctgagatgtaggacagatggaggcgaggattggtaaggattcagaaaaaaattgaagcaaaaagaatcggaaagatctttttctgcaaccatgtgttatctctgtgaggagtatgtgaatttcgtggggagtgagttttataaaagacatgtgttctagtgaaaaacagaaggtgggctccagacccctacacacctggtcttgaatgccagcactagggcatcactccagcgtcgcctggtgcagcctcgctgggcccagcttcttcatctataaaagaagcccactcttcttggtttggtaagaatcagtttataaacacacataaagtgcctagcgctatttctggtacatgataaatgtttaagatagattcattctcttgtttttttcatgtttttcacttaaacttttctcagaagcatttttctgtgaaatcaagggttttctaagtgtacgaaaatgattcttcttatattttgtggtgtatatagttgtgattctatttttctgataagcattctgataatcaactgctagatatgatatagaaggatgtttaaagttcagttagcttgtagcagacctaaccttactgtggattttgcactctgccttccggtggctgctgtgctgatgctgcgttctctgttgctgcgtgatgtacatcactggttttatttccatcctctcccactgtagctgcttcagccctcacatttgtaaaatgagggtgatgataatccctcctcagggcaatgagagagcctgtgaagtgtttgtgaccattcttggtatatagcagctactcagtaacatctgttattgtttattcacctttcttagaatgattttttttttctttgagggctacttactccagtttattattgagagttggaaaaaggtcaagctttttgagaagtgaaggagagaagtctgcattttccacttctagacccctctagaattatttttagcatttctttgtagtcagcaatgctttttctccttcattagcttaaagcagatggataaactttggtgagaagcttcccctagcccacagactagagatcagtgggcttttcaggcaggggtaagataagagacatcagctgtgcagtttctgtgtggaactataaagggatgtcacagcctatgcctcgctttccacttggggatttatggaggaggccttagcagagtcagccagcttaaaagtctcccaggaaaggctgcctctgatcggtagcacccacacatctggtttaaatggtcaggagtggagtgtgcagtggagcttgaccttgctggtaaaaatagatctggggcttggcatggtggctcacaactgtaatcccagtactttgggagaccgtggtgggtggatcatttgaggtcaagagtttgagatcagtctggccaacatggtgaaaccccgcctctactaaaaatacaaaaattagccaggcatggtggcgggcaccttgtagtccccagtagtagaattgcttgaactggggagacggaggttgcagtgagccaagatcgcgccactgcactccagcctgggcaacagagtgagacttcatctccaaaaaaaaaaaaagatctggaacattccttgtttctggcaatgccagactaagtctcttctgaaaacgacaataacatgctagacaggctgtattaaaatgcacctcaaaataatcacaaaaactgaaaagatagaaactcccagtccagttttgattgaaagtcttgcccagacaagtaagaagtatatagaaaattattttgccccaagtgcatttgccaaggttgtatgcttggcttttgttgaggagtatcgaggggtgagaggacagaagccgcgattccccaaagtggggattcttactggctatcctgcttgtattaagctggacctccaaagaaccattctcttaatagatggatgggtcaaaaataagttggtttcccaaacttcatgaaggagactgtaaagaaaaggaaaaaaaaaatgtgagaatgggtactacagactgcttctgatagggctctgcacccaaagttggccgtgaacttggcttgaggtgtcttcgattgatggtgcctgtgggtacttagcagaaagcaaactgccttggtgatggatgaaagacaagttcatactgggcctcagggaacctctacaaataatttttcaaaagcattaaccagtacaaagttagagataatcaagcacattaggagacatggcaacatgtagtaagaaacagcagaagaataaaaataccagcttatctgcccagactttgaatatgggaattacaaagcatgggtttaaaaataactttaattataccatatttagataaataaatgacaagcttgaaaattttaggaaatgggaaactgacaagttgaaatatttgaaaagaaccaaacagaacttcaagaactttactgtgcagtatgataatcagccacatgtagctatttaaatttaaactaattaaaattattcagttgtactcactacatgtggctagtggctatcttattaaatagcaagatataaatatttccattattgtaggaagttctgttttacaacagtaatctagaacttcagtggccaaaattgaaaacttaatatacatgtctgacagcaagttaggtatagcagagaacttaggaattagaagatagattagaaaaatattatccagaatgcagcagagaaagctaaaaagatgagaaaggatcaaaagaatcaaaggtaagtgacacagcagatatatcaagacagtctttgtgtttaatgaagtgtcctaggagaatgggagaggaaatatttgaagaaatgatgggtaaaaactttaagaacttttctaagacattaatgtcaccataactgacaactcactgtaattaccaaactgacatccctaaacttatacttaaaccaattgtattaagaaggtaatattcaattattatattaaggtaacattcaattattatattaaggtaatattcagttcaaatattcaaaaatactgtctcattatttacattttactactgtatattcactttaggttatttaaatgtttatatgagagttcagacctacttgttgaactcaaaattgttttattgctttgttatatgcatgtttcacaataacatttgttttgttaaaaaagtcgatccacttgcattatcagaggggcccaccacattaattcacacacacacacacacacacagacacacacacacacacacatatgtatatatacatacacacacagtactttattaaaaatgctttaagggatagctggttgaaggagttataaacttacttagatcagaggagttatatattctgagtgtttgagacaacatttaaaaacatcacttgatgctactcagatggaacataaggaagtcaccctcccatttaataaggggacatttgatgtgccctaatgagtagcacttgcagccataacctcacgtgataaattgcatctgcaagctatgtacatggcttggttctgggtaggttatgatacacgacaaccaaagggcatcagatagtgcagatgaggtgttcagggagtcggctgcagcgtgcccgaaacatcactgcacctgcctttcacattgtcctgatgcacatttccagttcactttagggagcagctttttttgttttgtttttgttaaatatttaaaatcccttaaaataaaaaaattgaattatgtagacaaaatttttgtttattctattctggaatctttcacacaacgaatatttattgagctcctaaaatacactagcattgtggttggtctaataccagtgagtagacactgccatctaactaataccagtgagcagacgttgccctgtaactaataccagtgagcagacactgccttctaaccagtaccagtgagcagacgctgccctgtaactaataccagtgagcagacgctgccctctaaccagtaccagtgagcagacactgtgctgtaactaataccagtgagcagatgctgccctctaaccaataccagtgagcagacgctgccctctaaccaataccagtgagcagacgctgccctctatctaacaccagtgagcagacgctgccctgtaaccaataccagtgagcagacactgccctgtaaccaataccagtgagcagatgctgccctgtaaccaataccagtgagcagacgctgccctctaaccaataccaggagcagacgctgccctctatctaacaccagtgagcagacgctgccctctaaccaataccagtgagcagacactgccttctaaccagtaccagtgagcagacgctgccctgtaactaataccagtgagcagatgctgccctctaaccagtaccagtgaacagacactgtgctgtaactaataccagtgagcagatgctgccctctaaccaataccagtgagcagaccctgccctctaaccaataccagtgagcagacgctgccctctgtctaacaccagtgagcagacgctgccctgtaaccaataccagtgagcagatgctgccctgtaaccaataccagtgagcagacgctgccctgtaaccaataccagtgagcagacgctgccctgtaaccaataccagtgagcagacgctgccctctaaccaataccagtgagcagacgctgccctgtaaccaataccagtgagcagacgctgccttctaaccaataccaggagcagacgctaccctctatctaacaccagtgagcagacgctgccctctaaccaataccagtgagcagacactgccctctaaccagtaccagtgagcagatgctacactcacagaccctgccttgaaccttttcctattttagtacccttatttatttatcttgcctgattgccctggccagaagttccaatactgtgttgaacaggagtggtaagaaatggcatccttgtcttgtgccagttttcaaagggaatgtttccagcttttgcccattcagtgtgatattggctgtgggtttgtcataaatagctcttattattttgagatatgttgcatcaatacctagtttattgagagtttttagcatgaaagggtgttgaatttttttgaaggcctttctgcatctgttgagataatcatgtggtttttgtcgttggctctgtttatgtgatagattacttttattgatttgtgtatgttgaaccagccttgcatcccagggatgaaacggacttgatcttggtgaataagctttttgacgtgctgctggattcagtttgccagtattttattgaggatttttgcatcgatgttcatcggggatattggcctgaaatttcctttttttgtgtgtgtctctgccaggtttttgtatcaggatgatgctggcctcataaaatgagttagagaggattccctctttttctattgattggaatagtttcagaaggaatggtaccagctccactttgtatgcctggtagaattcggctgtgaattcatctggtcccgggctttttttggttggtaggctattaattactgcctcaatttcagaacttgttattgatctattcagggattcgacttcttcctagtttagtcttgggagggtgtatgtgtccaggaattcatccatttcttctagattttctagtttatttgcatagaggtgtttataatattctctgatggtagtttggatttctgtgggatcagtgctgatctcccctttatcattttttattgtgtctatttgattcttctctcttttcttctttattagtcaggctagtggtctatctattttgttaatcttttccaaaaaccagctccgggattcattgattttttgaagggtttttcgtgtctctctctccttcagttctgctctgatcttagttatttcttgtcttctgtaagcttttgaatttgtttgctgttgcttctctagttcttttaattgtgatgttagggtgttgattttagatctttccccctttcacctgtgagcattttgtgctataaatttccctctaaacactgctttagctgtgtcccagagattctggtatattgtgtctttgctctctttggtttcaaagaactaatttatttctgccttaattgtgttatttactcagtagtcattcaggagcaagttgttcagtttccatgtagttgtgtggttttgagtgagtttcttaatcctgagttctaatttgattgcattgtgctgtgagagactgtttgttatgatttcaggtctttggcatttgctgaggagtgttttacttccaagtatgtggtcagttttagaataagtgcgatgtggtgctgagaagaatgtatactctgttgatttggggtggagtgttctgtagatgtctgttaggtccacttggctcagagttgagttcaagtcctgaatatccttgttaattttctgtcttgttgatgtgtctaatattgacagtggggtgttgaagtctcccatgattattgtgtgcgagtctaagtctctttgtaggtctctaagaacttgctttatgaatctgggtgctcctgtattgggtgcatatatatttaggatagttagttctatttgttgcattgatccctttatcattatgtaatgcccttctttttcttttttgatctttgttggtttaaagtcttttttatcagaggctaagattgccacctctgctttttttttctcccctgcttgccatttgcttagtaaatcttcctccatccctttattttgagcctatgtgtgtctttgcacgagatgggtctcctgaatacagcacaccgatgggtcttgacgcttcatccaatttgccagtctgtgtcttttaattgtggcatttagcccgtttacatttaaggttaatattgttacatgtgaatttgatcctgtcattatgatgctagctggttgttttgcccattagttgatgcagtttcttcatagtgtcaatgttctttacaatttgatatgtttttgcagtggctggtacaggtttttcctttccatatttagtgcttccttcaggagctcttgtaaggtagggctgctggtgacaaaatctctcagcatttgcttttctgtaaaggattttatttatttttcacttatgaagcttagtatggctggatatgaatttctgggttgaaaattattttcttgggccatacgcagtggctctcacctgtaatcccagccttttgggaggccaaggtgggcggaccatgagatccagagtctgagaccagcctggcccatatggtaaaaccccgtctctaataaaaatacaaaaaaattagccaggtgtggtggtgcccacctgtcgtcccagctactcaggaggccgagacagaagaattgcttaaacctggtaggcggaggttgcagtgagccgagatctcaccactgcactccaaacctgggagacagagcaagactgcatccccctccccaacaaaaaaagaaaagataaattctttaagaatgttgaatattggcccccagtctcttttggcttataggatttctgcagagagatctgctgttagcctgatgggcttcccttggtgggtaacccgacctttctctctggctgcccttaacattttttccttcatttcaaccttggtgaatctgatgattatgtgtcttggggttgctcttctcgaggagtatctttgtggtgttctctgtatttcctgaatttgaatgttggcctgtcttgctaggttggggaagttctcttgcatttaatatcctgaagagtattttccaacttggttccatttttccccatcactctcaggtacaccagtcaaacataggttgcttcttttcacacagtcccatatttcttggatgctttgttcattccttttcttttttttttttctctaatcttgtcttcacgctttatttcgttaagttgatcttcaatctctgacatcctttcttctgcttgatcgatttcgctattgatacttgtgtatgcttcacgaagttctcatgctatgtttttcagctcccatcaggtcatttatgttcttctttaaactggttattctagttagcatttcctgtaaccttttatcaaggttcttagcttccttgcattgggttagaacatgcttctttagcttggaggagtttgttattacccaccttctgaagcctgcttctgtcacttcgtcaaactcattctccatccaattttgttcccttgctggtgaggagttgtgatcctttggaagagaagagttattctggttttgggaattttcatcctttttgcactgggttttcctcattttcgtggatttatctacctttggtttttgatgttggtgaccattggatggggtttttgtgtggatgtccttttggttgatgttgatgctattcctttctgtttgttagttttcttcctaacgggcctctctgctgcaggtctttgggagttggctggaggtccactcctgcccctgtttgcctgggtatcaccagcagaggctacagaagagcaaagattgctgcctgctccttcctctggaagcttcatcccagagggcaccccccagatgccagctagagctctcctgtatgatgtgtctgtcaacacctgttgggaggtgtctcccagtcaggaggcacgagcgtcagggacccacttgaggaggcagtctgtccgttagcagagctcgagcactgtgctgggaggtccactgctctcttcagagacagcaggcaggaacatttaagtctgctgaagctgcacccacagccgccctttcccccaggtgctctgtcccagggagatgggagttttatctataagcccctgactgggcctgctgcctttctttcagagatggcctgcccagagaggaggaatctagagaggcagtttgggtacaacgtctttgctgagctgtggtgggctctgcccagtttgaacttcccagtgccttcgtttgcactgtgaagggaaacaggctacttaagcctcattaatggtggacacccctctccccaccaagctcgagcatcccaggtcgacttcagactgctgtgcaggcagtgagaattttaagccagtggatcttagtttgctgggctccatgggtatgggatctgttgagctaggccacttggcaccctggcttcagccccctttccaggggactgaacaactctgtctcactggcattccaggcactactgaggtatgaaaaatctcctgcagctggctcggtgactgcccaaatggctgcccagctttgtgcttgaaaccctgggccctggtggtgtaggcacccaagggaatctcctggtctgtgggttgcaaagaccatgggaaaagcgtagtatctgggccggaatgcaccgttcctcagggcacagtttctcagagcttcccttggctaagggagggagctcccccaccccttgtgattcctgggtgaggcgacaccccaccctgctttggctcgccctccatgggctgcacccgttgtctaaccagctccagtgagatgagctgggtacctcagttggaaatgcagaaatcacccgccttctgcattgatctcactggaagctgcagaccggagcttcctattgagccatcttgccagccaccctagtcatttttaaaaaacatcaagcagtgtgatatttgatgatcgtttttgtatagtagctcatgctactgatgtgtttgtatgatagtctttataatttatcatgaaagcagatctgtttttctgcctgccagaatgttagctgtaattgagtaactcattaatgtacctaattgtatacttatttttacacacttgtggtctttaaatgaatgtgccttttcttgaattctggccaaaaaatgaagcagcttcagtgtctttgacccttctatgcctgacatgaaaacaatgttttgaggttgtcctcccatataccacatggcataaaagattggttttgccatagtctagtgataccaactttatgtatgcattctaatgggaaaagaggggggtgtctgactagtccaagataagaatacaatgcagtgtctgggactgaacttttaaaaaatatatgttcatttttagaaaaagtcattactgtgcttgctgcctgtctggaaagtgagaatcaaaatgctcagaggattggagcagctgccctttgggctctgatttacaattatcagaaggtcagttttaaaaatcattgttacacctggggagcaaacaacaaggtataacccaggtataaactcttaggatacatccaaaggtgtcaagagttacagcaaaagaaaaaagacaaaatcaaagatccatgttccctttgctgattcatacaattagtaaaccatcagttgaaatctttttatttaatcatttcaacagaatgtctcagtttagaagagaatctctgaactgactttttcctcttaatttaaattgatttactttattattgcaattttagtatagattgtttcttctaaaagacgtatcaagggaaaacacatcttaaagtaaaactgagtaacaaaagttttatccaattgtacaattcccctttatctagctcagttcttgtacgactgcagcccaaagcctgctctgagaaaagggcaggcaacgtggagatttgtgttctactctttctctggcctttggacttccactttattgcagacatgttgttcccaagagaaatacccataagtatctagtgattaagtagtagccaagtgacagtgttaggatagacagccatcctagaatggtgttctctcagctgactgtctctgccggggctagttttctccctgctggccagagtcacgtacacaaggacaagagggtgttgttttctttctcacctgggtatccccagagcttagcacaggatttggcactttgtagtcactctgtaaatatttgttgaccaactgctaatatttggtatatgtgatcagaaatctgaggtttgagggagtatgaaaaactgaaaccaaggatgactagtttaaaatagcaaattgagattaggggagaaggagtaaaagagaagggaagaaagaaaatgggaatagagaaagaatcaagttagataagaggatatgggcaagacttcagaatgtgcaaggggattggctcaataggatgtattatgctaagatggaactctctagttatattattatatttcataatattctgtttaatactgtagttagcaatgggcagaattagtgttttgctatcatgatccataacacatggcaagaaacctaattaatggattgttctaggcaaaaacagctttgaaaagcccatcagtaaaaagaagagtggatgaagcatactccttagcaaagaaaagtaagttgcaataagaaagagattatagttaaactcagaagctattaagtggattttctgattaatgagatatttggacaggccacagcaaaatggcattgtaaaatgtgccaatattcagtatgtgctttaattatatcattttttaaaataataaaatagatagatgaaggtttaagatgtgattgcttctaaaaatgcatctgtgatcttcgtcttatttttgtactaaattttctttgccaacagtgaccactgtgctgaagtatgttcttagtgataagaactggcccaattagaattaactgtgagcagaaaacctggatctaacatcagggagctggaggacagtcttccaagaattgatcctgttacccttatatccacgtttccctgtgatgtggtcacaatactagagacggttttcttttcaaagcacattattcatttttagtgacaccaaatttcagtgagcgttattctctgaacattttttatgctaaaacactgaattgtgtctttcctgtactgtaatatatctgttggttatttgtgtttttatagtctgatttttttttttaagcaggggaggttttagtttgttttagctgcgaccatgaatttctggagctagtgaagttaaagattatgctttaggaaggatggtacataaaaaaagattaatggcattcatttggaattatagttaatggtatccattatggggggtactttttaaaaaatactctgggtaagctgttaatttaaaaaaatattgattttgtaacttgtttattttttaaaaaatgcaaaatattctggaatgctattacatcaagaacttagagctttaaattatatataaatcctgttcatatgtatttgtttatgtgtgtgcctcctaagtatagtaccaagtttcataaactagtatttctgtactcttatttttctatctcagctttcccaaactcagaagcaaaccctctaaatgcctattatttgaaatgtcttgaaaacctcgtgcagctccttaattcttcctgagtgccatgggatgctacaccttgaagctgacagtcatcaacaggggagctaaagttgaagccagctgtgtgtagcagctgttacctgaagacgtgctacctctctacaaagtgttgatccccttctttcccatgagagagagaactggtgatactccaacaccgtccagttgtggcagctctccagaagtaatagcagctgacaactttctgtgccttttcctttctgttgaaaaggcatagaaagttctgggaacataaacatttttacccttttctatgccatttatttt

SEQ ID NO: 15788 - DNA, 56913 bp, Homo sapiens
caatgtgcagcctcttggacaacctcttgacgattgctcccagagacactgcaaaggcttttcgacaagctcatctcatagaacttctctgtaggtaagagataaatactcctagagaggcatgttagttgagataaatttacacaaactgtattcatgacttgatacaagatttcttgtgacctggaaatacagctttattcttttttaggctcattgaactctaggattttgcttttgccagaattgtcttggtggtttttattttacatctattaaagcacttgtattagtttgttatcttgactattaaggccaaagaaaaactcctgctttctaaaattcatggattctaaaccttatttatcctccagcacacttaaggaatatggtgctatcccctgttcttaatggatgtgagggactttgggaattcatctttttagtggtcatatcagaataatgtccctgggttgaaaaattattggttaaattcatttggagttattttgttaagggaaattaaacttttcatcaaaaagtattctgataaaatttagggaaattaaattcaaagaaaaattatttgaatttttattacttatttgatattaatcagtctgtaacataatttttctgaatttctaggaaggtatagtagaaaaggactagatattgaattcaggttgacctaaggtctaattatagttcattcactcagtagcttgcagccttgggaaattactccctactgtgtcattaacacctatttaatggggttagtgtgagaattaaaagtgatggtatctaggatacccccttaagtattacttctcttttcttctggtgttcagtttattctagccaaccatacccacctccttttgaccacatgtttatttgcatttctctgtctctctgtccctttacctttgaacatacaccatctgaaatgtcttgcatcttcttgccaaatcatagtgtcttctctttctttctgggatattaagaaaactctagaaaatataaactctaaaagaagtattccttgtttcacctcattcaattgtaattattcctttaacatgtatgatacgcaatggagtatgagtttgttctggctttaatatttattgatcatttttttactgtacctactcggattggaaaagtaactgctagtcagttggctttccttcctggatgctcctgcctgaagatgaccaaaatagagctctagggataggatcttctttgcttcttacgagtcagctaagagtctgatgtggcattgaggccacaggggcattaaaagaccttttatggcaaaggcttatcatatttccgtacctgtttttcatttttgactttaaaaaaatcctacttgttttactttatttttatttttttatttttatttattttgagacggagtttcactcttattgcccaggctggaatgcagtggcgcgatctcggctcactgcaacctccgcctcctgggttcaagcgattctcctgtctcaacctcctgagtagctgggattacaggcatctgccactacacccagctaatttttggtacctttagtagagacggggtttcaccatgttcaccaggctggtcttgaactcctgaccccaggtgatccacccaccttggcctcccaaagtgctgggattacaggcgtgagccaccgcacccggcctgttttactttattttgttttttactttctaaatatgaacagtgttcttgctattttagccagtatttttgctattttattaggaaaataaccaccaagtttcctgttactcatgggctgtattatattttattctgcttttaattaggtttccttagatattttcttcacagctctttgcttctcacttttctctgacaagatattttcctgtttgaaggtaacccaggatacaatttgaaattctttgagatatctttttataaacattttctttgcttataaagatcctttctcttgaattgtattcgagttacctttaaacttcaaattctgatttcttaatctttaataaaaagtatactaatcttctgaaggattttctttttctgatcgtcacagcattgcagatgctaccctcatacagacatgtgtccaggaactcagagccctgctgccttcatcacctccagctgaacacactcaggctcaggtaagcatctcaagtctgtttgtgggtttgtttacgttaggtgtcaaaaataaaaatcttgctgaggagatactagtcataggaaaaggatgaaaacctctcaaaatatacatggtatgatgagattattcgaaatacgttacttgaaattttaatatgggacatgtctggatgttagaaaagagaggtggggtttgaagacctagattctattcttgactccatcattaaccagctttaaatgtatgatcaagtgtctggatatcttggagcaccactttaataataaagagggacattggtatagttcacttcctgcttctgtgattttaggctatctctgttatttacaccaaagttaaagttgttaaaatatttggtggctaagttatgtgtattttcaaaacccaatttgataaaaatgatttattcttgttccttcacagatatttagttttaaattcttgcctatagctagaatctatttataaaacatgcttaacaattattcatgtagctgttgctaacagaaattttatttcaaaatcaaattttaagaagggctacaagatttatttaggaggtgatgaattaaaggtgaagtagaccaatatctcttgctttgagatgtgttctttgagctgaataagacagaccccattacaaagtttgggaatgctacacgcatggtctttgaagctgttgtcctggtgcagtgttttcacctgagcatgcctattgcataatgactgtctcctccatttttctgctctccatccagcaaatctttgttgagtacttgctgtgtgcctgaatcttctccaagtgaataaaacaaagacccttccctcaagttgggagaatagataattagaaaatccatatatgcctgaagatgatagacatctcagaagaaaaactaaagcaggggacaggaagtgatgtcagagttggaagggtagggctattccacttaggatgattaggcagtgtcgtgggacccaaagttagtgaagaagctagtcctatggtcattgcaagacccctgaggttggggtatgcttggcctatccaagaaacagcaaggagggtggagtcgctggagcagaatctatgagggcaagatgaggccagaggggcacagtcagctccatgaagtcaggaccttgctggctgttatgttccattgtgttctgagtgtctggcatagggcttgtctcatgacaggtgctcacttgatacttgtgggatgaatgaataatagcagtagcaaacatttatgggcatttgtttttgttaattcatgtaatcttcacaagaatcatgaagttatcattaatgtcattttataaaggaaatgcctgaggcccagagagatgagtgacttgtccaaggtctctgacatagattccaacctatgcaggtcagttccagggcccacattcttaaccactgcaccagctggccttatgtagattaaatgcttctgggctcttggtatttatataagatcattcactcatttcagaaaattcttgagcctctgctttaccagattctgttctaggtgctagtgatatatccttgaacaaagcagatgagcatctctcctcacgtagagtctgtgccataaatgcaggagacagacagtgaacaagtaaataaaatgcattgtatcagatagtcacaaatggtatggaaaaaagcaattgaggatgggtaaaagggtgtgtcagaaaggggaggggcctcctgaaggtgacacttaagcagaaagctggggaggtgagggagcaggctgcgagtgcctgcggcagatggggtggccagagccctgctggtggggtgatactctgctaaaggtatgatggattaaagtctgtggtcagttggttggtatttttttttaagagggccatacatagaaaaagagttactttatcaactactcttaagatatgaatattttatttaatcttgaatgtgatcatatacaaaagaatctttagcaattcagcgttttctctataacacttcttcttgcctcacctggcatggtttatctatttatggtaatatttcatacatccagaggtcagacttgctataatttcagtagtgtagagtatgaatgtaatatgaagtctcaagacttcacggcagtaaacaaattaaatttcacaaactgaagagtttgtgaagcctggagccacctacacttttatataaagtaagttggcagattagataaagggaggacgtattcatcaggagaagtagggcagaactatttgtaaatagtctgagaccattgacctcagagacacatactccacaaatttacaacaggctctcgactcttcattacactcttacaaccccagaataaggtgagaggaaaaaaagtgtgtgtgtgtgtgtgtatgtgtgtgtgtgtacagagagagagaatgactgatttcagaatatctttataaaattcacttatatgtaactggctcattgcttgagggtagtggacaaatgagacatcacagctcattctttaattgttacatattcagaggattatttttctgaaaagtacttttgccagttaatacttaacaatattagcatcaggcaaattccagagatggttttgttggtaatattgaagatgatttaattttttcttttataattaataatagtaattttatgctgagggcaaaaatagaacatatttgcattttatttgtagcaataactaggctagcttccccccacccctgcttatgcactttgaagggtgtttttgtaatctttctttctttacaaaattatagactttatggctttgttatacacttttccacttcttccataatattgatttcataatttgactacttgaaaaatatgggacttttttttttcttttgaaacagggttttactctgtcacccaggctggagttcagtggtgtgatcacagctcactatagcctctaccttctgggcttaagtggtcctcccatctcagcctcccaagtagctgggactgcaggcccggctaatttttatattttttgtggaaacaggatctcaccgtattgcccaggctggtctcaaactcctgggctcaagccatctgcccaccttggcctctcaaaggactggcattacaggtgtgttagctaccacacctggccaagactttacttctttaaatggaattcaaaacttgactttgaaaacattgctttgtttggtgtatagttgacagtattaatatggctgttaatgacatgcttatgagaaaaataatgctttgtctgctatgtgttaatttcagatcttgaaaaattatggttaatattttattttttattgtgttacaaaagtaaaatgctgtatcactgagatgggctttttatatggcatgtttgatttgaccctgtctccttttcaaacaggtttcctttctcctggaatacctatcctctttgtccaggcttctgcagtcatgtttattggtggagcctgaccttgtgattcaggatgagcttgtgaaacctcttatcaccaatatcattggaattctcaccatatgtaccaaagatgtattaggtaagcttaattgttttagtttagaatgtaagtgaataatactgaggaaaaaaaacttactctgtttcagatattcacttgaaggttactttttgagtttctttttgctagtattttggaaggctttgataatgtgttttatagtttggatgccttttaatggtaccaattaagacaagtgtgtagtataataaaggactacccttgagttttcagtttaaatgagggcaaagctctctgtgtgatgttagaaagtacagtgagttctgggtattaactattcttataaactatggctaaggccaaaagcttaataaaacattcccaataacaagtataagccaatctagaatatatcacaaatttcctaaggtcctaaattattgaaatgtatatatattttgtgatctaatgttatctccaggggaaaatattctatgatgaaaagttgaatgtaatgcttagtggagaaaattaaagcaaagtaggatctttgtcaaaatctaatataattgttttgaaaatgaaaacaatcatttataatgaagtaattgaccatttggtaattctctttgcctttcagttttatttgaactatggatttacttggttttaggtctggaaaatgaagtgtgttatgatacccagcaaagccagttctcagcatctcatcagtgttaaaatgatctcgatgttaaaggaatagtaattccttagaaattcaacaagtggcagtgataccctaactaagcttattaggttagactggacaagctcaacaaggtgatatcacccccagtctctaaggagtgaacattgattctggggagaagagggtgaggcaaaaacatcttagaaattaaaatagtttgtaggcttccaaagctcaactctacctgagacaatcttattactatttctcttcctggtttttcttgagaattccttgagaagcattgacgttgagttcatggaagatacacaagatgtatgcaagactagtgccacaaaactgtggtgaatagatgacagcagctggaggacctttggttgattgtttgatcccaaggtcatatagcaaaaggtggtctgtgtatcttggctgctattggctgccttgtgaatgctttttattgatcctcttgcttttctgtatgatttgagctttgaaaattaattgaaagtagtatatatttaattacataaaagttgtttaacccatcattaattatatcaagcgctgaaaggaaaaaatgtcaatatctgaatgtatatctattagctggttaaattaaaaattgttttctcatatctagcaaaaagttttaaaagttcactaagaatatttttaaagaagtttttaaaatttttttctgaaaaaaataagttttaaatgattttataagaatttattatattgctgttgtttttatatgaattgctaatttatgtatgtaaattgacacattgtgatgatatatatatataagtaaataaattacatgaaaagttattcagcaagtataggtgcaaagctaaatttggtattaataggtctttaatttttaatttaattttcagcttaaatgttttattcggctcttcttaagcctgtattgaataaaaacagtaagctctatacttagcctttttatgtacaaagtacagatatacatatagtacataaagagatatacagtatatgtgtggaattaaaatcttgtggggatggcaatgaggaaacattttctgaaataaactctttagagagccactaatgacaaaagggttgagaaacaccaaggattgccctggggaaggtgcagttttcaagtatctcataggtgctgaagtacacctagatggatctcctcggggttaacgtcctataaagtttacattatagtggaattagataaaagatgacagatccccctgaaggcatggtcagagagagtcctcagcgactgctctccagcttccatttacctgagtggagagaagggaaaatgggtcctcatcctagaattgctacatccttagccataggaaaagctgcagaatcttcttttgcgtcatacttttctttgtgggatgatacttttcttggttcttcaaagaaattctttcttttctaccttgaccttggcacactgtgctttcctttcacccctgcccaaagctgctggaggggataaaggaaataggggaaaacttactctgacaaaagtagcacaaacaatgacatatttttataatgtgccaatatgtagttctgcagtcatggcttaatatttagtttgtcacaccttctgattgttcttgagtatgctttaataagaggagagtttgtgagtgtggctttatatgcaggagggtggaggggagatatcttaagaagcaatggaaaagaagttaattgaaataaattttggataatgctgaattagatttgtcttcatttgataagtgcacacccctcattttaagtgtaatgaagcgtctgtggtaagttttatatcttgaaaggttcttttccttctttgtgttaataacttgaagtgttttgattaattttatagataaagagttaatatcagctttttatcacacatggacacatttatttaatcttctggccatgctcctgaggaaagctggtgccatcacactcccgtttgttaccgtggccctggccaagcactggacagcggcgattggtaagaagatacttgcataatcttgggggctttctgctaataaaacgagataatgattctgcctgtttaggtatgtaaattcactaaagttaagtaattatagcatggcatataaaagaggtatcagggtgcttgctttgaaaaatttgcagtgttcttgagccccccaaaaatgcatttttgaaaaattgaaacacattttgagataacataaaagcgagttaggaaagcctgtggttttattattttttaagctttttaaagatgtcatccctgaagctctgttttattgagaacattatattggccactgttggtttttttaaattttactttaagttctgggatacatgtgcagaacgtgcaggttttttacataggaatacatgtgccatggtggtttgctgcacctatcaaccgatcatctaggttttaagccccacatgcattaggtatttgtcctaatgctctccctccccttgcttctcatcccccgacacggtgtgtgatgttccctaccctgtgtccatgtgttctcattgttcatctctcacttgtgaatgagaacacacagtgtttggttttctgttcctgtgttagtttgctgagaatgatggcttccagcttcatccgtgtacctgaaaggacatgaactcattctttttttatggctgcataatgttccatggtgtatatgtgctgcattttctttatccactgtgtcattgatgggcattgggttggttccaagtctttgctattgtgaacagtgccacagtaaacatatgtgtgcatttgtctttacagtaggatgatttataaaactttaggtatatacccagtaatgggattgttgggtcaaatggtatttctggttctagatgcttgaggaattgccacactgtcttccacaatggttaaactaacttatactcccaccagcagtgtaaaagtgttcccattttctccacatcctcgccagcatctgttgtttcctgacttttgaataatcaccattctaactggcctgagatggtatctcattgtggttttgatttgcatttctctaatgaccagtgatgatgggttttttttcatgtttgtcggccgcataaatgtcatcttttgagaagtgtctgttcgtatccttcgcccactttttgatgcggttgtttgtttttttcttgtaaatttgtttaagttccttgtagattctggatgttagacctttgtcagatggatagattacaaaaattttctcccattgtgtaggttgcctgttcactctgatgatagtttgttttgctatgcagacgctctttagtttagatcccatttgtcagttgtaagcctgtggttttataaaggtacatatgatatgattataaaacaatgagataaattttactgtgttggtatagaaaccagtatcctttctgacatatgtacattgtatgtggatacatcttcatatataaaatctggtatacatgataacatggaaagttaggatacaaataactttctcatcacatcagaattttcttatagtacagaaatgccaagagtatagtataattatttttatgtttttcatgatagttgcccactaaaataaacatgattattttaaaataactaatctttaatttttcatgaagcctcctaaattttagcatagaaaaaagctgttttttaacataaatattcataactgacatttatgtaacctttttaaacaacctacttaaatgtactcaaaattgagttattttaagcttccaaagtacctgctaattcaactgaccgattttttttaacatttattttatcatttgatcattcagtaaacttaaatgcatgatacaatttttaaccaaagcgatagtaagaattatggcaaatgcatgtttaacaaggaacagaattgttaattttctggatgtaggagttctgagtctaccatggagtacagtgtccacgtaggatatcattattttgtttaaaatataataattgaaagagattgactgattaagacattgggattttcttcttgtatttattgggggaaaattagtttatcacctgaatcaccaataatatcaatagaaagcatgatgctacccacattagataaatctggcctgcagcttgttttggtaaataaagttttattggaacatagccacactcacttacatattgcatatggctgctttcatgctacaaaagttgaggtgaatagttgtgaaaaagccagttacctgcagagtataaaatacttactacttggacctttacagaaaaagtttgctgacctctgacttaaacttatttatctaacactatttctttagtgataaaataaatacatattaaattcaaaaccttccttcaaaatatgtgtacagttttatgtaataatagtactaatcaaaagtaacttactgcataaatggttttcataatagtaatgttaatgaaaacattaataacaattatcattttttttgccatggttttatttttgtttatttttatttttttaaatcaattgccatctcatatgcccatatacatttaaaacatgtcgtggtcactccgtaacttgtgttatctataagagtcttttctcgaacttgactaatatttggacatcatttaaatgaacataattctcatgaaaccctactgctgactactttatttttcttatgtaactttaatttgtacaagccaaaatctaagtaaaaatttttatggttataattatcacacaagcataaatctaaaatataaaatcaaacaaaattataaatccaatttttcaagtttataaaatgtaaaacaacacatgtaattttgattaaacaaaatcagttctcacaacaggaaattaataatgactgtttcagtgtaaattcctttcagtttggtctgttctttccactctgtattaagtttgtgaatcagttcatgaccactcatgtgctgtctgaactgctatgaaatatttgtttgtacattgtgccaacactgcatactaagtcttgcttttaagttctggttggcaccagctcctttaacagttgcaacacaatcacacaagttggtaatctagatgatccagagtatagttactttaaaatcaacttgatttcctttttgttgaattttgaagaaattttcaaacattcacatctgaaattattcctttagatatgttctgcacatgtgcaggcttgtctgccacgtgtcctgccctgtatactgccagcttgcaattcctttctgttctcttgaccgaagaagcaaaagggcatctccaggctaagagcaaaacacatttatgctgtagtccaacagtggcttcacttcttgatgactctcaggaaaatcagaaatctctagaacaacttagtgatgtaatccttcaggtacgtcatttcttggtttttcaaaaactttatttagcgtttaaataaattgactttcagtcatggtcttgttaaaaactgtctcagtcatttaaattaagaaatagtaatgcttattatgactgtttaaatgatacaaaagtttataaagttaaattaactatctcctccttagccccacccgcttatgttgaccagtttcttcagtgaatatgatgtaaagatttgaagtgaaatattactaatctaaatctaacagttgatcaaaacagtgtttcatatcatgaccaaaatggatatatttcagaaatgcagttatggttcaaaatttattgtaattttaaagatatatctacgtctctgaaaatatattctaagtgacatttgatttctagaaatggaccacagatttttggggttggttacatgtataggtaagtggacttgtctggcacatttggaagaaaatgccccctttccaagccctgttgcctgttttatcttataaaattatgtttacagtctaaaatgtgaatcaagaattttgttaatcagaaaacattctaaaatcactaaagtattattttataagtagatgagtaattttttaaaaactgtgtgtttactaagttaaagttgtacattgttttttacaaataggaatatttttagatttttcagtatttagaattattctttttaatcatgtggttttatgatttttgtcttctcactgaaaggcagaaaagtagtagaattgttgattgaagaatttgcttcagcttcccaatcagccagccacgtttggcaaagatagaagattgtctgtgtgctggtttgttataattcctttgttgcttagaagattgttcctgtgctgatttgttatagtccctttgttgcttagaatttggagatttttacccacttctttgcctgtgagagtcatgatcatgcagatatttctggtatgactgcttgtgcattttgggcacaaggcttgatgatgttgagatgcagaaaggattgccagtaagaagaaaatgcttcctggttcacccaggagctgtcctgtggagagtgtcacagggtcctcaggggactttgtctcccttgtgctacaaaatctggttacctttccagcatagataagaagcctgttaaggcatcccccattttctcatccatctccagcagcgccttcagaagcctggatagagctctaggggagaagcgttcctcaaagcatttctctaaaagcctcttattcttgggaggccatagctttcctgtacctactacctcactgtcagttcactcaaattttcttagttgaaaacaaaaactggacgttgtcccagttttctcattccccatcagaacaacagactttatttcccaatgattaactgagtctccagttttgcactttaaagaatgttgtaaggaggaaaattcaaaccttttcaaaagtctcccaaccacaacccctatgtaatttaattataaatttcccaactttggctttggttggagcacggtactgcttggggaaaggcttttgctcttgctgacacacttggctcgtcagagaatttcagtgacttcactcagaggactgagtgcagtgagggcagtgtgctgggccctgccctccctgctgaggccaaaatggcaataggtgtgggagcctggctctgcatggatgactgtgggtgtcctgcaaccaatcctcctggacctgggaaatttaaagacttccagccaggcaaagccagggctattttatttcccaactctttaatgttgtttgtggtgctgtgtttgaagggtctctgatgagactcatgatgcatatggatccatgtagggtaatgaatcagtttataatagtatacgcaggaaaaaaaaaatctgtgctagaggaatttgtgaaatttaccttgcccttatttttacctaatactttgtaatattattcattataaaagcttttgtttataatttttttgttacctttttggacaaagaaaatgagatagcctacagtcacagaatatctcaatgattttcctaatgactagctaattttcctctttatttctctaaattacaaatcacgtattttgtgagggtatggatacattaaccaattatttaaaccatgtttcctaataaatcatactctttgtgttcgtgtaagcagtagaatttggatacatgacatctgttagaaaggcacaggcaagtttaagacaaagaaagtgaagagaggaagtatactcctggcacactcatgacaaaatgtgtacctaatgtaagttgggacagttaatgggcctattaaattacaaacactgttttctttgccttatagaaataggatatgtgaattaaaatattattagaatacattcaacagcaacacgttttgataagtaataaatgtagcttactatatgtccatggaggctgtggtttgggccaggtgctgtatgaagcaaagtaaattacagtctttaaattatctgaagaaattatattctaaaattgatgtctttcaaaggtctaagttttctgtaaaatcatactcaaaaaacatttgatatgggaccttaggcaaatcacttaacttcttgggattcagttcttcaagtgcaaaatgataggcttttattacattattactaagtttcagctgcctctaaaatctccatcctcctaacaaatcactgtattggaacttcagttaaatgtctggtcagagttatcttttaaatggtgctttatagcagtatcccataggggatacatgttgaaagtattcatacttacatcttaagtcatgtgtaagtgtttttttctaagtccattttgaggtggtttcagactttgagcattttctaagaaatattcagctgtcttttgtccataaaatactgaacacatttgacttagcagagattttaccttccctagtttatgaagatacagtagtctcctcttatctgtagttttgccttttatagcttcagttactcatggttgactgtagtccagaaatattaaatggaaaattccagaaatacacaatacttaacgtcttaaattgcatgccattctgagtagtatgatgaaatatgctctgtctcccctcaggacgtgaatcatgctatgtctagcttacccatgctgcatatgatacgtgcccattcatcacttagtatagcaatcttggttatcagactgatgaatcacaagacgaagaaggatgagtgcattgtagtaagatattttagagagagagacagagaggccacaatcacataatttttattatactattctgttattattattgttagtctcctacctgcctaatttataattaaactttattgtagttacatatttataggaataaaacttagaatatatggagttgggtactattcatggttttaggtatccactgggggtgttggaatggatccctcaaggataaaggggcctactgtgctcaatatgttttatttgcaaatacatatagataacaagatcaataaaaatctctctatatgtagtagattttgtctataattgatatattaatcagttgagataatgaattaattttgctccttatatttgatctgatatctaaaagtagtaatgcaaatgaggaactcttgtgccttattttagatgtattttgtgctcacatttagtgaatggtaaaattcaagggtaaatctgttgaaaggaaggcttatatatttaagatcccattgtgttgatgaatgttcactgtaattaaaaagcctattttttacattaagtaccttttggaaagaaagcaagaaagtcttgacctagaataccctacatcacttaaatgtacagaagggattaatctagaaagagcatgacatttaaatgaattttggttgatgaaaagacattatgtcttgctctgtatatcgtcttgatttctttttctctttttgtgtatttgctagttatctgttgcttgagtttattctcagccttgctgcctccaggctcctcacacttccagtcgtgtccacttgctctttgcagtgatgctcagactgcttttcagtctgcagtaagtactgtatggaaactgatagaaagtcagttcttcactccagcctttccttcagtatatgttggaaagtatatgaatttaccatagattaattctgtttgtttcctttttgtctgtttggttttggtttggggctttgatttcagttttaccatgtacacattttagagaaccaaacagttgtatctgtaagtttttactaaaagtaggagatttctgccttcattcctcatattctcagaggtgaccacttatacctcatttagctactttttatagcttctctttcatgtctctaaataacatgcttatatttttttgtcttgattattcagttttaaatattatctgttgaattcctactatggaaaatgagactttagcttttttttcatgcctcacccacctaccctgccaaaatgggttcccttctcattctcctaatattgatataccataatgccaattagagaataggcagcgtgaatggtattaaatttatgacagtgttatacacagttgaaccgtgttgcagagtgtttaactttcttttcttgcacagcttttgtttgccttagaggtaattattgtattattttaaaacgtgctgactttcctgttatcacttacaagctccatgctctttgccagaattaaacatcctctcagtgtgttcagaattgtcagaacttcatcgcttcatcttttggaagaaatctcttcccaattccttctaacctacttggtgcctgttttcatcctgggatatccattcaccagtttctgggaattcctttacctctgtgctaggtgcagtttcctgtcatcctgggatatccattcacctggttccaggaattcctttacctctgtgctatgtgcagtctcctgcatcctgcatgctgtctcccatctcctgtggccttctctcctggttaatgctcttcatttttgcgtagcgtctcttctcccttagctttcagagaaaaggtactgaggaggtcttttgagatctaaatgactgaaagtcttttatcgcccttacatataatttatagttaggctagtgagaattctggattggaaatcatttacttcagaatttagaagccatagtctgttctttttaattccaaatgttactatagagaattctgaagccttggctgggcgcggtgctcatgcctgtaatcccagcacgttgggaggctgaggcgggcggatcacgaggtcaggagatcgacaccatcctggctaacacagtgaaaccccatctctactaaaaacacaaaaaaattagccagacatggcggcgggcacctgtagtcccagctactcgggaggctgaggcaggagaatggtgtgaacccgggacggggagcttgcagtgagcagagatcacgccactgcactctatcctgggcgacagagcgagactccgtctcaaaaaaaaaaaaaaaaaaaaaaaaaaagaaaattccaaagcccttagaattcctggtttttctcttcctggaagtttttagaatctttattttttctcgtattctaaaatgtttagatgaagcatccaggtgtggatctgttttagccattgtactgggctctcttggggattctttccatctataaactcatgctttctaaattacttcagagacattccctgtactttgtatgctctgtacatttggaactcctgtgaagtttttttttttcgctatgtaatctctctttgctgtcttttcctctatttattttagtctctcttttctatttggcagcttttcttggtgtctggtaatcttgattatgtgctgtatttaagactgggaaactcaaagcagattgacatccctgagcatatgagtgcaacttgtcaattgctgtccaaggggaccaatgggggttattttgtaggcttgtcttctggggcttatcagattccctggagaatggtcttctgatctctttcctggaggtgaaaacccaactgccaaatgttatgtagccaagtaggagacgacagctgaggtctcagaatttagtttgcacaatttcacttaatccttcaaaggttttagtagaatacccttgcccacaaattttcctgtctctgccagttcagaatcctaatttatcctctccagagactaagcatccgggattttgcaagggctgggaggaagagtggcttagttacatagaaactggtggctggcgggcaggatctgggcatgtaactgcattttagagacttgaagcaatccttcatcctcacgtccagggatgcctggtgctaaatttcttcagccttgggcacttcagtggatagattggggtagttttcagctttccccactcaccacttagaattcaagtttcccaagcctaatacacttgcctctcatccatctgctttctcgttttcaggcttgtgtgtgtgtgtgtgtgtgtgcaatcccatttttgtcattttaatgggatttcaggagggaataaaagacatatctgtgcacacaactatttccttaggagtcttaactccgacccaaccctgctcccaattgctagtgagcaattttttatttttattttattttttatttttatttatttatttatttttgagacagagtctcactctgtcacccaggctggagtgcagcgtggcccgatctcagctcactgcaacctctgcctcccaagttcaagtgattctcctgcctcaagcctcccaagaagctgggattacaggcgcttgccaccgtgcccagctaatttttatatttttcgcatgtttgttggccaaactggtctcgaactcctgacctcaggtgttccgtccaccttggcctcccgaagggctgggattacaaggcgtgagccaccacacctggccccattatcatttgtttcaagaaatttttcaattttcttcttaattttttcattaacccactggacattcaggagcatattgtttaattttcatatgtttgtatagtttccaaaattcctcttgttattgatttccagttttattctactctggtcatagaagatgcttgatattatttcaatttcttgaatgttttaagacttgttttgtgaacctaacatatggaatatcctacagaatgatccatatgctgaggagaagaatgtgtattctgcagccattagatgaaatgttcggtaaatatctattaggtccgtttggtctttagtgcagattaaatccagtgtttctttggtgattttctttctggaagatctgtctgttcaatgctgaaagtagggtgttgaagtctccagccattatcgtcttgagatctcgctctctctttagttctaatatttgctttatgtatctcagtgctccagtgatgggtacatatatactcacaatcattgtatcctcttgctgcattgactgcattatcattatataatgatcttctttgtctgtccttacagtttttgttttgacatctattttgtctaagtatagctactcccaattttttttttgttttcattggcatggaatgtctttttccatccctttattttcagtctgtatatatttttattggtgaaatatgtttcttgtaggcaacagataagtgggcattgttttttcatcccttcagccactgtgtgtgtttttattgtagagtttagtccatagtccatttacattgaatgttgttattgacaagtagggactgccttctgccgttttgttatttgttttctaattgttttgtgatctcattctttaattccttctgtctttcttttagtgaagatgattttctttggtggtatgttaatttcttcttagtttttgtgtctccatttgtatcctttttggtaaaaggttaccatgatgaggcttgcaaataccttcttatagcccattattttaaactaatgacagcttagtactgatggcatgaacaagcacacatgcaaaagaaaactaataaaaactctacactttaactttatctcccctgctttttaacttttagttgtttctctttatgtcttattgtactgtctttgtcttaaaaagttgctgtagttattattttcgattggttcataatttagactctctacttaagataagagtagtttacacaacaccattacagtgttacaatagtctctgtttttctgcgtgcttactattaccagtgagttttgtaacatcagatgatttcttcttgctcacgaacatccttttatttcagattgaagaactcactttactatttcttgtaggacaggtctagtgttgttgaaatccttcagcttttgtttgtctaaggtttttatttctcttcatacttgaaggatagtttcatcgtatgtactattctagggtaaagtttttttgttgtttttctttttttttttccctgcagcacttgaaatatgtcatgccactctctcgtgacctgtaacatttccagatatattggaggtccattgtatgttgtttcttttctcttgctgcttttaggatcttttctttatccttgacctttaggagtttgattatgaaatatcttaaatgtcttctttgggttaaatctgcttggtggtctctaaccttcttgtacttgaatattgatctttctctaagttttgtaagttctctgatattatccctttgaataaactttctaccactatctctttgtcttaaatttgccctttcgaggctattttttaggttttataggcatgcttcattcttctttattctcatttttcttttatctccttcccctgactctgtgttttcaaatagcttgccttcaagtttactaattctttcttttacttggtcagctctactaatatgagactgatgtatttgtcagtatgccaattgaatttttaaactccagaatttctgtttcattcttcttaattatttaaatctctctgttaaatttatctgataaaattctgaattccttctcttattttgaatttcttttgagctcccctaccacagcaattttgaattctctgtttgaaagttcacatatctcttgtttctccacgcttggtctctgatgccttattttagttcatttggtggggtcattttttcctggatgatcttgatgcttttagatgttcgtcaatatctggacattgaagagttaggtatttgttttagtctttgcagtctgggcttgtttgtgtgtgtcctccttgaggaggcttcccaggcattccaagggaattggaccttaagcccaataacacttcgtttcttgcagacttgtagaggtactgccttggtggtcttggataagatctggaagaattctccagattaccaggcaaagactcttgttcttttaccttactttctcccaaacaaacagagtctctctctatatactgagcagcctggaactggggatgtggtgatattagcatccctgtggctaccaccactggaactgcactggattagtcctgatgtcaacacaacactgggtttctctcaagcccactgcagtcgctacctgcttacctgtgttcactcaaggccctaggacttcataatcagtaggtgacaaagccagccaggtttctgtccttcccttcagagcagtaagttcccccagaccctgagcaggtccagagatgctatctgtgagccagggattagagtcaaaaaccttagaattttacctgatgttctattctaatgtgactaacctggcactcaaaccacaatactgggtcctttctgctcttctctcccctttccacaggaaaaggagactctccttttggccaccaataccacggtcccatgggagttctaccacgctgctgccaatgttcacttagagcccaagggcacttctgtcattctgtgacgaatgttgccagacctggggctcacccttcaggacaatcagttcccctctggcccagagatggtccagaaatactgtccaagaggctcggcctggattcagggagcccaagagcctacttgttgctctacccactgtggctgagctgatacctaagatgcaagacaaagtcccctttactttcccctctgcttttctcaaacaaaaggagtcttttgttgtagccaccacagctgcgaatgtgctgggtcatacctaaagtcagcacgtcccagagcccaaggcctgtggtgtactatctggatattgctgctggttattcagggcctgagggctctttagtcagcaagtaatgaatcctgccaggactggtttcttcccttcaaggcagtgggttcccttggcccacattttgtctattttgtcatccaggaatgggcctggaatggaggtctcacaactctgcccagtgccctgttctattgtgactgagctggtatctaagatgcaagacaaagtcttgtttactctcttcctcaagtagaaggaaggagtcacttttgttgctgcgagccgcactgcctgggattgagggagaaatggtgtaaggcctcccttagctgccctggctgttgtctccctgtgtcacatgccaccatagtccagtggctctaagcccagcctaatactaggagttgcctaggaattgcaggccttgtgtccaagactgcctttcaagtttacctaggaccccagagcactggctttacggtggcaaggcttgccaagaaactccacttctgactgctggtttgggcagttgatctaaatgatctctccatgcatgggtgttggctgagcccagcacagctttgctctccactgtgacagagcagcactgaattcagtgtgaagtcccccagtcgctgctctctccctcctccaagtgtgcaagttagctcgccataccaggcagctgctgctgatagataggggaggggtggtgattcaagactatatctccgacacttttcagttcctcttttagccgtacacattaaaaccaggtactgtgattgctcacctgatttttggttctcgtgacggtgcttttctgtgtgcatatagttgttaaaatttggtgttcctgttgggggaggacagacagtataggcttctattctgccaccttgctgcactcacccagccgattcttttttaactgttaggttcggggtacatgtgtaggtttgttatataggtaaacttgtatcatgggggtttggtgtatagattatttcatcacccaggtactaagcctggtacccaatagttattttttctgatcctctccctcctgctacccttcacccactggtaggccccattgtctattgttcccctctttgtgtcccggtgctctcatcatttagctcctacttataagtgagaacaagcagtatttggttttctgttcctgcattgtttcctaaggatcatggcctcgagctccaaccatgttcatgcagaggacatgatctcactcttttttatggctgcatagtattccatggtgtatatgtgccacattttctttatccagttttccattgatgggcatttaagttgattccatgtctttaccattgcagatagtgctgcagtgaacatttgtattcatgtgtctttatgatagaatgatttatattcctttgggtgtataccctgtaatgagattatagggttgaattgcagtcctttttttagcttgttgaggaatcaccacactgccttcccaatggttgaactaatttgcactcccactgtgtataagcattcccttttctccacaacctcatcagcgtgtgttattttttgacttcttagtagccattctgactggtgtgagatggtatcttactgtggctttgatttgcatttctctaatgatcagtgatgttgagctttttttcatgtgcttgttggcaatgtgtatgtcttcttttgagaagtgtctgtttgtgtcctttgcccacttcttaatggggttgtttttttcttgtaaatttaagttccttgtagttgctggatattagacctttgtctgatgcatagtttgcagatattttctcccattctgtaggttgtctgtttactctgttgatagtttcttttgctgtgcagacacgctttagtttaattagatttcatttgtcaatttttgcttttgttgcagttgcttttcacattttcatcatgaaatctctgccactttctgtgtccagaatggtattgcctaggttgtcttccagcgttttaatagttttggggtttatatttaagtctttaatccatcttcagtttatttctgtatatatgtaaggaaggggtccagtttcaatgtatgtatataattagtcagttatcccagcaccatttatcgaacagggagttctttccccattgtttgtttttgtcaggtttgtctaaggtcagatggttctaggtgtacacccttatttctaggctctgtattctgttccatcggtctatgtgtttattttttataccattaccatgctttggttactgtagccctgtagtatagtttgaagtcaagtagcttgatgcctccagcttttttctttttgcttagaattgccttggcgatttgggctcttttttggttccatatgaattttaaaagttttttctagttctatgaagaatgtgattggtggttcgatagggatagtattgaatctacaaattgctttgggcagtatggccattttagcaatgttgattcttcctagccatgttcatggaatgtttttccattcattcgtgtcaccactgatttctttcagcagtgttttgtatttctccttgtagagatctttcacctccctggttagctgtattcctaggtattgcattttgttttattttattttgttttgttttggtggcagttgtgaatgggattgcattcctgatttgcctctcggcttgattgttggtatataggaatgttagtgacttttgcacattgattttgtatcctgagactttgctaaaattgtttatcagcttaaggagcttttgggctgagacgatggggttttctagatataggatcatgtcatctgcaaacagggataatttgacttcctctcttcctatttggatgccctttatttccttctcttgcctgattgccctggccagaacttccagtaccgtgttgaataggaatggtgaaagagggcatccttgtcttgtgccagttttcaaggggattgcttctagcttttgcccattcagtatgatgtagacagcaggtttgtcatagatggctctcgttattttaatatatgttacttcaatacctaatttgttaggagtttttaatatgaaaagatgttgaattttactgaaagcctctgttgagataatcgtgttatttttgtttctagttctgtttatgtgatgaatcatgtttatttgtttgcacgtatgttgaaccaaccttgcatcctagggataaagccttcttgttcgtagtggattagctttttgatgtgctgctggattcagtttgctagtatgttgttgagggtttttgcattgctgttcatcaaggatattgacccttttttttgttgttgtgtctctgccagttttgggtcaggatgatgctagcctcatagaatgaattgaggaggagttcctacttctcatttttttggggaacagtgtctgtaagaatggtatcagctcttctttatagatctggtagaatttggctgtcaatccatctgatccatggcttttatggtgtgcaggctatttatttctgattccattttagagctcattgttggtctgttcagggattcagtttcttcctggttcagtcttgggaggatatatgtggccaggaattcatccacttctagatttttagtttgtgtgcatagaagtgtttataatcgtctctgatgtttatttctctggggtcagtggtaatatcccctttgtcatttctcattatgtttatttggatcttttctcgtttcttcattaatctagcctagtggtccatatattttattatttttttcaaaaaactggctcctcacttcattggtcttttgaatggtttttcatgtctcagtctcctttagctctgattctgattatttcttgtgttctactagctttggggttggtttgctctttcttctctagttcttttagttgtgatgttaggtgcaaacttgagatcttcctaacttttcaatatgggcatttagcgctcaaaattttcctgttaacactgccttagctgtgtcccagagattctggtatgttatcattgttctcattagtttcaaagaacttactgatttctgccttaatttcattatttgcccaaaagttattcaggagcaggatgcttaatttcaatgtaaatgaatggttttgtgcaattttctttgtattgaattctgtttttattgtgctgtggtctgagagtgtggatggtatatgtattagaccattcttacattgctgtaaagaaatacctgacacggagtaatttataaagaaaagaggtttaattggctcatggttccacaggctgtaaggaagcatagtgctggcatctactcagcttctgggaaggcctcaggaaactttcaattatggcagaagggggagcgaggcatctcacatggtgggagcaggaggaagagagaggggcaagatgccacacacttttaaacaaccagatctcacgagaactctgttacaggaacagaaccaaagggacggtgctaaaccattcatgaaggatctaccccaatgatccagttcccaacattggggactacagttgaacatgagatttgggtggggacacagatccaaaccatatcagtacaattttgatttttttgaatttgcggaaatttgttttgtgtctgattgtgtggttgattttagagtatgtgccatgtggcaatgagaagaatgtatactctgttgtattctggtggggagttctgtagatgtctatcagatccatttggtccagtgttgagttcaggtcttgaatatctttgttaattttttgcctggattatctgtctaatactgtcaatggggtgttgaagtctcccacgttaccctatgggagtctaaatctctttgaagatctcttaagaacttgctttatgaatctggatgtttctgtgtttagtgcatatatatttaggatagctaggttgccttgttgaattgagtcctttactatttgtaatgcccttctttgtcttttttatctttgttggtttaaagtctattttgtctgaaattagaattgcaatccctgcttttttctgtttttcattgcttggtagcctttttccatccctttattttgagcctatgtgtgtcattgcatgagatgggtgagtgcctgcaggcaaggcggcatgaaggaggctgcagtgggggaagaatgctggtgcgtgtccactggggtcactctgctagagcactctgctagtcaggcagtctgccagtgcaggagctaccgtatgggcccgtacctgggagcttcactccaagcaggtgtggctaggctcgggctctgggagaagccagcagaccaaagggtggaccagattggccccatctcatgggcaagaccaccctgcagagttgaggtcccacagttcccctagggataaagtctcctatgggagcaagtctagcctaaggggatgggcatccttggccatgctccgctatagacactcccataccaaactctctgggctctgccccagctggagttctgcttccactgcttccctaagcagctttccctgacaactcaaatgtccatggtggtccaggggttccttcctaccaggattccagcggcctgtggggagagcgaattttgttccttgccttttcaacttccccctctgcaggagttgttgggggccaggaacaagttgtggtgcttggtagccccgagcagggtccccagcttcctcccccttcagccccagctctgtgttttccctccatctgctctcgatgccctccctctgaagatctgctaggagtgtgccagtcttcctggtgtcccagtccctcagtgggagatgttcctcctggctgtatctagttggccatcttggagcagaaatttctagttttgatttttaataaaaatgtatggaatctgttattgtgtctgcttttgtacatattagaaatttttaagtgaaaatttttctagctcataaatttaaatgtataaaggaaatatacagaaatagtagtttcggaattacaaatgattttccatttctctgaaagtcaaaaaagttacacactattttttgagaaaatgttatatgacaggtgcatgttaccatagaaacgaaagatggaaagaaccaaatcacctgagatataggggtagtttagatagaaatggagagaggggaatgtgtccccagaaggagaaaggaggaaattgatgacagttctcctgttcagcagttttacaaggacccattttaataaggtacacacatatatatacaatatgcgctggtgaatttgagtaagtatatgagcttgctacgtgaaagctaaataaagcttttttctgtagatgatgagtctttaagaatgattgttgttcttttccatattataagcaacttatacagtcttatccacgcagaacattctcaaatattaatgatttatcaaaatccagtgaatttcacatgatagttgaaacctagcaatatcttttaagtagaaaatgttctttattcacaacagttttgctccagattaaatatttcttcaaggcagtttgatttatattctctgcagtgctatgaagggaaatcctccaaagatatcctgaaaagagtagctgcaaatgcattgatgtcactgctggctgtcagtagaagagcacagaaacatgctttgaaaggtgagccacatgacacatcagctgttttgatggcattatcaattcatatgttttgttgcttgttcaagttaattttctttggactcaaaatgtaaaaaacgtatagtataatctcagtgtcactaaaaataattttttttcccatacagaagcagtaaatatgcattacttttcaaataaaaagattagacatagtttgtttttgtttgtttaatatgtgatggttcttgctctaaagaacctatatgtaaatattagggaagctaaaaggtaacacattgagtttcattataattaaatattactatccagaagcactcactgcatacctgaacaaaacccacatagttttgatggtaaaaacagcaacagatgattccatattttcgtataaatttccctcttgagtgttgtaatttctcatttgggaatcggagaatgtagatctgagaattaaaagagaataatggcaacatcaagtccattaatatcaattgtgatttgcgactacaacaaatgatgtattcctcaagttgtaaattggatttgggtagtatcttactaaaaactgaaaacaagtggacttcagcattttagttctcttacttatcccccctctgattcattaatctctgactgaaaattctaaaatgaagtgggtcagaaatagaaaatgttacctttttgagaatctgattggtatatgtggttataacttacttggaaatagaatatccttttgactactgcagattttgtctttcagccaatcttatagacaattgcatggagcagatgaaacacataaatgcacaactgaacctagattctctgaggcctgggaaagcagcattgaaaaaaaaggtaacattctgggataaatgaatggctatatatagagaccattctccagtcctcttgtgcctagaaatgagcacgagcttgaaatgagtgtctcatttagaagaaaggtacagatggataaattaatgagacttctacattagcagattgttggctttttttggtcttaattcttacttgaagatctttagacaacatctgtctattatgtactgttgttattataaacattggaaatatccacatatacatgatactatgccagataaattttttatactacaaaaagaaaatctttatctcaaaacaagcataggttaactaggaatgagatctgtaacaactataatttattaagagttttctatatgtcagccactattgaaacatttcatatttattatctcatgaacaaacactcattacagcatagtcacacaactggtaattgatggagctaatatttgccccaaatctgggtggttgcagagctggtattcctcatctctgtttatctcctcctgtgccttctgaatatctcctctagcattgaatctgctggactcatgtttaaactgcatgctcaggtaaactgaaaataacatagttatataataactactgtggttaacaagatctgccacccacttattcaacaaatgaaagtgtgtgaatagtataaatatataaatatacatatatgtgtgtaggtaaggccgttatagcagcactctatgtaataactagtttctactgcatttaagaaaccaagacaaagtcttatttaataatgtaattgatgcaggagattgattgtatgtttatcagttctttttttttttttttttgcctcttttcctccctagccaaaggcccttcatcattgagaaagtcagccaacacctgatattattgaaaatctctcagtatctgcctcactttattgagatgaaacatggaggctatcatatatccgagttcctccatgcttgatagaacagaaatagctttttcatggtgaatgtgcttcttgagatatggtcatctttcagagatcgttagcctgtcagttccctcaaagttacagtggttgggcatgattagagcacacctgcattgtcccgtgacccaaaggggagggaattactatacacaaaaagtgaagtatgctgttgcattcacagttttcaactgctttttgtttaaataggaggatggtgttattaaagagttaagcattgccatgcagctcctaagaaactgtctttatcaaaatgaggaatgtaaagtaagtagaactacttttcaaaattttaataggagtactggtattaagcagtttaatttttatgtgagataatgtagtaggaaaaatggaaagctctgacttttaaatttttagacacacagttgattggtccttaaactcagtgttaattgtcagaaatgtgtgtatctaatcattattcatcgacactgattacatttcttcgcaaacttcagcctcattctgtactcttaggtattttaaatgttttacatatggaatgaatggctggatgtgttttataaggtagattctttcaaaacgggttgtcaaaacaactcttcaaggaaataagtgaagctatctgtatctataaggaaagaaaatgaagagtttcctgcttcaaaggagaagatagttagagctgctacctagtgtggccacatccaccgagaggaagtttcttctagctctgctgactccctgtgaccatttacatggcccttctgtctaaaaatcactgagatgttttgcttcgtctgtaagcactgatgatgttttaaaccattgtatcagtactactatagaggatataatcttgtgaacactctgatttgctttgtctatagttttacaacacttttgaaatactagattgatgctttaatgcagaaatactagattattctttataaaagctggccacgaaaataaaaattttaaaaaatactaaattaaagctttaatatagaaagcaaagataaattatggaagcttttattgccttataaatttttacctgttttgctcttacttgtggtaagagcacaactggaaaaaccataccacatctggaaaatggacatgttgaacacacttactccttaagcgatgttaaaaagccagatacatgactcacaatttatatttcaaagtagtttgatggaaattaagtatttatttatacaatttattaaaattccctatatatgaatttatatgaactttttctcaagacaaaagtgccattaataaacttaatgattccttcatgcttatgatattatgcttgtgactggatgtacagtcagtatttgtgtgtaaatttaaatatataaatttcatgtgtatgtgcagttaatattcattcatgacaccttattcagggaaatactctggaatactttacatgtgggatctacctataaagatttatgaagtgctaacctggctactagttataaatattgtgctcaatttgtatcacattagccatttacaaaagtgtgatatctcaataagtcaaagcatttctgtatttctaagttgtttaataagaagtaaatccaaagaatattaagattatccttgagtataaatataatattatggaggtagggattgttaatttcaatttcagcttttatcaggtgtatggcatgttctcattattaatagttggccactattgggtaattcaccaggtcacccactgccaccccaccctgctgtttgcatatgcataacattaggggttttcatactggaaggagcatggtggctgtgaggtaaatgaattaaacagtggacaaggttagacggaggggactgtcatagtccagacaagagatgatgacaccttaacttgagcaggtagaaaggagaaggagggtagggagtaaatttgaggcattgagaagaggaggaatgtagaatgacttccaaactccagtttaagccactgcattatcatgcattaagagtgcatgatagagcagagcacaggtgtgagagacccgatattcatgcttgcacgtgctagcctcaagagtctttggggcatccaggtgaaaaatggcttgtggcctgtagattttatgggtctgggactctaaggagtgatacaagctggggatattaggagttatcaatgtgtagatggtgtttgtggtcctcactattgttgaaatttcccaagaaagtatgtaatgaaaaccaaggtcatatctttggaaaacaggaacatttaagagggggcagaaaacaactgagaagggaatactggagaaggaatttggagattgcattaggccgttcttgccttgctatgaagaaatatctgagactaggtaatttattaaagaaaagaggtttaattggctcacagttctgcagggtatagaggaagcacagtggcgtctgcttctggggaggcctcaggaaacttccaatcatgacaagaaggcaaaaggggaacaggcacatcacattactagaactggagcaagagtgagagagctggcgaggaggtaccacacacttttaaatgaccagatctcatgagatcactcactgtcttgaggaaagcaccaagccatgaggaatccgcccccaagatataaacacctcccaccaggcctcacctctagcactggggattacaattcaacatgagatttgggcagggacaaatatccagactcttatcagaaatgatccaggatagagcagcagcggggaaattaagagacatatagcaaatgccaccgtgcttaagcgttgttggcaaccacaaaagtagaagcggcctcaatagaatcatcagggcagaaaataaacggtaatgagctaaagattaaatgtgaggcagggaaattacagcaataataatgtagaagtttggtcatgaatagtggcattaataatttaggacatataagatgaaaggaaatgagtatgtttgtttctcttaacacgtaaactacttgaatacaggcacagaaatgagcaaattggggacgagttgtttaagagatagcaagaggagaactaactggtggattaagatccctgaggaggcaggaagagctgtgtttcagaacacagatggatgtatcaatctctggcaggcaagaagtggaacacctctttgtcactaccgggcagacaggaaggatgaatggatgaaaatacagataaactatgtggacagaatggcagagtagataaaggagtttgtacttaatcgtttctgtcttctctgtgaaatagtaaacaaggtcatctgctgcagatggagggccgtgtgccacagagagtggtgaacaagggaagaactttagggagagcactgggaatgacttcagtgcttacggagagtgttgaacattgggaatcacttctcttctgccacttgatgctatgtgaaatcgtatagggtgtgtgtatttatgtgcatgctcacgtgcataatcatgggtctacaaattacctcggaattcttgttcatttaaaatagatattgctgcacttaaacagctatattttatctgcaatattgtcccagggtaactgatctttgtaataaagactctgagttacttcagaatttttcaatttatcataatatttagactgaattttatatattcaaattactcaaaaactgtaatttactttgagtatatacacacatacacagagagagagaaggagagggagagagggtgggcaaagaggactcagagttgatcagaatgtttacttaaccagaaattctcacttcttggccagttcatagcatttacaggaatttattcagtgttgtgagatatcactttgctgtttaatttacatgttacacaggctattttctatgcttcctaacttagtggtacatcttaaccaccctggtgttgaagcgacgtcctgagattggtcaggctcgtggtcagggcagccatgtgtggagcccaatggggctggggcaggatgctgaagccatccacagggttctccttgggtcttatgttgatggctttctgttgttgttttgattttaatgttatattttcatatattcagactaatgctgtctttttcccttccttcaacaggaagcagctcttgaagctcaccttgtccctgtcttgcactctctctggccttggattttgatggatgattcattgatgcaaatttctctgcagctcctttgtgtctatactgcaaattttccaaatggtaataggatccaatactgcctttcaataatataccaaaatactagttttataaatgttgttaaggtggactggaaaaactaatacatattttgaagtatttctctgatttattgaggatatgatgggcaaaggcaagctttctcgtaggtattatgagagcagacagatattttagtgtgtttgttgacatgagagagtcattggcagcgcagggaatagagagggaggactggtctgattatctggcaatgggaaattgagtttagtaggaaaattgagaggataaaaattatgatgtaagacctcaaaagccacgtgaaggttagaacttctcatagattctagagcaggagactggcatgttgaaagttctcataacagttggtctggtgatacttgatatcactagggctcctctttcgctcatgcacttgatagacactttatcaagagcctgtggtgggccatgcattgtgagttctggtgagagtgatctgaaatgagataggaggacaggtcatgtagggcctcagaggccagagtagggagtttggatttttatgtgagtgtaacaggatgacattggcagttgtaagctggtgagtggcatgatttaatttgtgtttaagaaggattaggctgggtgcagtggctcatgcctgtaatgccagcactttgggagacccaggcaggcggatcacttgaagtctggagtttgagactagcctggcaaacatgaggaaaccctgtctctactaaaaacacaaaaattagccaggcatgatggtgcatgcctgtagttccagctactcaggaggctgaagcaggagaatcacttgaacccaggaagcggaggttacagtgagccgagatcacgccactatactccagcctgggcaacagagtgagactctgtctcacaaagaaaagaaaagaaaaattgccctgggtggtatgtggagaatgaatgattgggagcaagtctagaagcagggagacttgtcatggagatataatggtggcttgggcttgagtggtagctggagagattgagagaagtagacagattcagtatatagctcaaaggtagagtcaaggatacctgttgtgggaggtaggaaggaaaaaaaggtgtccggggtgaacttcatttggagaaatgagcctgagtgcacagtagtgccatttactaaaatggggaagatttaaaagaagcagacttgaagtgagaaagtagtaggaatcaagagttctgtttggtcttgttaagtctaaggtgttgatgttcactcaagtgaaaatagtaagctggagttgaattcaatggagtgtagagataagtttgaagatttcaaatgttgggaatattattagttatttattgctacaaaagaaattactctaaaatttagcatctgcaaacattaatcatttcattatgccacggcttctgtggctcaggaatctgggcgtggctaatctgggtggtcctcgctcagagtctctgcaatcatctgaagtcttgactgggatagaggatccagtgtgactatgggagcctcaattccttgctacttagggctgtctcaaacgacccagaatgagtgggctgagggcagaagttatagtctcttataatccagtctcagaagtaactgaacagcactcctagctcttgtgggtcacacataccaaccctggtacagaggcaggcgccactgggaccatcttggaggctggctaccacaggagtcattgtcatgtagattgtacttaaagccacgtggctgtttgcgattacccagggagaatgtgtagatggagaagcagaaacccatgaccaagttctgaggcacatcaacatttggagttaatcaaaagatgagaaaccagcagaaaaaaaagagaaggagcagccaatgagataacagtgcacagtcacagaaagtcagagaagggcatgctcagttgtgtggaatgctattgaaaattctgctaaagtgaggatagaaaaaatggctgttggacttagcagtattgatgttcttttggaccttgagggtaattttagtgcagtgccagaacagaaacctacttagtgtgagctgaggagagaagatgaagaagtagaggagacagcttttccaaaatgtactactcttaagaggacaaagaaatggagcaacagcaagagacagatgtggagtcaaaggaggagtttttgctcgtttttaaagatgtatgtttttaaggcatgtttattaacttaagggattgggagaatgaggtgcaggaaagagtgcaggtaagagcccagcctgagagggtaagagaggtgagagctagagcacagctgacaacagaagcggagggaaggctgagaggaaggatgtggatttaggagggctggtagacttgatgggaatgatgagaaaattcccattttgaatacttctgctttcttcatttaggagagaacactgaccactaagaatgagcaaagacaaggagtagaggtgatgtgagaagaggagaaagtgtgaagtagctgtttttagaggaaggaaagtaaacacaccagagaagcaaagtaggattgctggcagtgttaagtaccacttatggtcataaatttaagaaaataaattagaatttatggtcataatttatggtcataaatttaagatttaaattttattaaatttatggtcataaatttaagatttgactagcaagtttttgtactttcttctaacaacactcagtagcccagcaactggggtctctgaatatcaaaggttatacagagaagggactggaactcacaacagttaaggagcccatctagttactgccagatgctgttgatggcttattcctttgaataatctgccagatgctgatgatggcttattcctttgaataatctgacacctctggagctgtccatttcgatacccaactcaggttgtctccagtcagcacaaagagatataaacagaccttcaagctcttgaacttgaactgtcattgaagcatatgtgtacaggattgtccttgccttcattctgtgctgttaactttctccattccttaggtctggtgggaatgtctcctttcagtgcattttccagctccactagtatatcttttgtttgtttactcatcttttatgagtttcttttacagaatgtatttgattctgatcagtttatacttaagttggcctcctcgtatgaactttcacaagtcaattataccttaggtttatgtataatacagtcttattgatttaacattaaaatatatttctaatttttttttctccctcaataagtctcattcagttacttaatttcctgagaaacactgaaccctggaaagcctgtagatgccacttttggctcctgctatgctaagctgtatgaccttgaacaacaaactggcttttctgagctccatatctttgttgaccaaatatagaaaatagtatttgttttgtccgctttcccagggatattatgttccttatttgtatgttatgtaaaatgaaggcattagacaagttatctcccatttctaaaattctgttcctttacacaggcctttatttagatgttttctttagcaactattaaaaaccctagtatgtttattttattctttttttaaaaataaacctggtgtcttaaagtgctttagtgagataattaggccctcagtgaggacagtatatctattaggttgactgtagacaccaacattagcctccattgctaatttgcagttcacaggttaatggcctagtcattttgttagacagatatgctttgccacttagtgtcttcaaaaactaaacagggaaactgagaagacattgtgataggctgttatttttgaaggttgcagttctctttgttggtcaagttgtggacaacaccctgttcaagctacacatagaggagccgtgagcaactctctgatgctgtgtatcctaaagttggcttcccagatgccactggagaacaccacggttcagcagatggtttttatgcttctttcaaacctggccttgtcgcatgactgtaaaggagtaattcagaaggtacgcacttaaactccccacatatcttaaaagggtactcagtgaaataatctttccaatcaaaagtttacaactcaatttctaagattattatgattttgaggcattttattttaaaggattataaaagggttaagaggttcactttgtttaaagccagttgatagatgacacgtgcagaaggacaggagctagagtagagtcataccatttccttctcatttatcttcttagctttcggattgtattttatcattctcaaagatgagggttttagaaagatagccgtcttacatttattggaaataataaaagtaatatattggtctttaaacagaccaaattgggcagtaacaatttcagtttaatttcattgacaaaatggtttatgaaatcacagcccacttcccccagttagacttaacttccttatggcatgttaagcaattttatgagttctctaggattccagttcccaatctagacttctcatcactgattttaacttaaggtaatttaaaagggatgtaatgagttaaataaattctagtacacatgtgcacttatattctgtatttagatgtgtataaacagaatccctaattgggaaaatcccttcaaatttgaatgtaatcagattatatactacttactagtattgtaatttgagtgtttccatttcttttacttgaaggccaagataaattgcagaagttgagagcatttataagaattgagtctccttttcctctactgtttcttctccctgaactcctcagaagatactttgttatcaccacataaatagaaagttcggtctttctaaggaaatggaaagatcaatcttaccaaggaaagatgttttcagtggcacgttggagccagcctcctactgactcatgagtgtcatcttaaatttgcaggaattttataaaaattccagttgatgttacattgttattttgaaatcagccacagtgggcatatcacaccacgtaattcagcgaactgtacaaatcttggatcttttctaccctcaccacaatcagttgtttatttaccagcacatggctggatattttcttcatgtatatgttcatgtatgtcatatatgtatatatatttgaatatattttcttcatatatgtattcatatacatgcatcacttccaaaatgagacattctcttgaactggatatatgtgattagcatccataagaatgagagattctgcatatgtgagagcagagcgggggcagtgctttccaccacttccttatagagcatgttggtgggaagctaagtgggagcacccagaaggaatgtaagtgccaatctcgagtctggtctgtgactttgagctggagacctattctctttcagcttcatttgggtttaacaaaataatctctaagatatgttcaactcttaatctgttattctggtgctatacttaagaatattttgatgaagtgtgatcagactctctttccagggacggattaatcaagtctttttcctctgctctaattaggaaatgcctgagacttcctctgctgcattaagtaataatgagcccagacacttaacacttctacttcttcattactcatctgtaggacatagaaaatgcagcaggtggtattgtacaactcaggctccgaaatatcctgcttgtttgtttttttttctaccatggtatacatctctacatattctacctggtgtaggaaattgtctgaaaacatctttagaagcagcaaaaaaaaaaaaaaaaaaaaaaaaaaggagtgcccacagcacatttatatttgagagcactgacatctgctttatcacccttgtcagtcccaaatccagcaagggttgaatctaaaaactgtcagtttggctgacagtaggtgtgagtgacagcacatgcagctgaaagtgggcatgtaattttacagtttacttattgtgtgggtaatgttgataatatttctgtagctcatttcattcttaacactcagagtccttttgtataaaaacgttaagtttattttatagattaaagccaacatcttgattttggtctaggaaaacctaagagataaactggagtagatttaaacagagagagagaagagttattctgtgcaatcataaaagttaagtgattgcatttcatttctaaaatgtccacctaactgtggtttccatgctgccatgggctgcagcttgatgcagcacttttatactttgcatatagattagtctaagcaataatttattatctttcttatagtgaagggtttggtggggttttttggaaggggctttatttggaggttgaaaagactcttacagttcaaataatagagctttctcatctgtaagcataatagaatgacgtgtagccatcagaaattcttacttgtaatgataagtacctgggataaagtgaatgtaagatgtatctatagatttgataaaaacaacaacaacacctgtagctataatgattcaaaataccctcactacttccagagttgttaactagtattcaagactgatttggatttttgccttttttccttccatagggtagcttttaatagcaaaatcaccagaaggcagagagaagagaaaactcaagagccctgaaataatctccaaacttaattaccaattctaaataattaagagttaactatagtatacttcatccatcatgaggaaataattagcaggaattaaaacttgagcactattttgttcttcttacctttttcacttatgcttggaaataatatagatggaatattcagaagctattagaaaggagaaattaatgtagagggagagtatatcagaatgttagttaattggtcaccaagggactaggaaaataatgaaaaagatgagaagaaaataatattctctctatttatccacagagtaacttcttacagaacttcctctctctagcattgccaaaaggaggaaataaacatctaagtaatctgactattctttggttgaagttactcctgaatatatcatctggagaagatgggcaacaaatgattctgaggcttgatggctgtctagacttactaacagagatgagcaaatacaagcacaagagcagccctttattgcctcttcttatctttcataatgtttgcttcagtcctgcaaataaacccaagatcctggctaatggtaagttttcacacacacatacatttatatatgtagttattcatagactgttcaggtcaacaccaaataattttataaataattttctaggcatttattaagcacccactgtgttcaaagcactgtggaaggcatgggaatgaatcaggcatggcttcagccttccgtgggcttccaggagtctcctgaggttagcaaatcatgtcattccagtgcacatactggacacctggaggaaggggagccgtggacgagggctccctggccttaccttctgctccctctcctctctccttgctcttcctctaactccagctcccctcttctgcatcttcaagcaaatgctactatgtcaatgaagcctctcgggaaccatgtgttaatataatagccccgcacccagggggccttctctttcctcctcctcactatttcctttcctggttttgtttccctccgtagtattatcgccatctgatagattatgtgtttcatgtatctgtctattcctagtcttcccacactagaaggtaagctcttatggggtcaggaggcttttgtctgctttgtttatgtgtagcacctagaattgtgcctgcaactagcgagcactcaataaatatttgatgattgagagagatcccaagcagaccggagagagttcagggcttgagatcagatggtgcagtgagcctcgcagagacttcattctctgagatgtaggacagatggaggcgaggattggtaaggattcagaaaaaaattgaagcaaaaagaatcggaaagatctttttctgcaaccatgtgttatctctgtgaggagtatgtgaatttcgtggggagtgagttttataaaagacatgtgttctagtgaaaaacagaaggtgggctccagacccctacacacctggtcttgaatgccagcactagggcatcactccagcgtcgcctggtgcagcctcgctgggcccagcttcttcatctataaaagaagcccactcttcttggtttggtaagaatcagtttataaacacacataaagtgcctagcgctatttctggtacatgataaatgtttaagatagattcattctcttgtttttttcatgtttttcacttaaacttttctcagaagcatttttctgtgaaatcaagggttttctaagtgtacgaaaatgattcttcttatattttgtggtgtatatagttgtgattctatttttctgataagcattctgataatcaactgctagatatgatatagaaggatgtttaaagttcagttagcttgtagcagacctaaccttactgtggattttgcactctgccttccggtggctgctgtgctgatgctgcgttctctgttgctgcgtgatgtacatcactggttttatttccatcctctcccactgtagctgcttcagccctcacatttgtaaaatgagggtgatgataatccctcctcagggcaatgagagagcctgtgaagtgtttgtgaccattcttggtatatagcagctactcagtaacatctgttattgtttattcacctttcttagaatgattttttttttctttgagggctacttactccagtttattattgagagttggaaaaaggtcaagctttttgagaagtgaaggagagaagtctgcattttccacttctagacccctctagaattatttttagcatttctttgtagtcagcaatgctttttctccttcattagcttaaagcagatggataaactttggtgagaagcttcccctagcccacagactagagatcagtgggcttttcaggcaggggtaagataagagacatcagctgtgcagtttctgtgtggaactataaagggatgtcacagcctatgcctcgctttccacttggggatttatggaggaggccttagcagagtcagccagcttaaaagtctcccaggaaaggctgcctctgatcggtagcacccacacatctggtttaaatggtcaggagtggagtgtgcagtggagcttgaccttgctggtaaaaatagatctggggcttggcatggtggctcacaactgtaatcccagtactttgggagaccgtggtgggtggatcatttgaggtcaagagtttgagatcagtctggccaacatggtgaaaccccgcctctactaaaaatacaaaaattagccaggcatggtggcgggcaccttgtagtccccagtagtagaattgcttgaactggggagacggaggttgcagtgagccaagatcgcgccactgcactccagcctgggcaacagagtgagacttcatctccaaaaaaaaaaaaagatctggaacattccttgtttctggcaatgccagactaagtctcttctgaaaacgacaataacatgctagacaggctgtattaaaatgcacctcaaaataatcacaaaaactgaaaagatagaaactcccagtccagttttgattgaaagtcttgcccagacaagtaagaagtatatagaaaattattttgccccaagtgcatttgccaaggttgtatgcttggcttttgttgaggagtatcgaggggtgagaggacagaagccgcgattccccaaagtggggattcttactggctatcctgcttgtattaagctggacctccaaagaaccattctcttaatagatggatgggtcaaaaataagttggtttcccaaacttcatgaaggagactgtaaagaaaaggaaaaaaaaaatgtgagaatgggtactacagactgcttctgatagggctctgcacccaaagttggccgtgaacttggcttgaggtgtcttcgattgatggtgcctgtgggtacttagcagaaagcaaactgccttggtgatggatgaaagacaagttcatactgggcctcagggaacctctacaaataatttttcaaaagcattaaccagtacaaagttagagataatcaagcacattaggagacatggcaacatgtagtaagaaacagcagaagaataaaaataccagcttatctgcccagactttgaatatgggaattacaaagcatgggtttaaaaataactttaattataccatatttagataaataaatgacaagcttgaaaattttaggaaatgggaaactgacaagttgaaatatttgaaaagaaccaaacagaacttcaagaactttactgtgcagtatgataatcagccacatgtagctatttaaatttaaactaattaaaattattcagttgtactcactacatgtggctagtggctatcttattaaatagcaagatataaatatttccattattgtaggaagttctgttttacaacagtaatctagaacttcagtggccaaaattgaaaacttaatatacatgtctgacagcaagttaggtatagcagagaacttaggaattagaagatagattagaaaaatattatccagaatgcagcagagaaagctaaaaagatgagaaaggatcaaaagaatcaaaggtaagtgacacagcagatatatcaagacagtctttgtgtttaatgaagtgtcctaggagaatgggagaggaaatatttgaagaaatgatgggtaaaaactttaagaacttttctaagacattaatgtcaccataactgacaactcactgtaattaccaaactgacatccctaaacttatacttaaaccaattgtattaagaaggtaatattcaattattatattaaggtaacattcaattattatattaaggtaatattcagttcaaatattcaaaaatactgtctcattatttacattttactactgtatattcactttaggttatttaaatgtttatatgagagttcagacctacttgttgaactcaaaattgttttattgctttgttatatgcatgtttcacaataacatttgttttgttaaaaaagtcgatccacttgcattatcagaggggcccaccacattaattcacacacacacacacacacacagacacacacacacacacacatatgtatatatacatacacacacagtactttattaaaaatgctttaagggatagctggttgaaggagttataaacttacttagatcagaggagttatatattctgagtgtttgagacaacatttaaaaacatcacttgatgctactcagatggaacataaggaagtcaccctcccatttaataaggggacatttgatgtgccctaatgagtagcacttgcagccataacctcacgtgataaattgcatctgcaagctatgtacatggcttggttctgggtaggttatgatacacgacaaccaaagggcatcagatagtgcagatgaggtgttcagggagtcggctgcagcgtgcccgaaacatcactgcacctgcctttcacattgtcctgatgcacatttccagttcactttagggagcagctttttttgttttgtttttgttaaatatttaaaatcccttaaaataaaaaaattgaattatgtagacaaaatttttgtttattctattctggaatctttcacacaacgaatatttattgagctcctaaaatacactagcattgtggttggtctaataccagtgagtagacactgccatctaactaataccagtgagcagacgttgccctgtaactaataccagtgagcagacactgccttctaaccagtaccagtgagcagacgctgccctgtaactaataccagtgagcagacgctgccctctaaccagtaccagtgagcagacactgtgctgtaactaataccagtgagcagatgctgccctctaaccaataccagtgagcagacgctgccctctaaccaataccagtgagcagacgctgccctctatctaacaccagtgagcagacgctgccctgtaaccaataccagtgagcagacactgccctgtaaccaataccagtgagcagatgctgccctgtaaccaataccagtgagcagacgctgccctctaaccaataccaggagcagacgctgccctctatctaacaccagtgagcagacgctgccctctaaccaataccagtgagcagacactgccttctaaccagtaccagtgagcagacgctgccctgtaactaataccagtgagcagatgctgccctctaaccagtaccagtgaacagacactgtgctgtaactaataccagtgagcagatgctgccctctaaccaataccagtgagcagaccctgccctctaaccaataccagtgagcagacgctgccctctgtctaacaccagtgagcagacgctgccctgtaaccaataccagtgagcagatgctgccctgtaaccaataccagtgagcagacgctgccctgtaaccaataccagtgagcagacgctgccctgtaaccaataccagtgagcagacgctgccctctaaccaataccagtgagcagacgctgccctgtaaccaataccagtgagcagacgctgccttctaaccaataccaggagcagacgctaccctctatctaacaccagtgagcagacgctgccctctaaccaataccagtgagcagacactgccctctaaccagtaccagtgagcagatgctacactcacagaccctgccttgaaccttttcctattttagtacccttatttatttatcttgcctgattgccctggccagaagttccaatactgtgttgaacaggagtggtaagaaatggcatccttgtcttgtgccagttttcaaagggaatgtttccagcttttgcccattcagtgtgatattggctgtgggtttgtcataaatagctcttattattttgagatatgttgcatcaatacctagtttattgagagtttttagcatgaaagggtgttgaatttttttgaaggcctttctgcatctgttgagataatcatgtggtttttgtcgttggctctgtttatgtgatagattacttttattgatttgtgtatgttgaaccagccttgcatcccagggatgaaacggacttgatcttggtgaataagctttttgacgtgctgctggattcagtttgccagtattttattgaggatttttgcatcgatgttcatcggggatattggcctgaaatttcctttttttgtgtgtgtctctgccaggtttttgtatcaggatgatgctggcctcataaaatgagttagagaggattccctctttttctattgattggaatagtttcagaaggaatggtaccagctccactttgtatgcctggtagaattcggctgtgaattcatctggtcccgggctttttttggttggtaggctattaattactgcctcaatttcagaacttgttattgatctattcagggattcgacttcttcctagtttagtcttgggagggtgtatgtgtccaggaattcatccatttcttctagattttctagtttatttgcatagaggtgtttataatattctctgatggtagtttggatttctgtgggatcagtgctgatctcccctttatcattttttattgtgtctatttgattcttctctcttttcttctttattagtcaggctagtggtctatctattttgttaatcttttccaaaaaccagctccgggattcattgattttttgaagggtttttcgtgtctctctctccttcagttctgctctgatcttagttatttcttgtcttctgtaagcttttgaatttgtttgctgttgcttctctagttcttttaattgtgatgttagggtgttgattttagatctttccccctttcacctgtgagcattttgtgctataaatttccctctaaacactgctttagctgtgtcccagagattctggtatattgtgtctttgctctctttggtttcaaagaactaatttatttctgccttaattgtgttatttactcagtagtcattcaggagcaagttgttcagtttccatgtagttgtgtggttttgagtgagtttcttaatcctgagttctaatttgattgcattgtgctgtgagagactgtttgttatgatttcaggtctttggcatttgctgaggagtgttttacttccaagtatgtggtcagttttagaataagtgcgatgtggtgctgagaagaatgtatactctgttgatttggggtggagtgttctgtagatgtctgttaggtccacttggctcagagttgagttcaagtcctgaatatccttgttaattttctgtcttgttgatgtgtctaatattgacagtggggtgttgaagtctcccatgattattgtgtgcgagtctaagtctctttgtaggtctctaagaacttgctttatgaatctgggtgctcctgtattgggtgcatatatatttaggatagttagttctatttgttgcattgatccctttatcattatgtaatgcccttctttttcttttttgatctttgttggtttaaagtcttttttatcagaggctaagattgccacctctgctttttttttctcccctgcttgccatttgcttagtaaatcttcctccatccctttattttgagcctatgtgtgtctttgcacgagatgggtctcctgaatacagcacaccgatgggtcttgacgcttcatccaatttgccagtctgtgtcttttaattgtggcatttagcccgtttacatttaaggttaatattgttacatgtgaatttgatcctgtcattatgatgctagctggttgttttgcccattagttgatgcagtttcttcatagtgtcaatgttctttacaatttgatatgtttttgcagtggctggtacaggtttttcctttccatatttagtgcttccttcaggagctcttgtaaggtagggctgctggtgacaaaatctctcagcatttgcttttctgtaaaggattttatttatttttcacttatgaagcttagtatggctggatatgaatttctgggttgaaaattattttcttgggccatacgcagtggctctcacctgtaatcccagccttttgggaggccaaggtgggcggaccatgagatccagagtctgagaccagcctggcccatatggtaaaaccccgtctctaataaaaatacaaaaaaattagccaggtgtggtggtgcccacctgtcgtcccagctactcaggaggccgagacagaagaattgcttaaacctggtaggcggaggttgcagtgagccgagatctcaccactgcactccaaacctgggagacagagcaagactgcatccccctccccaacaaaaaaagaaaagataaattctttaagaatgttgaatattggcccccagtctcttttggcttataggatttctgcagagagatctgctgttagcctgatgggcttcccttggtgggtaacccgacctttctctctggctgcccttaacattttttccttcatttcaaccttggtgaatctgatgattatgtgtcttggggttgctcttctcgaggagtatctttgtggtgttctctgtatttcctgaatttgaatgttggcctgtcttgctaggttggggaagttctcttgcatttaatatcctgaagagtattttccaacttggttccatttttccccatcactctcaggtacaccagtcaaacataggttgcttcttttcacacagtcccatatttcttggatgctttgttcattccttttcttttttttttttctctaatcttgtcttcacgctttatttcgttaagttgatcttcaatctctgacatcctttcttctgcttgatcgatttcgctattgatacttgtgtatgcttcacgaagttctcatgctatgtttttcagctcccatcaggtcatttatgttcttctttaaactggttattctagttagcatttcctgtaaccttttatcaaggttcttagcttccttgcattgggttagaacatgcttctttagcttggaggagtttgttattacccaccttctgaagcctgcttctgtcacttcgtcaaactcattctccatccaattttgttcccttgctggtgaggagttgtgatcctttggaagagaagagttattctggttttgggaattttcatcctttttgcactgggttttcctcattttcgtggatttatctacctttggtttttgatgttggtgaccattggatggggtttttgtgtggatgtccttttggttgatgttgatgctattcctttctgtttgttagttttcttcctaacgggcctctctgctgcaggtctttgggagttggctggaggtccactcctgcccctgtttgcctgggtatcaccagcagaggctacagaagagcaaagattgctgcctgctccttcctctggaagcttcatcccagagggcaccccccagatgccagctagagctctcctgtatgatgtgtctgtcaacacctgttgggaggtgtctcccagtcaggaggcacgagcgtcagggacccacttgaggaggcagtctgtccgttagcagagctcgagcactgtgctgggaggtccactgctctcttcagagacagcaggcaggaacatttaagtctgctgaagctgcacccacagccgccctttcccccaggtgctctgtcccagggagatgggagttttatctataagcccctgactgggcctgctgcctttctttcagagatggcctgcccagagaggaggaatctagagaggcagtttgggtacaacgtctttgctgagctgtggtgggctctgcccagtttgaacttcccagtgccttcgtttgcactgtgaagggaaacaggctacttaagcctcattaatggtggacacccctctccccaccaagctcgagcatcccaggtcgacttcagactgctgtgcaggcagtgagaattttaagccagtggatcttagtttgctgggctccatgggtatgggatctgttgagctaggccacttggcaccctggcttcagccccctttccaggggactgaacaactctgtctcactggcattccaggcactactgaggtatgaaaaatctcctgcagctggctcggtgactgcccaaatggctgcccagctttgtgcttgaaaccctgggccctggtggtgtaggcacccaagggaatctcctggtctgtgggttgcaaagaccatgggaaaagcgtagtatctgggccggaatgcaccgttcctcagggcacagtttctcagagcttcccttggctaagggagggagctcccccaccccttgtgattcctgggtgaggcgacaccccaccctgctttggctcgccctccatgggctgcacccgttgtctaaccagctccagtgagatgagctgggtacctcagttggaaatgcagaaatcacccgccttctgcattgatctcactggaagctgcagaccggagcttcctattgagccatcttgccagccaccctagtcatttttaaaaaacatcaagcagtgtgatatttgatgatcgtttttgtatagtagctcatgctactgatgtgtttgtatgatagtctttataatttatcatgaaagcagatctgtttttctgcctgccagaatgttagctgtaattgagtaactcattaatgtacctaattgtatacttatttttacacacttgtggtctttaaatgaatgtgccttttcttgaattctggccaaaaaatgaagcagcttcagtgtctttgacccttctatgcctgacatgaaaacaatgttttgaggttgtcctcccatataccacatggcataaaagattggttttgccatagtctagtgataccaactttatgtatgcattctaatgggaaaagaggggggtgtctgactagtccaagataagaatacaatgcagtgtctgggactgaacttttaaaaaatatatgttcatttttagaaaaagtcattactgtgcttgctgcctgtctggaaagtgagaatcaaaatgctcagaggattggagcagctgccctttgggctctgatttacaattatcagaaggtcagttttaaaaatcattgttacacctggggagcaaacaacaaggtataacccaggtataaactcttaggatacatccaaaggtgtcaagagttacagcaaaagaaaaaagacaaaatcaaagatccatgttccctttgctgattcatacaattagtaaaccatcagttgaaatctttttatttaatcatttcaacagaatgtctcagtttagaagagaatctctgaactgactttttcctcttaatttaaattgatttactttattattgcaattttagtatagattgtttcttctaaaagacgtatcaagggaaaacacatcttaaagtaaaactgagtaacaaaagttttatccaattgtacaattcccctttatctagctcagttcttgtacgactgcagcccaaagcctgctctgagaaaagggcaggcaacgtggagatttgtgttctactctttctctggcctttggacttccactttattgcagacatgttgttcccaagagaaatacccataagtatctagtgattaagtagtagccaagtgacagtgttaggatagacagccatcctagaatggtgttctctcagctgactgtctctgccggggctagttttctccctgctggccagagtcacgtacacaaggacaagagggtgttgttttctttctcacctgggtatccccagagcttagcacaggatttggcactttgtagtcactctgtaaatatttgttgaccaactgctaatatttggtatatgtgatcagaaatctgaggtttgagggagtatgaaaaactgaaaccaaggatgactagtttaaaatagcaaattgagattaggggagaaggagtaaaagagaagggaagaaagaaaatgggaatagagaaagaatcaagttagataagaggatatgggcaagacttcagaatgtgcaaggggattggctcaataggatgtattatgctaagatggaactctctagttatattattatatttcataatattctgtttaatactgtagttagcaatgggcagaattagtgttttgctatcatgatccataacacatggcaagaaacctaattaatggattgttctaggcaaaaacagctttgaaaagcccatcagtaaaaagaagagtggatgaagcatactccttagcaaagaaaagtaagttgcaataagaaagagattatagttaaactcagaagctattaagtggattttctgattaatgagatatttggacaggccacagcaaaatggcattgtaaaatgtgccaatattcagtatgtgctttaattatatcattttttaaaataataaaatagatagatgaaggtttaagatgtgattgcttctaaaaatgcatctgtgatcttcgtcttatttttgtactaaattttctttgccaacagtgaccactgtgctgaagtatgttcttagtgataagaactggcccaattagaattaactgtgagcagaaaacctggatctaacatcagggagctggaggacagtcttccaagaattgatcctgttacccttatatccacgtttccctgtgatgtggtcacaatactagagacggttttcttttcaaagcacattattcatttttagtgacaccaaatttcagtgagcgttattctctgaacattttttatgctaaaacactgaattgtgtctttcctgtactgtaatatatctgttggttatttgtgtttttatagtctgatttttttttttaagcaggggaggttttagtttgttttagctgcgaccatgaatttctggagctagtgaagttaaagattatgctttaggaaggatggtacataaaaaaagattaatggcattcatttggaattatagttaatggtatccattatggggggtactttttaaaaaatactctgggtaagctgttaatttaaaaaaatattgattttgtaacttgtttattttttaaaaaatgcaaaatattctggaatgctattacatcaagaacttagagctttaaattatatataaatcctgttcatatgtatttgtttatgtgtgtgcctcctaagtatagtaccaagtttcataaactagtatttctgtactcttatttttctatctcagctttcccaaactcagaagcaaaccctctaaatgcctattatttgaaatgtcttgaaaacctcgtgcagctccttaattcttcctgagtgccatgggatgctacaccttgaagctgacagtcatcaacaggggagctaaagttgaagccagctgtgtgtagcagctgttacctgaagacgtgctacctctctacaaagtgttgatccccttctttcccatgagagagagaactggtgatactccaacaccgtccagttgtggcagctctccagaagtaatagcagctgacaactttctgtgccttttcctttctgttgaaaaggcatagaaagttctgggaacataaacatttttacccttttctatgccatttattttgtaaaaatcctatttaacagttatttaataaaacaatatttttagaaactaaaaattgactaataattgctgcttacagacttttatcagtctcatgaatattaattttaggagttgaaataagacactgtgtcctggttgtttctctctttttttaaattttaactgatgtaaaatttggctctgtcagtgcaaatccttattttcaaaactttctgttatccagagcatccacactggaaaagggctatgtagaagtaagtgtgcattatttgtaaagggctgtgtggaagtaaatgtacatgatttgtaagtagctttcttaggcaagttttagtgatgttatcttcttcctagatgactcttaaatcattacatgtataatcttcaccgttgtcttctgcaaggctgtgtaataaagaagaaagaaatagagttggggctgtataagcctgggttcaaatttagctcagcccaaaacatcatgaagaatagagtaagactgaaaaatgcagaagatggccgggcttggtggctcatgcttatactttcagctctttgggagaccgaggtaggtggatcacttgaggccaggagtttgagaccagcttgggcaacttggtgaaatcccatctctcctaaaaatacaaaaattagccattcctggtcttgagcgtctataatctcagctactccagtggctgaggcacgagaatctcttcaacctgggaggcagggaggttgcagtgagctgagatcatgccactgcattccagcgtgggtgacaaagcaagactctgtctcaaaaaaaaaaaaaaaaaaaaaaaa

SEQ ID NO: 15789 - DNA, 107286 bp, Homo sapiens
acatttccttggctacccctgaccaccacagacagacatgtcctctcctctaatgaaaggtacggtgcttgatgtattttcaggtatttttgttcacttatagtcattaagtttgatagttattacaatatgttttaccaggaaaagatactagtggcagtgaaaggtagtaatggtcatatttaaatgatttttatttttcaaaaagctagccagaaaaaaattcctatttgcttttaatcaatctacacatcaagtttcttttatttatttatttatttatttttgagacagagtctcactctgtcacccgggctggagtgcaatggcaccatctggctcaatgcaacctccgcctcctgggttcaagcgattcttgtgccacagcctcctgagtagctggaattacaggcacgcaccaccacgctgagctaatttttgtatttttagtagagatggggtttccccacgttggccaagctggtcttcaactcttaatctcaagtgatccgcccctcttggcctctcaaagtgctgagattccaggtgtgagccactgcatttggcccacgtttctttttgtggttggactcttgtgtagtccttggtgacaggagttttctcttattggccagattctcttattggccattgcttatgcccttgattgataaaaatggaaaattgaacataaatgtagtctttttggcagaatatatttcaaaatgtgggcttcattaggagacaaattaaaccatgtggataaggttgggtaccactgatccaatctaatgtaatgactgttaattgattgctacccacaagagtaaatagctgatatatagagatttagagagtattttaatgtccagattcactttgtgcagtttcataaatgccacaatacacgagttatctgcttttttggggtataaatctggaaaataaagaccaatttactagggctaagtccagattacaggtggatgccattaagtgatttttaataatgacatgaattctcttggaacaacatattcgagaggcaaagtgcacatgggaaagggttaggaggttgtatgatctctcagttttgagtcagtcccaaaggcagagatggcgataatttctaatgcatgcctgtagatagtgaatggtggatagtataatggaactgggctgagagaaggggtgtgatttttttggggtggggagtgaacaactgccaatcctaggtgggcagaagttgataggtgtcctctgtatgggataagaggggagtcctaatctgattcaccttgagtggggaagatcagtaaggactttaattcttagaatttgcctctgtacttttgttctgtctcatttcttaatttatttggcagatttcctagaattgtgtgctctttgacctcattgaactcgttttgcagacttgtgataatctctgagggtacagtgtttagtatgatgtcgttcctgctcttgagagggtctagtggggaatgcaaaatcaacaggcagttaacaatatcacaaataatggacaaacggaaggagcactgccctagagttgtttattggttagggaaaagatctaggaaggcttttctggagaagtgatatctcagctgagacccaaaagattgttaatggagtcattgtgtcagtaggctacttagaatctggaatagatgaactcttcttaaaaatgattaacgctatgttttgtagctctttaagaagtagtaaccacactttaatctggaacacctgtgaactattgaaggatgttatcatgcaagattttcctgctgagattttccttcaaaggccaaaaattgttcaggtcagtgccctctataattgttttagattttgaactagagaactttttgcaataaagcaaattttgcagagtaggagttcttgggaaggaactttgtactcatgtttttaaaaagtgaagtatttggctatttaaagcacttattcgctaacttgggtggatagttatagttcttccaatagtagtagtttcatttgacacttgcagtccagtctggccaccttgagttaccatttatggatcacctaaatggtagagtagactttggacattgagattgtgcaggagcccttattaaaagtaagaatagcattgcttcttgagtatctcgtttatttaacgcacagtgctacatgctgggaaaatacagtagcggtgagtaacgcagatggattcttttctttttttctagtttattgcttgtatagtagagagagagggatccagggtggggaattgcaacatcttcacagcagccagtaatggctcagcattctcgctccacactcccagggctgaaatggactccagtgggtgccaactgttaatacctaggatcaaagctggcaaatgatcgcagaggaaagctgttaattactaaaatgtggttaaatggtttagatgcttgagatgaaaagggcttgctgtgatttttaaaatgttctctgtaatgtaatgtcctgagtggggaataatttctgtcttctctcagaatggttactcaactaacagattttagaaataggaaacactgactattctatttaaatgttgttgtcttattttattttgacccatctccttgctttatgccaagtcatatttgcccatttcagtttcttatgtcttacaaatatttggcaacttattttctcttgattattcacttaggcttacttacttaagctccacattctgctttgaagttgagctctttgttcccttagtaattttcacggctcttcttgatttcagagccttttatctctgttgaaactggcctttggagatggaaagcatcgcctggcattacagtcggtgtcctgcctgcagcagctgtgcatgtatttaagaaacagacttaactttcaccgagatccaggttttttctccaataaacacggtatttatttttatctgttcattagccactggtgttatttgtagattcttctgggaaccttccattatagttactgttagggtttattgtgtacgcattttcacaacataaactccccactcctaaatgtattcaaatgattatctttacagattgcgtgaatgacagaaactgccatgatctcttgagcctttttttttttttctggataagagatatttacaaggtgtttttcttttttctcccaaacttgcagagattctatatagtgttgttgggatgtagtgactcggatatttggtatggctattcatgtaggactttggacaatttagcaagttacatatagtgttaatacattgttttgtttgaaaaatattgatttgaattttatgaagagtatttttatgcaacttgcaatgtagtcaagtgttgcagcaatgtgagacttcagagaaaaagtgccacctaatggccaaatagagtaccagcctggcttcgacaaaaccagtaccatttaggatttttgtgagcttaatgcaacctgcatcgaaagtcaaatattatagtcatttgtcatcatgtttcatagttaatccctatttcattgggagtttcactgatcctgtgctacttgaatatttatgctttaccttggttttattctagatcttagagggtatggcattgtacaaatgactggtaatagagaacgtctgggtaccccatacttcaacagaaaaagagttacaatgttgatttaaaaagttgatatctctgaagaattgttaatgtatttaataagtatgtatttattacctgttttatgcccctgatattctagcctctagggaagtataacactgaacaaacgaataagatccaagcccttatgagcttctattttaaaaggctgggcacaggtgataaacaatcaagtttgcttgagataaggagaagtacttgaaggaaataaaaagggtgatgtgacagaatgtggttgggtaaacatagcttcatttaggatagtcagggaaagtccctcagaaagcttctattttaaaaggctggggacaggtgataaacaatcaagtttgcttgagataaggagaagtacttgaaggaaataaaaagggtgatgtgacacaacgtggttgggtaaacatagcttcatttaggatagtcagagaaagtccctcagaggaggtgacctgaagggtgacaaggaatcgtcactcgaagagctgcaagaagagtgttccagggaaggccaggcctcaaggttagcactgagggtgatgtccttgagcaactgaaataaagcccatgagagtggactgcagtgagctgggcagaagaggagaatgaggtgacatcagagaggtagttaggggccagagtatattggggcttgcagatctttttaaagattttatattttctttgaagtgtagtgagaagctcttggagagttttttttccccctctctctgactgtaaatgcttttattacctaattctttttttaaattggggtaaaataggtataatataaaatatgccattataaacatttttaagtatacaatatagtgacattaataacattcacattgttgtgcagccatcaccactatctgtttctaaacctcttcattatctgaaacagaaactctaatcattaagcagtgattcctcatttttcctttccccaaagctggtaaactctaatttactttctgtctctgattttgtctattctaggtacctcatctaagaggaatcatacagtatttgtccttttgtgtctggtttatttgtaatgttttcaagcttcatccacattgtagcttgtatcagaacttcattcctttatatggctgaataatattcctttgcatgtatatcccacattttattcatctatgcatttgtcgatggacatgtgggttgtacccacatttggcggttgtgaataatgcttcagtgaacattggcatgcaagtatctgtgcagtgcctggtttcaattcttttgggtaatacccagtgaataatagtgaaattgctgcgtcatatggaaattctatctttagctttttgaagaatcaccaaactattttccacagcagctgtaccatttacatttctatcagcaatatataaagcttccagtttttccacatcatcactgacttgttcatttttttcttttttaaaaataatcgtagtcatcctagtagatgtgaagtggtatctcatggttttgatttgcatttctctaaagacctaataattaatgaccaatgaatctctaataactttttatgtgcttattgtttgttcatgtatcttctttggagaaatgtttattaaagttctttgcccattttaaaaattggactggtttctttattgctgggttttaggttacttatatattctgaaaattaaacccttatcagatatatggtttgccaatatttcctcccactctataagttatcttaacactttcttgtaatgttcccttggtgtaccaaagttttagattttgatgaagtccagcttatctgtctgttccttggttgtttgtgctttcgatgtcatagttaacaatcgattgccaaattcaaggtcatgaagatttattttttccgctaagagctttatggctttagcttttatatttaggttgttgatccactttgaattaatttttatgtacagtatgaggtagccattcttggagagttttaagcagacgagtgcatgatctagtgtttttctgctttggtagtctctaatgttgtaactgaatgccattgactagaaggtcccatgtaatcaagtcagttagatataaacctaaatgtactaagtgaatacttatagaaaagtttgatctttgcttttgtttttacccctgtagaaggattcctactatcttaatttgttaatgtttttggaagaatgatacataaataccacatagtcagaagtctgtttctactaaagaataattttattttttctttgtttccccagacacagtttcccaaaattcttctttgtcttattgtcatgaagcaagaggtactcatcattcccagaatccttccccaggaagcagcagccctcggccttctgtggttgggcgcacaggccagcgacccagaggagatggccaggactgggatgcagcgtcctctaggtgactgctagcagtgtctctggggaaatgagaaatgccggttaacttgtgtgtgtgttaatttcagaaggagataattatttttctgtccttttttttttttttttttttgaaacattaacacaggtataggccttgtgttaaaccctggcttcatactttttttgaccatgatccacggtaaggacagataaatattacatcgcaactcagtgctcagtacttgaacatatgctctgtttatgtatatatatgtgtgtgtatgtgtcccccaaaacaaaatgttcacataatagtattctgatactatgtttgacacactgaactatattttcagttccgatttcattagaaaagaaatgattctgacccaataaattgtttttaccagctgcaaacggaatatgatcaagtttaaaagaatagctttaaatgatagatacattgttgatagtattttacacatatttttgtaagtcttataacaaatggataagtgtttactgttaaaaggaatggttggagaattttataaaataaggactccttcaaggtgaacaatttatggtatttgtttgtgtaaatacagatttttttcttttttttttttttttttttgagacaaggtctcactctcttgcctaggctggagtgcagtggcacgattatagccttgacttctgggctcaagtgatcctttcgcctcagcctcctgagtggctgggaccacagatgtgcactaccatacttggctaagccttttattttttgtagagatggggtctcactatgtttcccaggctggtctcgaactcctgggctcaagtgatcttcccatcttggcctcgtaaagtgctgagattacagacatgagtcaccatgcttggcccccagtgcttggcacccagattttcatacaccaactctgcttaaaaggattggtgtggtatttgtatgttaccttatccttgggtgcaaatgtgttagaaacatattagtctctttagtgtcattctaaaaaatgttcactaagttaagcattggtctgttggcttaattattttcttgcaatactgctactactgttaacaagctaatactgattcatacctgctgtgtgtatggtgttatgccctgtgctttgcatactttgtctcctttagttgtcctagaataggattgatattatatatagcattagtattattattatcatcctcattgaggtttagagaggttaagagcataacagttggtaaagagcagagctagggttaaataaaatgataggagagtctatgctcttagtccttatattgtagttggttgttcagccatgtttttctctttctcctgaagcctttctgcctcattctcttgtgtgcttcatgcttctaagttttcactcctgagtgaacagcttcctcactgaaacttcctttcagagttacagagaagcccgagttgtttccatattttggggtgcttggtatcttgaaattgaagaaacgacaaagttggtttataatttgggcaaatttaaatgttccatagcattaatatgtctcttgtgatccagcttcggttgtggataacatcaaaagacaaaattttgaggctctttgtaagtgtgaggctctagcctttctacactttttaaatccttactccagcactttacatccgaggtaagaactttttaatgaagaaagccaaggacaatgggatgttccgtttttttgggtgcatttttgaagtcactacatgatgtcgaatgtactaagtgaagtaatacatttcccatgaggtttttctagaaacatccttcatttactaacactggcttactcagaacagtggtgaaactcagaaaatctaggaaacggtatgaactattggttttgtctctacacgttgattacagaagagctttcctataaatctgcttatttccttttggaaatgaatgggttatcagtgctaatattgattcctactataggaatgttgacatgttttgagatatcagcctgacaagcaaaatatagatgcatttttggcttcatttacaatttagagtctttttttttttttgagatggagtcttgctctgtcgcccaggctggagtgcagtgtcgctatctcagctcactgcaacgtctacctcctgggctcagaagattctcccgcctcagcctccccagtagctgggattacaggtgtgtgccaccatgcccagcgaatttttttttttgtatttttagtagaggtgggatttcaccatgttggccaggctggtcttgaactcctgacctcaggtgatctgcccgccttggcctcccaaagtgctgggatgacaggcatgagccaccactcctggccttgagtcatctttatggaatttaatttcgtaaatttgtcaaagtttctacaaatctgaccagagttgaatgaagcagtagagttgtgacttgtatgaggcttctaatatgcgaggcagcagatatgcagtaaatctgtttggggattgtttctgtatgcaaggtttatcatttgtttatcttgcagtggaagtagtagtcatgctcatgtaaactccaggatatccgttcattcacctttggatatgggacacatagatctgccagagctggaaactgaagacacattggaactacaattccagcagctcagtcttccccagttttgtgtctccattctggaatcagctgttcctctcttaagaacaggttagttgttttagaaatcgtaattctgatataatttgtgtctgttttgtatttcgttaggattttcctttttttctcttctatgttagggcctttggaatctgtatttacttatcttttgggatataaatttctaaaaacctaataaggtctttattatttttaaattaaatgtggatgccttggagggctattcagcttgcccttccattttatgagtttttattggcacaggctttcatgcttattttttttttagaatttttatctattttttgcatttattcttgctgtcatctatttttttcttttttttttggactgtatggctattttaaatttgagcagtgacaacattcagcaactggaataaggtataaaaggtggactggcatgaatagaccagaataaaaaaatctttggcttttgctctttggaaactttttgattagctgtcagttgtttactcttcccattcatttcttgctacttaagccacttaacatgttaaaaacaaaactccaaaactggattcttacctttgtagtaatttttcttaaaaaagccacaaatattttgagatcccatttttgttcagatgtactaggaaaatttgaagaggttgactgaaatatacactggtatttaattgtaattgtactgaacaatggtaacagcaataacaatatgacagaggtctgctgagtctagtaatgaaacaacagttagcacgtgtccctactgggttctgccttcatacttggttttgtgtgcattatttcgtgtatttttcatatcaacccattttgttttttcactggtagttaactaattttatctccatttttacaaatgatgaagctgagtttttgagtggtttagaaacttgcctgaagtcaaacggctaaaagcagggacttgaaccacgattcttttgaatctaaagtccatgcttttaaatactttagcattttgcaaggtgtaaagaaagttttagaaagaaaacagtcatgatttttattctcaaaatctatacattttcaacgtttgataaactcatcaggatataaataagataaccaagttttgccctttttactttatactggcaaagtaaaaatatatattccaagttaatggttctttaagtcccatgtctattttttgccacttggaggtgatggaggagaaagaagcaggaaggtatatatttggaaaacatttaaaatgtttttatcctgaggaaaactgtgtactcatactttttactcagtaagtgcttctactagctggaactatatattaattcatatactaataatgtgaaatgaagaaagatctgaactttggcatcataaagtacatatgtttatctgtctggtaagctgagaagaacagtcttagactttaatgattttgcatttaacctttccttaatttgctttaaaaagtcagattgataattataaagctatatcttggtacataaaaactaaatgttctcctgcccttttgtggtaaattatggcatgatttgtaactgttcaatatcgtaagagatttgtaagagaatttggtccagctcttctagtgaaaaaattaatctagatccttccaatctggtagtttgttttactttgattcattagaacttaacctttgggatgcggggtgggaaagtctcgtgtgaatgttcgtctcacacaggataatggaagtggagtctttgttattctgtctctgtggagaaaggaggttgctctggtgggtgtgactttgggaagtttttttgagtttaaggtgagtacaaatagtttctttagcaaatgttagcatgttcatttattcctttagttgctccagtccaagcttagcttcccaggcaactcctgtgtgggaaaatactaatttatgagaaggctcacgccttctagtactaagtagaaattattggaatacgttttctaaacctttctggtgctttgtcacatattacgtgtaaaatggatggtccctaaattcgaaaaattattttaatctatctcacagtacttgttagattattgctactttcaatatcttttccaattataaatgtatttgatttgttatgtagtaaagtagtactgtgactggaacagaagccttcagtgtgattgtaaattgtgatttctctacagttctaagaacattagaaaaaaagagaaaatgttggagcatgactaactagaaaattgagcaatatgatattcagctgattattttaaagttaagtaacttcttctcctttacttttttctgtttgtattcctaggtagcagacaagtgataataagagttctggaattgcttacagaggatatgacacttattggtgaagcaatttcaacagatatctgggatgacagcagcctttttggtatagatatggtaagaatcaatgttttctttgggatatagggaatagtattttttaagattttggttcttttaagccggtttcattgtctcattcgtgttcaaaatcttttttctttttgactcaatatgtcccaggcttatgttataaatagcctggaacaggcctatttttccaaaggttctggttacttctaatagtggaacgtatattaagaccaaaaccaggccattagaggtggttatagctactgtgatatcattcttttctttcaggaacaattaggaaatacgtatttttaaagatcgtgagtttattgctatttttcttattttaaatttgtatttcttatccttgcgcttgtagaaagtcttcgttcctagcaatatcagcataattgcttattagctttgaccttaaacatacataagatagtttcagaacagcaatattaacattgctatgaacaattctaatgaaaagttcaagatttcctggcagttctttttgagatagactaatctcactaaggatatacagtcaaaatactgtgccttaaagctaccgttacccattcagcatacagttagatttttttttgtttgttttcactattgggaattgttttttcttcataaaaatgtagctcagagatgcctctctcccatccagttacctttaagatgttttccttattggtagtcatttttattttctggctatttttttctatttttattttatttttgcaaatgtaagcaactaagtatgtagattcttatcctctccccatcctgcataaaaggtggtatattatagacactgttttgcaccctgtttttataacttaaaaatacgtcttatgtgcatagaatagtaggtatgaggattattccctatctatctatacgtgagattttctcgttcttttttataggtagcaaatgcttcgttgtgtatttgttaacctagtctcttgatggatattattgttaatataaattatgtacaaagaataatgggcttatgctatttcataaatgtgcaggtatgtctctagggtagatttatttaagtgggcatgctgtttttctaaaaaacttttatttagcttcagcggtacgtgtgcaggtttgttatgtaggtaaactgtgtcatgggggtttggtgtacagattattttgtcacccaggtaataagcctagtacccgataggtaatttttgtggtcctcctcccactctctgccgtcgagtaatccctggtgtctgttattcccctctttgggtccatgtgttctcattgtttagctcccacttataagtgagaatatgtgtatttggttttctgtttctggattagtttgcataggataatggcctccagctccatccatgttgccgcaaaggatatgatctcatgcatttttatggctgcatagtattcattggtgtgtatgtaccacattttccttaatcagtctcccattgataggcatttaggttgattccatgtctttgctattgtgaatagtgcagcagtgaacatacacatgtatgtgtctttatggtagaatggcctcaagtgatctgcctgccttggtctccgaaagtgctagaattacaggtgcgagccaccgcgcccggctgagccatgttgtttatgtagtagtacagcagttcctcacttggcatcatagataggttttcggaaactgtgactttaagcaaactgacttataacaaacccagttattttttctcatcagcatttagtgaaatggcatggaacttgtaatgctgtttcattaaagtcagtttccaagaacctgttgaccaagttaagtgaaggcttactgtagtttattcattttatttctgagtagtattacattgtgtggacataccacaatttgtttatccattcacctgttggtggacaatggggttgtttctagttattacaaataacattcctatggacattccagttgttccacatcttcaacatctattatgttcagttttttttttttttttgggggggagagggcattctgatagatgtgcaatggtatcttagtgggttttaatttgcatttccctagtgactgatgattatgagcatcttttgtaatttttagagagcaagtctaggtttttttttaaaaaaacacttattcttaagtattcttttcaatgccattgtgaatgaaaattttaaaagtttttggattgctcattgttagtatatagaaatacaattgatttttgtgtattgatcgtctatttggtggccttgctgaacttactagttctggtagttttttttgttttgttttgttttctggtagatcccttaggattttctatctataaaatcttgttatctgtgaataaaaacagttttaagatcatcttatctgtgaataaagacagttttatttctttctattcactctggatacctttaatttttttaaattgcctaattgccctggctagaagccttagtataatgttggatggatgtggtgagagccttcttcatgatttagagggaagcattcgatctttcaccattaaatacaagattagctctagtacatttgtattttgtagatgcctttataaagttgaggaagttccatgtattcttagtttgttgaaagttttgatcatgaatgattattgtattttgccaaatcttttgtctctattgagatgatcatttagctttttgaagagcagaaaaacttaattttgatgaggttcagtttcttagtttttcttttatggatcatgcttttgatattttatctaagaaatctttgcctaacttggaatacaaagagtgtttcctatgctttcttttagaattattacatatgttttaggttttatatctttgattaattttgagttgatttttgtatctagcacaaggtaaggaatgaacttttttttttatgggtatacaattattttctcagcactatttgttcaaatgactgtcctttctttcctgaattccttaccaactaactatatgtgggtttacttctggaatctatttgatcggttttctcttatgatgccaatacccaactgacttaattattgtagcttatagtgaaggcttatagttagctatagtgaagcttattgtaagtcttgaaataaggtagtataagtccttcaactttgttcttgttttttttttctgatatgtagtcctcgctctgttgcccaggctggagtgcagtggcgccatctcggatcactgtaagctccacctcccaggttcacgccattctcctgcctcagcctcccaagtagctgggactacaggcgcccgccaccacacacacacacacacacacacacacacacacacacacacaaaaaaaaaaaaaacctgctgtggttttgaatggaattgagttgaatttgtagatcaattcaggaaaaattgacatcttaatagtattgaatcttctgatccatgaataccatatatatgtcttcacttgtttagctcattatttatttttatttttattttttttaacatggaatctcattctgtcacccagactggagtgcagtggcatgatcttggctcactgcactgtccgcctcccgggttcaagtgactgtcactacagcttcagcctcccaagtagctgagattacaggcatgtgcccagctaatttttttgtatttttagtagagacagggtttcaccatgttggccaggctggtctcgaactcctgacctcaggtgatctgcctgcctcggcctcccagagtgctgggactacaggcatgagccactgtgcccagccttatttagctctttaatttgtctctgcattgttttgaagttgtcagtgtataggtcttatacatttgagtatttcagttttgggtcttgtccactggctgacttttctctttatggatcttaatatttgatatgtgtagtaatttctgattggatgctggaccttttcaatgttaccatgttgagtgtcttgattttttattttacccttttagaagcactttgggagggttctgaagcactttgggaggccagcatgggagcattacttgaagccaggagcttgagatgaacctgggcaacaaagtaagatcttgtctcttcaaaaattagtaacattagctgggcatgtaggtgcatacctatagtcccagctatttggaaagctgaggcaggaggatcactcgaacccagaagtttgaggctgacaggtggttatgttacttgtagagcagtttcattttctcaagactttaaaaaattttgctagaatgggtctaaaatagtggttttcaactggggggtaattttgcttcccagaggatgtttggcaacgtcgggagccatttttgattgtcacacctggagtggtgctgctggcttctagtagatagaagccagaacagctcaccacaacaaagaatgttttagctcaagatgtcagaaaaccttgaggaagtgttaaggttgagaaaccctgatctagaagaacctttgcttggggttaaactctgctcctgagatgtgatcctttgggacctctattgaatgtccaaagtgatgattgatgactgtctactctgcctggttgaagactgagttttattgtcttgtgtgagccctgggagttgttcaatttaaatctcagtaatcatctttggcctgtatttacagagtatctacctataatctaagccacctaatctcagcatggtctgggtggaaacttgtttaggtctctgaaattctttctttgcatagctctcccacaattcctaaccatgtcagcttccacaggcatcttcatctcctaaagtcatcgagactgtcagactctttggatttctcttgcctgtgtttgctgtacagtaattgttttcaggtatagtaggactctcattgcttattttccttctctctggcatcacagtcctgcaatgacactatgccactttctagttgatttctggggaaggacaggagatgtccttgttattatttcatggccagaattggaagttttacgtaaagtttttaattatgtcatttaagcaactggcctatctgtgagttattaggagcttaaatgtacatttatctagagtgaaaattctggatcaactttagaataatcattcaaagtgtggagagttcaggataccttgttttttgctgtttgtatttcagtagagtagataattttagaaaatatggaattaaattttgttttttttgtaagaagtgttttgataagtaatattttgcatgagtaatcaacatgtgtacagtagtagccttaagaatgttatattacaacataatatttaagagatctatggaataccagagtatgtctccatgtaactggaaaacatatcttttttaacatttcaaaatatcataaatcatttgtcatttaatatctttcattttgaaattgtcatctgataaccttgccttccttgaagatttggcattctatctcttctgttaatgtgaattcctaatgtctggtcttccttcctctccctttcttccttcccctctcccttcctcccttcccttttgctgccttgtcagggcagtagaatcaaaatttattagtcataaaaatatatattgactcttacgtttatcagttttttttctctttatgctattttgatgtaagtcggtctatatttaattaaacattgttacaggctgtctgaaatccttgtgaatagaggtctgaatataaaaaaataaattacagatatttacataataacaatacccatgtaagaaagaaacccaaacttttatttttttcataacacgagcctcttaaaaagagaaacaaactgcatattttaaaatgggtgtattttcaagtctttcattttctgataatagttctgaatcttggtttttctttagtccttaaggttatcacactattttgtagtacttttaggagatttttcacatattgaagattttcaacaagtaaatttttcctttgaagtgtgaggaatgctttatcagttgtttcttaaattaacttaaattttcttggccagaacatttatctgtaaaagttagtcattcacttttaacttttggctgctggtactttatgattcaatgaattatttttactttaaaggttaattctgttgtacaagtgccagttggtatgttacaaatgctaaataaaacagaagtacttcaaattatatttgatttacttttacttgtttaaaaagaataaatgtctcttttctttggctatattttaaaagaagcaaacaagtaaaatttcttaatgttcatacttttgccagttttcaaaagaaagacggaagcagtatttttgttgagtcattaaaggaacaaaataataaatgttgctatcaatttagaaattaagtacctgaggatatataatcaaatctctaggtatttccacacagtactaatatcagtaacatcaatcatgtctggaaccctgtaactcagcatggaagggaatttcaatttccccccttaattgaatatttttatattactcgaagtaaataaaagaaaaaatattttcaccaaaattagttatgctgacctaaagtatgtcatatgtcattccccctagtcctccatcatcaaatcaggtctattttttccctatttacatgctaagtcaggttcaagatgcaaggagaaagtagctttcacctcctgccagataacctagactcttaggtctatattctgtttcttttccgcatttcttctgtgtcattcctgtcattgcagtcattggaaagcagtcttttcatctttatgactcattgcttctaaattcccatctgacctgctgtgaactggtaacttcaacatcaaggcatgttggtagaattgtagaatgttggtaggacttcaagaggggctaagaggattgtgaaagaaactaaagatctttgtatccagtaagggctcattaaggatatttggaccagattgtgaattgataactggtgtagtgggatctctaattacatagaccttccctgctgctgccaccattccaaagacagttattttaactcacatttcttgattgcccgttattaatatatgctaggcacttgggatatcaaataagatgtagtgctttttatgcctatgggtgatagatacttttaatatgacattagtaaaatagagataagcataaaggaataacacgtaaactaagatagtttaaatatagcacttactgtatgtcagacactaagcactatttatgaggtcatttaattatcatgaccctgcaaactccataactgaggcacagtttatttttcagggtcacttgtggttttgtatttatagccattatgttttattgccaatggtgctttgaaaacactatgaactatgaacttgggatgtcagtgagggctttttttttttttttttctcttccccagactcagagtctcactctgttgtccaggctggagggcagtggcgtgatcttgactcactgcaacctccgcctcctggattgaagcaattttcgtgcctcagcctcccaagtagctgggattacaggcatgtaccaccactcctggctaatttttgtatttttagcagagactgggttttgccagattggccaggctggtctcaaactcctgggctcaaggcaccactcctggctaatttttgtatttttagcagagactgggttttgccatgttggccaagctggtctcaaactcctgggctcaagtgatcctcctgccttggcctcccaaagtgctgggattagaggcatgagccaccgtgcccggcctcagtgagggctttttgtagatctgaatgaactgagttttaaattataggtaggatttggccaagcaaataaaatagcattttttttttttaatctggcggagcgtgagaatgaaccatgagccatgacaaagaggcatggatagttctgatcggagataaaggataggcctggtagtagatggaacacaagcacctagaccatgaaatgtgaggtgcaaatagtggagagagactggtgggataaatgagggtctgctggtaggggtcttttggcatgatgctgagtagtcctgcctttcctctgaaggcatgatgagattgcttttaatcagagaagtgccttgtgagactggcaggaggaaccgtgactggctgcagtgtggaaggtccattggaagcatgtgaggggcagagcctgctgcagtttcttactccaggtgccttgtagaatccacaacccattgtatattgcagaggtagtgtgtaagttgtgtttacactataaaatctgttttattggtaatatttaagacattttgctaacctggtatttcaattttgtaccttctgttgtaaaaactatgagtatcctgtgaggacgggtcttttcccccaccgtcaactcctttagggttgttgcttaaacatctttagcccaaagaattaaaaaatgtgggccagttactattgtttttcaatcctttcctacaaaacaaaacaaaacaatacaaaaagccattttttttatgcttagaagaaatgttggaaatagaactgtaaaactcattcctaaagtattttctttttatgatattttgagaagtactcaattcatcattagaattagcaagattattttaaacaatttcacaagtaaatagacttgaataatagagatgttgttcctagtactgttttcatggagaaatactgtatggaggaattaattgcctgtcaatataataagactgtcactgtatttccaatttgttttctctagaccagtagttgtttgtatgagggcgttttactttttctgttttaattttgtaaggattgttctactttcggtttaaatatttattgctttttagttttatttcttggggatcagagaaatatagccttaaatatacactgaagttttctttgtggtaaagtatgtttaaagttaatttttgtcagtgtttcttggaaacttaaggagaagttatattctttgcagtgttcaaagtttatgtctattaattttaattatgttcaaaaagactgagttaaaatttataagtccatatcaataacatgttttgttgatgtcctgttttattcagatcacagactcatttttattgagtctttattgttaaacatgtcatcagtagaaaattactctaatttattttgccctaaattattcactattcatattgcttagaatttttgttttaattctactactcattgaacttttaaccttttattcacaaagtttttttagaattttattttctttttttacttataatcccatgacagttaaggatttatatataaatttttaatttttgttttttacttcaatatgaaattgtttcatttataggaaaatttaaactttttatagtatagttatgcttggtctactctcaaaagtttttgccttgttttgcttatgtagatcattttgtcttccttttacttctgcagtgacattgttgtacaaccattatcattatctatgcaactttttcatcatctcaaatggaatctctgtacccattaaacaataacccctcattctgcctatccccagctcctggtacctcatataagtggaatctatatttgtctttttgtatctggcttattttacttttgtatttggcttattttattttatgttttaaaggttcacccatgttgtagcatgtatcagaatttaattccttttgaatgctcaacacccttttctttttttctttgagacagagtcttgctctgtcgccaaggcctgagagcagtggtgtgatcttggctcactgcaacctctgcctcctgggttcaagttcaatcctgctgggattacaggcgtgagccatcgcgtccggcctccttttcttgcatgtatatacaacataccacattttgtttctgcatttattggtcagtggccactttcattgtttccaccttttggctgttgtgaatagtgctgctgttaacctgggtgtgtatacatctcttttggagaccctgctttcagttcttttgggtatattcccagaagtggaatttgctggatcatatgataattctgtgtttttttgaggaactgcccattatattttccacagtggctgcaccattttacattcccaccagcaatgcacaaggcttccattttttccatattcttgccaacgacttgtgctttttgggcctcataccttttagttgttccctgtatagtcatccttgaattgaagaaattctggtatattagatttttgttcttagtttgcaggtatttctcattcttcttttcatatgttttcaatggaaaattgaaagttaagtacttcagttttttttttctttcttactgagggtgtccttttacccgctagtttatgggggcatatcagtatatctgggatatactttgtctatattgatgtgacttacaagacagtctactatgcatagattcttcttcatatttaatgtataccttttagtttaaaagatatgatttctcttgaagtagtaaattatttaaatttatgatggcataacattttccacttgaaaccttattatctaaagagagtttataaaatttgatatttaattgttttttaattatttgactttccttgatgcatttctttagaaatgttggtatcaatttgaggacagagatcatcatgtctcttgtactaatgcattgttctttcattatgcctgccactgtgttaggcgtatagtaagcataagaaatacttgacgaggggtttgcgtgttaacgttccaaattggaacaattaggcactagaaactaggaggaaattatggttcatttaccttttatattctattgtttgtatttattcattgttaagattcatcatattaaatacttaaaagattattgtatttttaaaatgtaggtggtttatcattcttttgtgctttttaaattatgtcagcaggcattggtaattctcacaggaataaattctgttttgatttgttttcctatttaatgaaaatgataatattttaaactgttctccatggcttttgtatactggcccctaaaattggttgttttcttctgtttcatgttgtgtaaatgttttcagaaggagaaactactcctggtgttgggagcccttggagaaaccatgtgctaccataaaagtagtatcagtttggagcagccagaggtgatgcttgtgcaccacagaatggcctttatcagcatttccctgtttgcagttcgactgctacaaacgcttctccctgttgaaaaggtaaggcaggcaatgctgctcatttgtactttacagactattataaataaatgctctgttgtaaatttcttctgctcttttcatggtgtgaaggtattgtgctttaggccattttcaaaataagtgtaacaggttatatgggaaatgtagaaattgagaaatggctaacattttgaacaattttgacaaatcatttgatgggaaattattttttaatcgtgctgttgcttttattgcatatgttttattgcagtctgtacgtttgtttattccttgttcattcagtgaataatttattgattgcttacagtggactaacagtattacttgctggatgtaaaactgaataggttagaattagtccctggcctcatggaacttagttttgtaaaagacaagacttggctgttatctatacatatacatatacatatacatatacatatacatatacatatacatatacatatacatctacatctacatctacgtatacatatacatatacatgtatatgtttgacttctttggtttctttaataactttgggatcacttgagggaagagattatgtcttaatatacgaatacatttttccatacatatatacatatataattggtacacttgtatcttttaattgattggagggcattgaaagcctactgatcttatctctgcagtgtgtgtcttggttcttatcattaatatcaagagtagcctttccttctcttcagctaggtacgtgttgtcagagttctttacttattcactatttcccaggttccttgacacacagaatacaaacaatagtttccattgctgctccagaaattattttatagttagcatatcttaatgtcatggaaccttttctttttcttgttttatctattcaaaatactgttagcagtgctttagtttctaagtattggtcaagttggtttctgaggactgtcctatttcttgtatttgttgtactttatgtatattgctggtgtgttgcatattttagtaacttaagggattttttttttttttggtcccatgcatttctcttgaaggtatcccactatttcctttctgtcagcaacttaattgcttaatatttttattttagcacctgatcaaaagaatttcagaagtcatctttggtaggattaaatatcctgatttttatttgattcatctagttaatatttggtaacttgttttatgtctaaaccatatttgtagtttgagttacgtaatatatgatttcataccttagtatgtcttttgaaagttgtttttttaattaacgtgttgctttaggtgtctttcacaaagctgcttttctgcccatgatagcaataaactatcttctgtgctagtctttattctagtacttttctttttcctacttttctattttacctagacctttcttttcttaagctttggtgttttcagtttttaacttttattcagaaaataaaatgttcatttaaaaaacattttgatgtacaaagaagaataaaaattcatttataatttcaagttagttttgaggcttttttcttttctgctttaagtccaattgacagcgtctataaaagttatttattctttttttttttttttttttttggttttggttttgtttttgagacggagtctcactctgtcacccaggctggagtgcagtggcactttcttggctcactgcagcctccacctcccaggttcaagtgattctccttcctcagcctcccaagtagctgggattataggtgtgagccaccacacccagctaattttcgtattttttttttttagtagagaccagatttcgccatgtttgccaggctgatcttgaactcctgacctcaggtgatgtgcccgcctcggcctcccaaagtgctgggagtactcgcgtgagccactgcacctggcctgtttattctcttttttttttttttaaccatttcttattatctaacatacattttccatttaattaaacacttcataaattttaatgggtactaatattttaccagcaagatgttctatgatttccacaagtattccagaaattaagcttttaggtttctttttttctttttttggtattttgataaataacactatgctgaattgctacttacgcatgtttactcatattttggattcttaaattcctagtggcattactagttcaaaggctgaatgcttaaacatgtttttattataagcataatttaaaaatattatagtttcacgagtttcattgtttttaactaaagaatggataaaaagagtagtacacggaaaagataattgtgagaatatatggccgggaaattactaaaaagaagcactttttgaaagtgcctaaggctggtgtctcttctgtgtgtttgccaattacagtttctgaaattgtgcactgttagtttaactagaacacttaaatttttaaatgatttttaaaatgctatcagaaaaaaacattaattctgtaaaggcttttttttttttttttaaactttcatatacattcagaaaagtacatagttcagtgctttttctactaagtgaatgcatctgtctttaaaaagtgaccacccccataacagaaaatagaatgttaccagcattccaaagaccccttctctgttacctctccctccttctccaagccacactcctttctgacttctgtcactatagatcaattggcctgttttgaatgttgtttaaatgaaattataaagtatgtactctctcaactccttcttgaggttcataactattgttgcctatagcattaatttgttaacttttattacaaaatattccattgtatgaagtctgttaaaagtgattttaatatgtgtaaatatttctttaaaatcttcttactgactgtatttttaaacgtgaggttatctctgaatttgaatgttagtggtaaaaatatctcagatcattcagacatcagtgtttcgtggtgtacttattaccaaaacaaaggagtgacacactaaaatgcaggtatgggagaaattatgaaaactagaaaactattccttatgcctctttgttgcccttagttattaaacatttgcagctttgtttcctagaattctgtagagcatatagtccaaactctattttcttttttttttttttttttttgagttggagtcttgctctgtcaccaggctggagttcagtggcgtgatctccgctcactgcaacctccgcctcctgggttcaagccattctcctgcctcagcctcccgagtagctgggattgcaggtgtgccccaccatgcccggctaatttttgtatttttagtagagatggtgtttcaccatgttagccaggatggtctcgatctcttgacctcttgttttgcctgccttggcctcccaatgtgctgggattataggcatgagccaccgcgcctggcccaaactccattttctaagtatcacttatatacacaatgtattatcaggtgatccaggaaaacggataaaacactgcattttaaatatagtattttgctttaaggaaaataacatcacttgtgttacttttaatttttaacttgtattcactagtcattatgtttctgaagtccttttctgttttgaagagtgacaatttttcaaggcataagcatcaagaatggaagaattccagtctcttaagaaaggaattgaatttaaaatatgggtgtcttccttaatattatataaatgaaaaattagtggtgctacaattgcttgctattaagtattgcaaatggtcaatctatctatgggtcgaagtattgatggaaaacttatcctatcagttgcatcatgtagtttttgattgtattttttcatctatgtgcttatttggacaggaaccaaaaagaaatcagtaatttattttacttagtgccagaataatgtaaagttaattttccatgcttttttttttaaaggtagttattgttttattgtttccgtttttaaaaacaaatcaattatctaatttttggtagttattttaaatatataacttggaactttattaaaacaattttgatcattgtgggagattgtaattaaggtatttgtttttagatgattatatttgttttgattaattgactaagtactttaaaatgagatctaaacaaaaatgctatttcattgatgttaaatttcttctttggtttatataaatgtaaggttatgctgccctctgtctgttgctagcccactaataattgaagtagaatttggactctgaaactttttgcctttaaagtggtttttttgagttgccactgaccaagtaggtagtttggatgttggaaaataaatatgaatctatgtagagatttcctaagtttaacaaaatgtcctctgatgcctgttttgaaactgatatttgttgatattaaatgattttggagaatactcatgtataggttaaaatgatacgttggtaatcttctgaaaaatattgtggttgagtaaactaaattggtaaaacaaatgaaggtaatttcatttggggaaacatctgggaagtaagagctaaaagtactagccctgttctggaagcagaagcacagagcattctaggaactgctgttactcttagctagtgatgcttaccaaggctaaggaagaatttgtaacacaaggtctttagcttttcagggaggtatataaaaagatctaatgacctggtgaagccagttgagtgactgagagcagtgcttttcaaacggtaatgttcaaacagatcacttagagatattgttaatcacatcttgcatattctgattcatcaggtaaagggtagggcctgagagccggcatttctaacagactcatagaattatgccatggctgctgagtggctagtttacaggaaacatttatagcccctcctcccaatgcacatgaggtgatgttgctgattattttttatctaatggggtgatggatttgcactgaaacatcttcacttttagttctgatggcatgtgactaatgcttatatatgcaggacagctatcttagattaggggtgtaaattgtgattagtccattgggccatgtaaagattagctaatgacattagcatggggctttgagttgttgagatagcaagagtttcaaatacaagtacgcagggtgaaacattggaattcctttgtggtgaagcgagaaaaggaaattaatatttattgagtgctatatgccatatgctctgcttaatgcttgtttaattctcacagcagctgttatttttctgactagagtcagagagaactctcttaaactagaacacagtgcctttagagttagatccattaggatttactctcttagcacagtgtaaatcgcctttgctaatttctctttatcttcctaactcttcaggagtggaaccccaggactgacagtagccctcatgaaatatatcccatttgtgattgttaaatgccatctatttgttgatgcctgccaaatttatacttccagaccagacatataacctgaactctgaacttacctgtatccagtgtcctttttgatgtcttcacttgggtgacaataaatgtctccaactgaacatgtcccaaacttcattctttgtttccccttccaaatatgttcttcctatagtcttgcctgtctcggtaaatgtcaactttgttgttcaagttgatcgttgatcaggcaaaaaccttagagtcagccttgattcctttcttttgctcatatgtggatataatccctgagcaaaatttgtcatttctcccttgaatacctatacagaatctgaatacctgagttaagcccaccattctgtcctgcctggattactgcagtaaagtcctctgtctcttagcttccacttttgcacattaccatcagttctctacagaccaattttgatacttgtttaaaatgttccagtggctttcagcagaggacaattccttatgacgacccaaagccttaactgatctggcccaccactcctttctgactccatccctcagaaccagctccactggctttcttgctaccaaataatagtttttgtaattgctcttccctcttctataaatgctttccctcagatagccacgtggctcctgacccttccagggttctacttaaatgtcatcttattagcgaggccttcctctactactttggagaagtagcagttccctgcctccactccccattacttctctgttcctcttcatctttcctatcctgttttaaaacactttttagccacacctaacatcttaggaagtatatcgatttacactctactttcttcagtgggatgtgagcttcatgcgggcagaggttgtattttgctctctgctgggttcccaggactggagaggtacctggcatatagtggaggaacatagtaaggcctaattaatattcaccgagtgagtgaataataggtgagcagataattgagtttctctttttcctcccccgcccacaaaaaaaaggaaagttcttcacagaataatgaaatttctctttactttctaatagctgctgttttactaatctggaggtttgtcatgtctgtgtaatctaaaattttgatttctgtagtttctgatcttcatttagcaactatattcatttaaaggtatcgttgtttagctgattcagctcttagactttcaggtagttaatgattatccttgaaataggttatccatgaaataaatcatgaccaaacccacttttgtaaagacagcatttcagccgtaatagtgagtcttgtcaagagattttctctgaacgtcaaatttttagtcctttttattcctttaattgatatttagaatcctgtcacaaaactagaaccatttttttaaaaaccataattctttcagttttaaatctattgatttaaggttataatgtgtataatatttcatttgggcatattgattttatactaattaaggggctatcttctgtattttagaactatttaaaatattatattggatttccactatcccctctaaaagacaaaaccaaagaaaaaaattcgtttctgttcaaatcaatctatagctatacttgatttcgtgttattaatatgtcattaataagctctgtcatgttcagctatgggatggggaagtgttcttgtcttcagtttatcaggttattggggagatttgcgtacatgtacagaaaatacttagagaaaaaggcctcatgccttagttcaatagcagaggtatatacaaggtgcagggctcaaggagagaagaagttggtttggggaagaagaaagtagttagtatcttaggctttgagaaagagttgatatttggacttgagacattttgtattgaaaaaagacagagatagaggtagatgatgtgttgggaaatgggattttctttggaaaaagtttcagttttttgacaaagaattgctaaaaaggaagttggattagattaagactatagcccactatgtttctctaaaataagttttttttaaacaaagttttaatttttttgtttttttaattcaccaaggcaagcgagtttttatcagagcctatgtcaacagcattatttctcctttctttggacatgcctatttctttggaatatccaaatattcatgaagctgttgtggcctatttggaacagctgaattctgaaaactacagtatttataaacgaactgcagaggccgtttattcaattgaatgcacctgtaacttcctgtctgatattgggaaagaggtaaaaagcttttttaatatctcttttaaatccctttgacatattttgaaaatttaatctatacttttcaaattgatggacatataattaaattgtcacaggtgggatacattattcctgagtgggtcaattatacataacctgttatttaacaggttaaagtaaggatatgatttgtatagaagtaaaacgaagactttaattaatggtgtatattcctaacatcagtgatttacaaaaaagcagtggttattacaaatgtcttaatatttaataatgagtacctctattaagtgacttactgatatgaactgaatgacagttgatgtaaccaaaattataagggctattttagtgcttacttgtagacatatttttgcctcaatattttatagatagttcttacatatatataaaggctgatttttgaaatatattaagtacagtgatgaactacattgtttataatgtattaggatgactttatggcagtgttacagcaataattatgtgtcggtatttatcccttttaaaaatactattagaatattagtatgttatcaatgaaagggttaatgggtcttagagacagacattgatacaagagttgtttattgtttgaaaataaggacatggatcctgaagatcttgaagaattagggataaaattcttactcattttggtgcctacagtagaatctatctgaacctatttattttctttgaattttttttttttttgacagccttctcagttgcctaggctacagccttgatctcttgggctccagcaatccatctgccttggcctcctaagcaactagtactataggcacatgctaccacacctggctaatatttaaattgttttgtagagatgaggtctcactgtgttgcccaggctggtcttgaactcctggcgtcaagctgtcctcccaccttggcctcccaaaatgctaggattaaaggtgttagccaccgtgcctggccttgaacttgatatttatgatttttcttacttaccactgtagtttgttttttttcccctttccttttgccatgttagtaccactgtcttcttgttttctctgtgatagaattttgaattgtgtctttaagttgaagtatttctgtggcttttttttttttttgagacgaaatctcactctgtctcccaggctggagtgcagtggtgcagtcttggcgcactgcaagctccacctcccgcctcagcctctcaagtagctgggattacaggctcgtgccaccacaaccagctaattttttgtatttttagtagagacggggtttcgccatgttggccaggttagtcttgaactcctgacctcaagtgatctgcccgcctcggcctcccgaagtgctgggagccactgggtctggcctctgtggcattttgtgtggtcagttaatcacacatgtgttcaatgtcctgtgtgttcctagtggtcaggctgctacaagaggcaggtttataataaaataaatacattagccctacttttattaggggaggtagagctacaaagaagtaatcaaagaaccaggcaacttgattgtaactttaagcttactcagagttaaataatagaaagtctcatgtggcatttagctagggaattttcctacatttctccacctcggctgacatttttaggttgcttgatgagaaagtggacttaaacaaatgtaaacagtctcatggtctctgaatggtctaatttcttgaagctgcttagttagctgttgagaatatcattgcacatgaacttgacatttattgttccattctgcttcttttgtagggagagaagaatctcttagaattagtggagctggcagaccaagccttgcgtagcttttcctatcatcagcatttcccgctaataaaggaaatcatcagcatttgttcaaagatgtaatattttctttcttaatgtgattacgttattattggacacttagggtgtgtgtaaacttagaaacagtgaaagtgaaactgactgtatatctttgttattattttttagtttaattgcttttatatgtgtctgatttttaaagggtatatgtacagctgcattaggatacttaactgttatattcaagattaaacttcaaaaatgtcatgcctacaatcaaaatgaataatccttggatttttatacatttgtttttggtatccatccagactattcacacacattgtttatttatctttaaagttttaattaataacttaaactgagagttttgtaacttttattactttgtacctttttcttatgtggatttttagaaaagactgtgtattggttaatttattttgaggacatcagcaaatttctatttagaacttagtgtctttattgcttttggaaagaataaattctgtgatgtgataatcattaactgagtaggggattttaaagacattttgggtttttaaaaatactctttaagacagaacctcctctgccctgaaacaaataagtgcttaggtgagtacttgctagtattggttatttttaataagatctcagtttgaggagttggagtaggaagaaatcccttccagtatgctttgcagtcttttgcttactaacttacttgcctcacatgtcttggttgttttaccttttcaccagctggaaatctgctcaggccagtccattactacaaggagaaagtcagaaggtgcttctccatatgttgtctcacccattgccacgagtgaaagctgaaacttaccactgctgtctggaaatcacgaaggtgaggttttgttttttcgtatgttttgtttttgagaacaaatagtagactctcttgttataccttcaaacttaatttacttgaccttttgtatgagatataagaactatatcccataaaagtagatgataattactagtcaattctggaaaatttgtactattaaattctcttaacttagtaagtccagcaattgaattgctttatttgaagttttattaagaattacatttatgttgtattaatgatggaaaaattataaggaaaattgatttccaggtattcaaaagtgatttctatgcccaggaaaccttttaggttgttgtggcctagattttatggttttaattctgttttttttaatgttattttttatttttcttttcttttgaaatatttatttttctgtcttcttaaatgataaaatatttcagcatagaatattaaatatttcaatattgaaaagaacactgtacataggacaatatttaaaagtatatatattactgcgtactcttgaaagtgtccttttgtatttaacactcttgtaagtactatttggttataataagtgtttacattttgccatttttacttctgattcatttttattcaaagaaaaatactagttatagaggaagcttctttgctttctcttctcccaccagcatagcctagccactcttacacagctggtgtatattcttcccatccagttgttgtatattatttataaagctgtatctttatatataaatattatctttaaataatttaaagaattttatatatagcatgattagtatatatagcaggatttgagatttgcctagttcattcaccttaactgctattaagtttgaatatacttccttttattgaatgataaatatttaggttcagtctcctttttattgaagtaagtttttcagtattttcagtgacagtctgtgactgtgtgcatacgtttgaaaatgtcatgatttcactttattttgaatagtaatttggctgcatataaaatacaggttgactgctagtttttattagcactttgccagtattgcttaattcttattcggcttctatcattgttgagaagtctgatatcagttaattatgatttcttttaatttttttctctagtttgttttaaaatattttccttttctgtggtgccctgcggtttcattaaaatatgtctccatgcatacatgattttccatttatcttgcttaggacttttcgctttgaacactccatctgccttcacttctgtataattcttggtcatgcttattttgaatattgcttttctcttatccttgctgttttctccaagtggaactcttattagacctgtgttagaccttcttagtttaccctttgtgtcttttaagccttctttcatattttccacatctttttaggttttatttgggtagaatttctcagtgttatcctttcagtacactaattctttcctcagctttgtctaatttactttttttgatggtgatatgtatatataacataaaatttattttaggccaggtgtggtggctcatgcctgtaatcccagcatttgggaaggccaaagcaggaggatcactggagcccaggagtttgagaccagcctgggcaacatagggaaatcctgtttgtacaagaaaaaaaaaaaaaatagctgggcatggtggcatgtgcctgtagtcccagctacttgggaggctgaggcaggaggattgcttgagactgggaggtcaaggtacagagagctgtgatcatgccactgcactcaagcctaggcaacagagtgagtacttcatttctggaaaaaaaaaaaaaaaaggaaaaaattttaccattttaactatgttctgagtgtacaattcagtggcataagtacattcgtattgttgtaccatcatcaccattacccatctcccaaattgaaactttatagtcattaaacaataactcctcattctccccttctcccagcccctgacagccacctttctactttctgtctctatgaatttgaggtccctaggtaactcatataagtagaatcatacagtgtttgtctttttgttactggcttatttcacttaatataatgttctcaaggctcatccatgttgtaacatgtatcaacatttcattcctttttaagacttaataataatctattgtctgtatatatgaacactccaattctgaaaatccaaaatctaaaaggctccacaatctgacacttttcgagtgccgaaatgacacttaaaggaaatgcacgttggagcatttccagttttgaattttcagattagggatgctcaactggaaagtataatgcaaatattaagaaatccaaataatttcaaaatctgaaacacttctggtcccaagcatttcagataagggacactcatcctatactacattttgtttattcatccgttgataggcatttgggttgtttccatctttttgcaattgtttatatacccagaagtggaattggtagatcacacagtaattctgtgtttaatttttgaggaattgccctactgttttccacagtgactgtactattttatgttcccactggcagtgccaaggattccagtttctcttcatccttggcaatactttttatctggattttttttttttttgagatggagtctcgctgtgtcaccaggctggagtgcagtggcacaatcttggctcacagcaacctctgcctcccgggttcaagtgattctcctgcctcagcctcccaagtagctgggactacaggcgtgcatcaccatgcccagctaagttttgtatttttagtagagatggggtttcaccatgttggccaggatggtctcgatctcttgacctcatgatccacccacctcggcctcccaaagtgctgggattacaaatgtgagccaccgtgtctggccttgtttttttttttttttttttttttttttttaataatagtaaccatcctaatgggtgcaaagtcatttcccatcatagttttttttaaatttatcaagttttgattatcacttatactgtttttcatgtctataccttttctttgctttctttaactgacttgttcttttttcatgtaatctttcattagtttctgttttttttttttttttttcaacttttattttagggttgggggtacatgtgcaggtttgttacatgggtaaattgtgtgctgctggggtttggtgtacaaatgattttgtcagccaggtagtgagcatagtacccaataggtagttttttgatcctcaccctctgatatggtttgtctttgtgtccccacccaaatctcatcttgaattgtaattctgtaatccccacgtgtcgtgggagggacccagtgggaggaggtaattggaatcatgggggcagtttcccccatcctgttcttctaacagtgagtgagttctcatgagatctgatggttttataaacatctggcattgtctctgctggcattctgtctctctcctgccgccctgtgaagaggtgccttctgacatgattatttcctgagacttcctcagccatgcagaactgtgagtcaattaaacttctttccttatgtattacccagtctcgggtatgtccttatagcagtgtgagaataggctaatacgttctcttcccaccttcccttgtgaagtaggccccactgtctgttgttcccatctttgtatccatgtgtatacgcagtgtttagttcccacttctaagtgagaatgtgctgtatttggtttttctgtgttaattcacttaggataatggcctctggttgcatccatgttgctgcaaaagacattattttattcttttttaatggctgagtagttttccatgatgtatatgtaccatagtttctttatccaatccactgttgatgggcatctaggttgatcccatgtctttgctattgtgagtaatgctgcagtgaacatctgggttcatgtgtctttctggtagaaagatttatatttttttgggtctatacccagtaagggattgctaggtcaaatggtagttctgttttaatttctttgagacatctccaaactgttttccacagtgactgaactaatttaaattcccacaagcagtgtatagggcttatagtactgtgttcccttttctctccaaccttgccaacacctgttattcttttactttttaataatagccattctgactggtatgagatgatatctcattgtggttttgatttgaatttttctaatgattagtgatattgagcattttttcatgtgtttgttgaccgtgtgtatgtcttcttttgagaagtgtctgtttatgtcctttgcccatttgtaatggggttatttgttttttacttgttgatttaagttccttatagattctggatattagacctttgtcacatgcatagtttgcaaatattttctcccattctgtaggctttttacttagttgatatttttacttagttgatagtttcttttactgtgcagaaactttttagtttcattaggtcccacttatctatttctgtttttgttgcaattgctttttttggagacttcatcatgaaatattttccaagacctgtgtccagaatggtatttcctagggttgttatagttttaagtcttacatttaagtctaatccattttgagttgatttttatatatggtgaaaggaagggggtccagtttcaatcttttgaatacgcctaaccagttattccagcactgtttactgagtagggagttatttccccgttgtttgttattgttgtcttttcaaagatcagatggttgtaggtgtctggctatatttttgtgttctctaacctgttctagtggcctgtgtatctgtttttgtaccagtaccatgctgttttggttactgtagccccatagtatagtttgaagtcaggcagtctgatgcctccagctttgttctttttgcttaagtttgctttggctattcggtctctttttttggttccatataaattttagaatggttttttctaattctgtgaagaatgacattggtagtttgataagaatagtgttgaatctgtaaattgctttgggaagtatggccattttaacaatattgattcttcctattcataagcagagaatgtttttccatttgtgtcatctctgatatctttctgcagtgttttacaattctcattgtgatttggctctgagcttggatgttattggagtacagaaatgctactgatttttgtacattgattttatatcttggaacttcaccgaagtcatttatcagttctaagaacttttgggcagagaatatggttttttcttttttttttttttttttcaggtatagaatcatctgtgaagagagagagtttaacttcctcttcctatttggatgccttttatttttcttgcctgattgatctggctaggccttccaatagcatattgaatagaagtggtgagagttggcatctttgtcttgttctggttctcaaggggactgtttctagcttttgcttgttcagtatgatactggctgtggctttgtcatggataactcattattttgaggcttcaatgcctagtttgatgagggtttttaacaagaaggaatgttgaattttatcaaaagccttttctgtgtctgttgagatgatcatgtggtttttctttttggttctgtttatgtgatgaatcacatttattgatttgcatatgttgaatcaaccttgcatccagtggataaggcatacttgatcgtggtggattagctttttgctgtcctgctggtttcagtataccaatattttgttgagaatttttacatttatgtccatcagagatattggcctgaagttttctttttttgttgtgtctctgctagggtttggtatcaggatgatgctggcctcatagaatgagttagggaggagtcactcctccttcattttttggaataatttcagtaggattggtaacagttctttttacatttggtagaatttggctgtgagtttgtctggcccagtgtttttttctggttggtaggctttttttattttttaatgactgattcaactttggaggaacacattactgttctgttcatggttttaatttctttctggtccaatcttgggagtttgtatatttccagaaatttatccatttcttctaggctttctatttggtatgcatagagtttttcttaatggtctctgagggtctttctgtggggtcagtgataatgtcacttttgtcatttctgattgtgtttatttggattgtctctttttttctttattaatctagctaatgatatatcaatcttgtatattcttttggagaaccaaaatttggttttgtcgatcttttgtgtgaatttttgtgtctcagtttcattcagttcagccctgattttggttcttctgctagctttcaggttggtttgctcctgcttttctagttcctctaagtgtggtgtcaggttgttagtttgcaatctttctaacttcttcatataggcatttagtgctgtatagtttcctcttaacactgccttagctgtgttctaaagattctgatatattgtgtttctgtttttgttagtttcaaagaattttatgatttctgccttaatttcattctttactcaaaagtcattcaggtgcaggttgtttaagttccctgtaattgtatcatttttgagagatcttcttggtaataatttctatttttattgcactgtggcctgagagtgtggttggtatgatttcggttttcttgaatttgttgagaattgctttacagctgagtgtgtggttgatcttagagtgtgtgctgtgtgcagatgagaagaatgtgttttgcttttgttgagtggagtactctgtagagtctcctaggtccatttggtcaggtgtcgagtttaggtcccaactatttttgttagttttctgcctcagtgatttgtctaacactgtcagtggggtgttgaagtctcccactattattttgtggttgtctaaaactctgtaggtctctaagaacttgttttatgactgggtgctccaatgctgggtgcattatatttaggatagttaaatcttcttgttgaattgaaccctttatcattatgtaatgcctttctttatccttttgatcattgttggtttaaagtctgttttgtctgaaataagaagagcaactcctgctctttttttgttttctgtttgctggatagatctttatctccattctattactttgagcatgtgggtgtcactgcatgtgagttgggtctcttgacagcatatagttgggtcttggttctttatccagcttgccactctgtgctttttaagtggggtgtttagcccgtttatgttcaaggtcagtattgatatgtgaggatttgattctgtcgccatgttgctagctggttgttacgtagacttgattgtatagttgcatcatagtgtcagtgggagatgtattttagtgtgtttttgtggaggcaggtaatggtcttttgcttccttttttagcactccattgaggaccccttgtaagtcaggtctcatggtaatgaattccctgagcgtttgcttctctgaaaataattttgtttttcctttgcttatgaagcttagcttggctggatatgaaatacttggtttgaatttctttaagcatgctgattataggtccccaatcttttctggcttgtaaggtttctgctgaaaggtctgctgttagcctgatggagttctttttatatgtgacctgctctttctttctagcttccttttaagattttttctttcctgttgaccttggagaatctgatgactatgtgtcttgggggtggtcatcttgaatagtatctcactggggttctctgagtttcctgaatttgcttattgacctgcctagtgaggttggagaaattttcgtggaaaatatccacaaatatgccttccaagttgcttgctctctctccttctctttctggaatgctgatgggtgttaggttcgttttgtttacataatcccatatttcttgaagtttttttttttaattcttttttctttatttctgtttgcctgtgatgattcaaaggagtagtctttgagctctgagatttttttcctcagttatgttattaatgcttccaattgcattatgaaattcctatcatgaaatttttgtttccagaagttcagttttgttcttacttaaaatgtttgtgtcagatccaatcatggatcaaaccaccattttactggtttccatgggtggggcttcagccttcttctatatcttgtcgagcttccttgccttccagcttctgaattctgtcattttagccatttcagtttggttaagaacgattgctggggagctagtgtggttatttgaaaataagaagacattctggcttttagaattgccagaattcttacactgtttttttcttacctgtgtgggcagatgttcctttaatctttgaagttgctgtactttggatggggccttttgcttttatattatttgatgccattgaggattttactgtggtataagttgggattagtcaattggcttggtttctgtgtgctttcagggccagagctcagctcagcacccctgggctgtgtgctctaaccctgggggtgcactgaacaggccagtggctttgatttctggtcccttgaggtcaagcatctgctgcactggaggagccgagatgttcccagactgctggcaacaactttccgatggtgactgcccgagaaagtgctctgggggggcgtggggcggtgctttgggagagtgcacttgtggtgggggtaaccatgggcaagtgcgcactggcaggggaggctgcaggcaagtgcacaccagtaggtattggctgtgggtgggtgtgtgcttgcaaaagcgctctgacaggaaggcagaggctgttggcaaaagacctatggggtggctgttggggagcatttcggcagggcagctgaggctgtgttgcaagctagtgagacagacaggaccctttgagaggctggcagacagggtggcattcagatcaggttggcccagtcttgtgggaaagatagccctgctctttctacttctggcagcgaactaaggctaaagccacctagaggagtatatcaagatttgggtgatgggcacctatcagggaacctgccccaatagtcacgtagtttcttttctgttttccctaagtgtcggctgggttgggaaataaagggacagagtacaaaagagggaaattttaaagctgggcgtccgggggagacatcacatgtcggtgggttccgtgatgtcccacaagctgcaaaaccagcaagtttttattagggactttcaaaaggggagggagtgtacaaatagggtgtgggtcacaaaaatcacgtgcttcacaaggtaatagaatatcacaaggcaaatggaggcagggcgagatcataggaccgcaggaccgcaggcaaaattaaaattgctaatgaagttttgggcaccattgtcattgataacatcttatcagtagacagggtttgagagcaaccggtctgaccaaaatttattagatgggaatttcctcttcctagtaagcctgggagcgctatgggagactggggcttatttcacccctacagtctcgaccatagaagacggccacacccaagggggccattttagagacccaccttcaagggcacattctctttctcagggatgttccttgctgagaaaaagaattcagtgatatttctcccattagcttttgaaagaagagaaatatggctctgttccacccggctcaccggcagtcagagtttaaggtgatctctcttgttccctgaacgttgctgttattctgttcttttttcaaggatcccagatttcatattgttcaaacacacatgctctacaatttgtgcagttaacgcaatcatcacagggtcctgaggcgacatacatcctcctcagcttacgagatgacaggattaagagattaaagtaaagacaggcataggaaatcacaagcgtatttattggggaagtgataagtgtccatgaaatcttcacaatttatgtttagagattgcagtaaagacaggcataagaaattataaaagtattaatttggagaactaataaatgtccatgaaatcttcacaatccacattcttctcccatggcttcagccggtccctccgttcggggtccctgacttcccgcaacaggcacctatggccatgccccattgcagccattactgcgccagaccctctgggctctgtgcagactggcattctgtctctggcaactcattgggcagttctcccttgcaactcaaaggtctgtgcaggtcatggggtctcccatagttaggatcctagaggatcgttgcaagagtgggctgctccatgcctgttgcacttgccacttccctaagagctgctcaaggccaggaacaagtcctctagtttcttcttttgtgttgttgtgaattttaaacatatttattttataatcttgtttagattatggtattagaatcctcccacttgttatggctattgaatcttccttatgttgtttattttagcagatactgttattttgattttcaggtcttctttggcagggtagctttttcttgtgatcttgtattctctagatggtggttgtatatttgtttctgccttgcctttagggatttgacagttagtggtgatgcaccttggaaggggtttgtaatgaagttacattttcatttgtgtatgttgaaataataaaaagaatcagaggaggaaagattgaagatagtgggtagcaagtagctaattaaaagaagctagtgcctttgaaagttgaaggcggtgggaccttgaacatgatggctaattggggttaggtgggcttagatatcacaggaagttgcaggagcctccttctattgagtctgtattttctttgagattgaaagtgagatgttgaatgtgtgaaatgactaatatgagtagatatttgataatatcaaatagtagcatttttgggctgcatgaagagcttagtcaattgtgtctataatcttaatagggagactcttctactttgcatgtttatctttggctagctggtgtggtttctgggaatgtgaaccttgcgatcaatcaagggttgagttatttcattgctgtcggggaggagggaatgcctgtggtgcaagtgagctgagtagttgaaatgacatgtcgactgtagaaccaaaggctgtaaagactacagggaagaaagtagaagggtttatggactggaggtcaaagaaggaccatatttcaagttgagtaagaagattagaaacctacatttatgattttagaggtagaacaagtgaaaagagaaggggtcctcagttatagggcaggtgagtatcattgagataaataggtcaagaaactaagatcactgtatttgggatagttattataccccgaaatttaaaatggtggaatacgatttgatatctttcttgaggcagattttaaataattattggaaataaaaatttttgcagataggaaaatatttggtgtaaattgagttattgatgtatatgatcattttggtatatgatgaatttcaagtaggaataatctggatgttaattttttagaggagttctaaaaaattaacatccagataatttttcctgtcatagaatgataggaaaaaaggaatgtcagaaataaatatgtatgtgtcagtttcgaatttgtttttaaaaaaaatgcactgaattttagtaattttgaaaattctaaattttaatatactatagtttttataaccaagtgtcatacattttgttgcaaaatttaaactgaaagaatattttttgttaaaactcgccttattatcctagttgtagaaggagataaaataaaagaatgtgaactttcatttaatgttttattttcttgttaactatttggaaatttatattagttgacactgttcttgcaaaatattgtgatttttcttttgtcacaaaagataatcatctgtatagtgcaatgtggttttaaaaaattcatgtgtatttactatcagggagttataataatccaagtcaaaagctccaaatgatgagatttcttgtagttagcccctgtgtcataaagatatagtatcttggtttggatataaggatttgtaaaggcatttcactttaattggctatgtctgtcagatgatattattccagtgtcttctggtaaatctccaaggcattgctgcagctttacctacctaaatgtaggagcgtgctagtaatgtggaggttactttttctgaagaggcaagttagctttttattgtaagacttaactttgaggacggtatggtaaagaggtaaaatagcttttaaatttagggatgattaaatggccaccacttccatgttacctacatctaacattcatttagcaatatttactggacactttaccatatgctagactgtagtgatataaagtacagaaaagagccttatcagagagcttatattctgataggggacagagagagatgtatgtaataattaagaaaaattccttaaatacataaaaagtatgtatgtgtatgtgtgtgtgtatatatgtatatatagttttctttataacactatatgtatagaatatgtatatatatatatagtttacaacactgcatatacattcaatgtatatagtgttttaaataaaatagtgttgtaaagacaatgaaaggataaaggactagagaatgactagtaacgtggactaaatttatgtaggctggctagggagggagggagaatttctagcccgaggaaacaacaggtgaaaagcctctgcttttcaggtgagaatgtactttgcgtgtttcacgaacaaaaagaagggcagtataatgagataatagaaaaatggtaccagattgggtctgaaaagtaggcagggtgccaaacattataaagctatgaattgtattctaagtacagtgagatgctatgaatgattttaacgtgatctgatgatctttctgaaaagatcactctcccattgtggggaatggattgtagggggtcaggatggaagcaagaagaccagtttcattgtagtagccctgatgagatgtggtggtgtagtggagatgaagagaaggaaatgaatttaggaggtattacggacgtggagctaattggtcttgctgataatgagagtaggagatagagagtgatcaaggatgaattttaaggttttggatctagcagttggattgatgtcccaaatatgggattgtggattgggtagaattctgttttgaacctaagtttgacatgcctttttatatcaagtgcatatgttaagtagactgttaaatataataatgctaatgctaataatttcattgataatgatagcagctaacatttattgagcatttactcttatgtatcaagtacttttataagtatattatctcattgaatcctcctaacagctctgtgagctaggtactacctctttctgaaaacggagatactttgaatttgtccaaggtcattcaactaaaagtggtgaaactgggctttgaaccctataggctcactccaaagcccatattcttaagcattgcaccacactacctttggagtgtggagcccagattaggtataaaattttcagtcatcagcttagagatgatattaaagccacaagccttgataggatcaactactgagagactagggaagagaaggctgtctaggatctaaccagttagaagttgggaacagagggagccagaagtggagacagaggttagaaggaagagtcacatgagaacagagatgaacacgttggatttggcatcgttgaggttgttggtgtcctctatgagaagctcctgtggaatggtaggaacctaagtcctgctgatgtgcattgaagagggtttggcaaatgaggaagtactgactgaggacagcgaactcttgtgaggactcgtggtgggaaggagagctgaaaaatgaattgttatcaagaggagaaagccagggccatagacacattagaatatgtcatatggtgattagaataatcatgtgaagaaaaataaaggtgctggagaaaaataagacaattttaggaagtaaatcttggtttcagaaggggatagtcacagtttagatggtagataagtatcttaaggaagtaggtgacagctattgtttagggctgaggctttagatctttgaaaaccttgtaatatgaacgaagttgctgtctgtggcatgaagttaacagttgaaagaaaaataatgtatgcaaatacatatgtgagtgtatgtgtgtaactttttgacctttgaattgttgataataggaagtagaaatttgcagaatgaaaaaaagtagtattcatgtaactcattatttattgtatttttaccttctatattgtatttaaattccattaatatttcaagtagctttttttcccctctcaccttaaatagctgctaacaaaatactattctctatcacatattgagaaaaaaattcctgatagttactctaagtgttggttcaaagtaattgtattttaggtacatagctgtattgatgataactttatataatcatatatatatcacatatataggacataaatatgtagcataaaaaattatatataataggtatattatatataaaatatgtattctttatattctatatatatagaatataaatatatatagtatataaagttatgtctcccataacttgaagtccttgaagtcttttcatgttgaatttttctttcccaacctttgtaagtaaaatgcaaacaccttaggataagtttcttactgtgtttatgtcctttgtgtctgtcatgatgaattaactttaagagattatggttgtctcagccgtttgtttacttaatttatcatgattatgcttgtggcagaaagtaatataatatgtatctcctacaaactaagaaactgttagacaggagaatctttttcattctgtcttgttaaaaaaagtttcaatgaagtaaaaactaaaatagaaatgggattgtaaacagaagaaagatggatcttttggaaaaatcagtgttgctaatttaaaaatactttttaatattattttacaggaatgtttaggtgtccataatgtcactaaacccgtgtcttcactttgcaatggaattcattttctacttcatccaaaagttctgtatgaaatctctgtatttggcattcaagagcccgaaagtgaggtatgacattaaacatgagtgaaaatattacagtaacttagatactcagctaaatcaaggtgatattctaatatagtttagatagcatggtgagaaactaaaaagaaacctgtctttggtgcattggttcagttgaagtgttatttaaataaaaataaatgttacataaaatgtgggaataaaaatacaggacacacttgatttcaaaaaattcagatcagtttacttacatttttcatctaagatgtagagaactatacagtacaggtagtaagcagattatttcagttagggaaatttttactcaagggacaaatgtacattaaaggtaaaaaattagaaatattaaggaagaaaaacagaacagaatgtaagatgatgctgtggaagtacgaacatttgaaagaaagagatgttaattatagcatctttccacatgctataaaatgttccaggtgtgtcaggtgacctagcgggacatctcatttgactggtttatcgggtctgtgttgttgagcaggtgaacactgctgccaaggccattctgttatacctgcttcagggacgattgatgatgacagcattgacctggaacaagtttattgaatctctctgtcctgtcatcccaatactacaggtattctgtgaaattcactttttatgataccatttatctttggctgggtgtgattgatttaaatgcatgcaaacagctaaactgtcaagttgtgagagaaatgaagagaagctgtgaaggcgctggggataagtgaacaggaagtgggtggctgtcttgtttctggcagaaagttaaaccaggatagctaatttgtctgtatatattttatatatctgggtgggaggttaaaaagtgaggtgcattcacagcattgactgtgaaaaatagaactcaaccttatataaaggcttttaggcagagctaacagtgctttttaaggagaccttacataactaacttgcctcatgagttctatccatgcatatgtatgattagagtgataccgtaattaacatgctcctagaaacagcttttttttttttttttaaaaaagcaatccttctggacattaaaggagtcagtttcctgtctcttttggatgaaaaggtggagttcagaaatgccatcataagcacagtcctcttttagaagagagagcctgggccttgtgccttgagactcacagattccatgcgtgtagcatttagagcactccatcttcttagggtggggatgggctgaggatctgtgaggtgcttcaccgaggggaggtgccactattagaatcttagaaaatagaaaaatcagcaagtgtcaagaaggttggcatgttttcctgaagttctcctgtatgtatgtgtattttcttttaaatacagttttatttaggctccttggctcatagaagttattttaaaaaataatgattttattcaactgaatccaaagacatttatgagttgctgataggacaatacaattcttattttcaagttgaaaagttatgtatacaattagacaataatttctctttaaaaacaaatctattagggctatgccgacacagaagatcctctgggtaactgcattctccttctaagcaaagcaagttctgacacagaagagatgcttccgtgtactacccgattaaagtccatgctgcgacttttgctagtgaaaaagccatcgtgagtacaacgtaatcttgtgaacgtcaaagattgatggaaacatgctaagaaagtatagtaactatatataatttgaaacaaaactaaagaatttttaaggagggtgttattccattactagaggaaaccaatgcgtgaaactaagcagatacaaggtcttgtatgtacttgctgacgtttcatccactttacagccaagttattccttgccagatcagcctgtgttacaggactgctactaagtgccgctcagtagtgccctaggcaagttggagagccatggagataaatagatggtaaaaattatagtgcattcccatcttctctttagaaattgttagccttccagagtgatccttttgtaaacatctgttctgaatattcagtttttcataagtatagtaggccagttgtctcaaataccagagttatgcaggtattttaatcccatatagctgtgttcttacttggggaactgaaaacatatcctttctttgactgccattaatataagcattgttttaattaatgaaaagaaggagaatgatactgtttttcttccttctctgtcattgcaacatgaatcttttctattattatttttaggtaacagtggttagattttcccttactgaaaaaagaaaaaaatgctgagtcgagatggataagcagggataaagaggaatagttggttgaaaaggctaggaagaatggacagacattcttttcacaatggataatttgtgtttcccaaaccttacatcaggaaaatacagcagcttatttatagacagatcattggactgaaagataaggaaataggtggaagttaactaaactattaagagaatggaaggaggaaaattatagtctttaaaatatctctgtattgtagagagtaatgttatgggtgatccaggaagaagtagggcagagggagttaacgtgcttgtgttctcaggggttgtcttctacacatgcagaaaagctgttccctgttaattaacatgctagtgtggtactccttacttgaacaaacccccagtttggagaattaacacaatagggggcatttcttgtttgtttttcgggcccaaggtcctcagtttaataaagacattctaaggcaggacacccccaggagcatagtgcaaggaaaggccagatctttctttgggtaagataagtctctattatatagaatttgaaacaattcaaatgacatatttgttttccttattgtattaattctaccccatcccatcaacccatccataaactccatgtagacaggaaccctgtccgttggctaatctttatattctcagaacttcatagcgtaccttatacataaatacacagtcatgcgttgcttaatgacatggatgcatcctgagaaatgctttgttaggtgattttgtccttgtgtgaacatcatagaatgtaccttacacaaacctaagcaataataacttaactacatacataacctaggctatatcctatagcctattgcttctaggctacaaacctgtacagcatgttactgtactgaataccatatgcagttgtaacacagtggcatttgtgtatctaaacatagaaaaggtttagaaaaatatagtaatataatcctatgacaccactgttgcatatgtgatctactgttgactgtaacattgttatgcagtacatgactgtactcaaaagttttaaagaatgacatacatgtataggaataactggattctggcatcctatgctaaacctaaaaagatgctaaatgtatataccagagaacaagatgcataaatacatgctttacatatctcatctctagccacctttgctaggggttatacctgtctctcaactgacaaccccagatgtgaatacagatatcattggcttagaatgtaaggaacaaaggaaaactattaggtaggtgtttagcctttctaagctctcttgaggtaactcaggaaatggagagggagaaagtttgcctgacttattagtcctctggagatgatatcagttaacaatattgcagtaaatatctactttgtgtttgattcaggaagtatttattgggtgtcttactatgtatctatgagctgtgggaacgtagcagcacacaacacagacatgggccctgccctttcagcatttagtgtgtaaccgggaatatagctcttattatcaattattctttattattaattgtcataaagtgagataaaagttatgatacaggggctcaaggtggcaggcctgcatacagaaggcaacctgctctagtctgtagtaggagggccaccctaatgatgcatgttttaattgttgtcttataggtagttcttaaaacctggcaacttgtattattgcttaaaatttgtccagtttccaggtagttcaagaacctatcagaggagtgacagatacatggttgtctcaatatctgccgcctcagtgacctttgtccactcagtggtttttctgtttctctatttcattgtttagtggcatacagtatttactcttttcttgaaaggtctcccacctccccactcagctgaccttattcctaatcccttccagataaggaaaaagtatttgtattttcatatttgacaggaatctgtttggcccctaatatgagaagattttgatacattgtagtgttatcacacttccattatgagcgtcattactctcctgtgggttcaacttaacatttggactgtggtcagcggtctgtgatactttttatggtggagaatagttcactagatttgaagacaggagttattgatttaattcgcagatgtacttattgaagtttactgatatttaatctcagtgagtctgtctcatttgtagttattattttttgtttctgatgtttattttataactattacattgaataaatcattataattatatatcgaagaatttttagtagaaaaagtaaattattactagtaatggcagtataattgtgactacttattgtactttgttgatatataattacttgtaattacaagcccttttaaaatagacatttgcatatcacgaaagttcgacttaagtactttgtgttctcagggtccgttcgctagcattaaagcttttagcattccatcttaccagtgaagaaggggctgatacaaagcgtcctctaatagacgccagagttctctccagagttactgatttattcattgggaagaaacctattgaactcagactggatgacagaagagagctggttattaaggtgactataaattttgagtttattactgtgtggtaatttgatacatttttatatcatgtattttatgtgacattcttcagtttgtgtatgtcctggggagggagagaagtatggggattcagggctggtttgaaattgtgttctggctttatctggcttctagatacgttgatttattgcagtggtcccaacctttttggcactagggaccagtttcacaggacaatttttccatggatcagggcaggagtattgttttgggatgattcaagtgcattatatttattgtatactttatttctattgttattacattgtaatatataatgaaataattgtacaactcaccataatgtagaatcagtgggagctctgaacttgtttttctgcaactagacagtcccatgtgggggtaatgggagacagtgacagatcatcagacattagttaaattctcttaaggagcagccagccaagatccctcacacacctagctcacaatacggtttgcactcctatgagaactgaatgccgccactgatctgacaggaggtggagctcagatggtaatggcagcaatgggcagcggctgtaaatacattttcctgtctttagctaggactgtacctatagcatactggactgatggagaattctataaagaaagctgtccactagtccactgttttcatggattcattcctgtgttttgtactttctcatttcactcaagtttgcaatctgtctgttttattttagactaacttgccaaggcctgtagtagtatggtagagccacatgtaatacagtcggtttttttgtttgtttgtttgctttttaatggggaaacacattatgttcttctaaactgaatgttcagggctttatgacagtgctggcagggggattggagagtcttcactggccacataccaggtctggttgggacttccctgagtactaagccattggtagtcactcctgtgccctgatgtatggaggaaggcggggagagggcattctaatacgtcttctgtgagtccatgttaggactggaagatagcagtgagtgggagaaaggagcttcatctttgttattttcttgtccctttttcctgatgctggttttgccacctcagattctgttctagcatgaagtgacagtaagggacttgtctggggggtagctttgaaggggtgctggacagcaagtcccagagtgctgtttgctctggggtcttctaaaagaaagaatggagaggcccacgggaataccagctggtggcttctgggagcaacagggaaatcttgagtcataggtctgggtcgcttttctcaggttagcctggtactacctgtaaagatgttagggaacatggttgttttctgttacctttgtaaggttgctaatggattaatgggttatgaataacttcctagcaaaaatgtatattaagaagagaggggccgggcacagtggctcttgcctgtaatcccagcactatgggaggctgagatgggtggaccacttgagcccagcctaggcaatatggtgaaaccctgtctctactaaaaatacaaaaaattagctggggttggtggtgcatgcctgtagtcccagcaacttgggaggctgaggtaggagaatcacctgagcccaggaagtcgagtctgcagtgagctgagattgcaccactttactccagcctgggtgaccagagtgagaccctgtctcaaaaaacaaaaaaaaaaaaggaaaacttatttgacatgatgactctttattttagatcttaagttccttcctgacctactgcatcattgttgcaaattttatttatttatgtatttattttaaacttttatttcagtttcaggggtacctgtgcgggtttgttatataggtaaactcgtgtcatgggggtttgttgtacagattatttcgtcaccctggtactaagcctagtacccgatagttatttttcagatcctctcccgcctcctaccccccaccctcaggcaggccccagtgtccgttgttcccctctttgtgtccttgtgttttcatcatttagctcctgcttataagtgagaacatgcagtatttggttttctgttcctgtgttattttgctaaggataatggcctccggcttcatccatgttccctcaaaagacatgatctcgtccttttttagggctgcatggtactctatggtgtatatgtaccacattttctttatccaatctgccattgataggcatgtaggttgattccatgtgtttgctgttgtgaatagtgctgcagtgaacatacacatgcatgtgtctttatggtagaatgatttgtatttgagtatccaacatctataaggaacttaaacagatttacaaaaaaaaaccaaacagctccattaaaaagtggacaaaggacagaacagacatttttcaaaagaagacatacatgtggccaaaaggcatatggaaaagagctcaatatcactgatcattggagaaatgcaaatcaaaactgctacgagggaccatctcacaccagtcagaatggctatttatttattttttttgtgagacagagtttcactcttgttgcccaggttggagtgcagtggtgcgatcttggatcactgccgcctccgcctcctgggttcaagcgattctcctgtctcagcctcccgagtagctgggattacaggtgtgtactaccacacccagctaatttttgtatttttagtagagatggagtttcacaatgttggccttttgtgtttctagtagagatggggtttcaccatgttggccaggcttgtcttgaactcctgacctcagatgatctgcccacctcagcttcccagagtgctgggattataggcgtgagccatcgcacccggccagaatggctattattaaaagtcaaaaaatagcagatactggtgaggttgtggagaaaagggaatacttacacactgttgatgactgtgtaaattagttcaaccattgtgaaaagcagtgtggcaattccttgaagacctaaatacagaactgctacttaacccagcattgtgtgaatttacctgtaattatgttggttatttaaataagttgactttttgagcttttgttcatagggcacaaactataaaatcttattggagaattggaagcagataaatgtaattttggtttttttttttttttggtttgtagttggagactgttgaaaaggtatatgaaatcttcacctcagatgatgttgatctcgttttgagaaagtcagctgctgaacagttagctgtgattatgcaaggtaatgtcttttaagggaaatgattgctgtactgctgataatagaattttagattgccatatggtactggcaggagttggcaactatggtttatgcgccagatccagcctgtggccttttttttgacagccctcaagaatggtttttgcatctttagagttgttaacaaaatccaaccaaaaccaaagaatatgcgagagaccatatgtgtgtgtctagcaaagcctaacaacatgcttactaacctggttctttacagaagaagtttgctaatgccttattattatttgacctgtaaaatgccatttgatagaattatcttctttctaaaatattagtgtacttccaatagtgaagtgcatgttccttcctctgtttactgagtgcatgcatcatattttcaatctgtaccatcttgcttagggaaattaatcaaataatacttttgtggtaggtaaaagaaaaatagtacactgtagctatgccttttctttaaacgtttatttttatttttttaaattatactttaagttctagggtacatgtgcacaatgtgcaggtttgatacataggtatacatgtgccatgttggtttgctgcacccatcaactcatttatattaggtatttctcctaatgctatccctcccccaacccccaactctgtgacaggcccgggagtgtgatgttccccgccctgtgtccaagtgatctcattgttcagttcccacctgtgagtgagaacatgcggtgtttggttttctgtctttgtgatagtttgctgagaatgatggtttccagcttcatccatgtccctgcaaaggatgtgaactcatccttttttatggctgcatagtattccatggtgtataaatgtttatttttaaaaacaactagtgtaatacactgttagctttgtttgtagtgttgttattccataggcttttgttctttgggttagttttgaatttttccccatacgtgatgtatgtactttaatatttatgagaaatgataactttgagtttatgtaaaaagatttttatggttagcacttcttgtcttgacattagtggaaactggaatgagagagttatttgaaaaaacatattccacatatttttagttttaacaacaatcacacagactacagaaaagaagactagaaaatgtggaaagccctggttaaaaaaaagatcaagaaaaactcgttaaagagtattccttcaatattgttaacatttcaaaagtatgccttataattttggtatgcactatattggggggcaatggaaatttttttttttaagtagcagctaaagattgttacaatgatagcttccacttcaatatcagtatgtgagtgtatgtgtttttcctaatgagaatataggagaaaatttgtctgcaagttgttaaatacttgtaacgaatatataatcaattacagttttgggttccggtaacatttgtgtgtgcgtgtgcacatgtctatacatataagatttttttatgtatatacaaaaacttctttattacaaacataatatgtgaatatatgcttattaaaaagaagctcaagttctccagaaatatatagtgtattataatcttgttccttttatatttgctattaatagtttgaggttagagatttttttatagatagaaaaatgttcatgttgtaagtcatattttacacatgagcttgtggagaattataaacatttgaaggtgataaatttggaagagtcaatgaaataatataaagaagataatttgcatgtataaatataagcattcatttgtacacttaaattctcgtagttttcagagtctgaactagttccataattctttttttatagttttgtattttatgtgacagaagtaagatatgctttttacttaaacattttcaaattggacaggtgtacgtaaagtaaaaagttaaaagtttcatactcttatgtcaaccccaggtctaagtatttttaatagtttgaaggttgtgtggatatcagttctgagtatttcaaaatacgtgttttaaactacaaaaaatgtgctttaacttttagtaactttttttatctacagatattaaaatgcatgctgtggtgaaaaagttatgcttaattgacaaaataattgagtatttaaatgaatgtgtgagtcaagatggcaaggtaaggctaatgtgcatctagacattgttttacaggctgttttgattaatcagatctgaaattgaactgagcagaatttggatgagtacttggattttaaattctaagtaacacctcctatctcattcattttttttttttaaattcgaaaagtggagtctctataaaggaaaactaatcctaaaatttccataagataggtgatagaagtatatacgaaacttactttcagtggaaagtaattcctagtatttatttacattttagtttcagataattttgatgaaaacgcataaaatttagagtaagataatattatggtctgtttgatctcacctgataattggtgaaaatgaaaagctgtgtttttcctcctggcccaggttgtagaatgtttggtacaaccatgcctcacactcttgaggaaggttttatgtggtgatccagtcatgcgtgtttcgctctcgcaacagtcttctcttttgaccgtgttattcagaggtaaataaaagaaaatctgctaataattagattgttcttaaattttaagtgtttcttctttaattgtaagtcacatttactttttattttactattagaacaacagcatttattagtgaatacactactaatgtaaatggaaaatgtttaatatttttgtggaaattgctttctaatcctgttgctgagtggaggctagagctgagaaaagctgaaacctctgattgttctttgtgccttgatgtagatgtcatctggtgctcagacagtaaactattatctataaagagagaaagttgcagctgctgttattactatcttctttccaatatctctttcgtctttcttgttttgcttatacctttggatcttggtacattttgtctgattatttcatttgacaggtgttaagagtataggctcaacctgtgtgagtagaaactagaccatcctaaatgactctgagcctaaatttattacattctataaaatgtggtttttaaaaacccattttaatttgattctaatttagtaaggtgttagatgaacacgtttcatgtagttttgtccttcctgtcttctctgtttttttttttttctcaatggagagcttggtaacattttgtactattttttttcttagagacttaggccactgctttttgatattttgcaagagtcatgtagaatcatctgaatgtgctgaagagtcacgtacaagcatctgaatgtgcttcatcttgtctattatcaggcatataggagataagtgagatttatgttcaaaatatgttattataatgtagtcattttattttagcatcttttcctcctgttggcttctgcttgccaagtgagtaagatgcagtttatttaagtagcagccctaaaaccaggtaaagctctaaacagattcagtgtgtttaggctcataacattttgagtggactataacgtttttataagattgtatagactgatcatctgaaagagcagcagttacggatttttagttttctttaatcctgttaataattgtcttcttattaacctcattcacttgaatttagttcctggtttaccttttcatttataattttcatttaaattattcaagcatggaacttattatgaacacctactggattcaaaagcacatttcaaggcaatataatctatacccttttcagtatttcagtttttctatttcattgctgtttgtggaaattactttcaatgagtttgagaatgaatatagtatcctccattaatggatttagtttcaggaaaaattttacttacttacttatttatttattgagaaagaatttcactcttatcacccaggctggagtgcagtggcacaatctcggctcagtgcaacctctgcctcctgggttcaagcatttctcctgcctcagcctcctgagtagctgggattacaggtgcctgccaccatgcctgggtaatttttgtatttttagtagaggctaggtttctccatgttggccaggctggtctcgaactcctgacctcatgtgatccacctgccttggcctcccaaagtgctgggattacagtcgtgagccactgtgcctggccgaaaaattaatttttaaccagctgcttaaccaagaaaacccatttctcagcaaacgtttattaagcacatgctttgtgctaggtgcaatgctaggcccttgggttatattggtgagcatggtaaatgaccctcatggagcttacagtagagttggagacattgacaagtaaatatacagtacaccacagtaatacttgtaattggggattcctggtgccagaggacatgctggtcagattggttggtgaaaagtatcagagattgtttctagggaatgtggcatctaagatggaatttcagaaatgagtaggagttcaaataggcaagattgacttctagatggagccgtggttgtgtgtatgagaaattgatgtgtttgagatggagctggctggatttggggagtgtggagtgaaggggaaatgatgggatgaggcagggagggcagttcgtgcagggcctgggagattttattaaacagcagtgaagagctgtttaaggttgttaaacaggggagtatgtgttttaggaagattatttctgtagcatggatagtggatcaaatgagtacaataaataacttctcagataacactgctttgaattataaactttatgttatgacagaattctatagtgtatttcagggttagaaattaacttagaaatcatttactataccatctgtgtgaggtctagagagatttagcaacttggccaaggctataaccaaaaaatggttattgggttatttactttgctactgagagagaatcgaaacttccttacctttgtttgtttctgttttaaataatcacagacctatacatccccattgtaaaaattcaggcaatatagaactatacaaattctaaaagttttcattttcttctcgttctcaatttccccaaagaagactgttctggttatcattaggaatatatttttccgaatgattttttctacatacacatgtagttttcattctgtatattacagtattgtgttgcttccttttttcaactggaaatgtaacttgaatatctttctatattatttcatgtgagtatacattctttaaaaaaccctaaaaactactgcactggtgttgcagaatttcagtttgctatgttactgggtatttgttttagatttttcaccatgacagtaatcatgttgtgtgatcatctttgtgcattcagtgttggaattcctaggtcaaagagattttataagataatggttaagttcctttccaaatcactctcaccaaaggtgtttaaaaatgcttattttcattacaactttgccaacactgaatatgtctcattaattttttttaatcttataggtaaaaatatataattgttttattttcttattttagttttagtgaagttatcttttcatatatattcaaatttcttcatctatggattacttattttcctgttgtatttactttctttttagtgacttgtagggttttttattataagataggcacaatccttatgcttgattttatgtgattaatattttctctcaacttttctatcctttaaatttatttattattatatttttaaccttaaacttaaatattttatggaaacatatagaacttttctgttatggcagttgggcaattttttatcatgctcttcaagtaggactttctctagttccagattgaaaacacttttcctgtgtttcaagtgttgtttaaaaaaattaaatttgaaatcaggcaaaggcattgctgtaattcttatttatttggaaatattatggttcattctattcatcactgatgtgaaatgtcttttattataagttaatttttacatgttctctgtttctttactttttggtttatggctatttttaatcatgccaattacataaggatgattttcttttcctgcagttaggaaaaatctcttctctcaaaacttcttattgctgcttccctgaatttgctaactgtgtattatgttgttattcctgtgagataacatcgtacttctttgtttagaatttcataggtttcaaggagattgtagcattgggatcattacagaagtgggaactgagacttaatgttaaagaatctcaccagggcatttagctaagtagtaagtggtagagctagtgttaagtctgtccattcagagcacttcccttttccatcatcttgtcataattaaaaggaaccaaaacaatgacacagcccaaggataacattttaaagtcaaatccaagttctgtgatcacatgtttgtagtaaagggcaaaagttataaaataagatctcttggtgaggaaactttagctagaattatctgactcggcataaccttcttagaggctgtatcagtttgtttctctaattacctaagactagacagtgtctagtgagtgtatctacaagtgtggctcctggactggcagcatctgcatcctctgagaacttattagaaattcacattcacaggctccaccctaaacctatccaatcagaaactgttttaaccagccttccaggtgattcttgtacatccacaagtttgagatgaaagcctgtgttttagtgtcaccttatctgggtttatgttgcatttcttttctcttcaaatcaagatattttaaatttgaagttcattctttctagacgtacaaatatttcataaagttgtgcttctttttattcagtttccttaatatttcatgaagattgtagtgtcgtgactgaagttggagcactattttgtcttctattatttgatgaagtatcgagaatggatatgtggtgagatataagaatttataagttttttactcttaactatttatctcaggtatctgatgtaatcttatagcaaggcatggaaatttctgatttacgaagcttatgctgtccatgctacacatatgtggtatgaattttgatttgaataaacagtattcaaaagcctattagctcagaaagtctatctcaaattttatttttaaacattactaaatataaactttaaaattactgcagtaatttttgtctttaatacatttttagtacataccttcaactatgtgtttttttcttaatatttcatgatttttaaaaaacctcggaagatatttaggacgatagtatatgattagcgctgatcttgagcaggatccgtgggaggagacgcacaaagtccacctgctagtcccaccactgcattgtatgaatcatttgttatgtggaatttttttttaaaacataatttactcttcataagcaaatctaggaagtagcaaacatgttgtttctatactaaatgatagactcagttgcactgcttgatttcatttgcagtcaacgaagtgaggtaagttgtatttgttagacaaaacttggtctactcagttgtttctttgtttttgtttttcttttatgaaataggtctgttaatccttccaataaaccttctttgccatcggtcttcagtttgcctgtttccgtttttagaaggtaaaggatttatttctctgattttcttgaaggacgaaatgttgttacagaaagggaaatcaaaatctataatttgtcacaattttcatttagcatttaaatcccataacttgggctttcatggttccttcacaatggtgctttgaagatttcagtaagtatatctccccaccaccaattttttattttgataccgttcaaatttacaggaaagttgaaagctatacggtgcatacttgtatgtcgttcagcctagagtcatcaattatttacatatgagtctctttgctttctctctcctaatatatatttttatttatatttaattctccctcacccaccaattggaaataagtttcagacataaattcactcctttcctatatattccagcatgcacatccttaagttaaggacattattctacataactgctacaatatgatcccatctaacaagattaaaaataattctataacatggtgtggtttctccagttatctccaagtatcttttgtgtatattttttcagaatgcaataaccagttaaggttctgcattgtatttggttttcatgtctctttagacttttgtaaaaagtaaattgtttttattgacatatatcgtacataaagcatacaagtcataagggtacagcccttgaatttttctgagtaaacgtacttatttatctcacacagattgacatagaatattactgacagaccggaaaccctttttgtgctttctcattaccttctaccaccccaaaatgtaatcctattttaatttctattgctgtacattatttttgctagtttttgaactttataaatagagtgcattattatattgctttttgctcaacttggagagatttgtccatgttgctgcatgaagcaatcaatagttggttcatttttattctatgtagtattctgtctaagaatatacaacacttttatttaccattctatttgtggatgtttaatttgttttctgttttgggctattatgaagaaatgactgctaagaacattcttgaacacgtgtcattgttggaatataggatatttatgtttagctttagtagatgttaccagacagtattacgaagttgttgtgctgatttacattcctaccatcagtggaaaagtactagctgccccacatcctcactagcctttggtatttgcattaccagtcttaatggtgtttagtttggctaaataatgaaactcacacgactgcagtagtcatgcttagaatgagatcacatttgtgggtgctgggagctgtcttggcttggaagcctcatgtcccaaatagaaaatatgttctctagtaagtgtgctgtaggcatagtttccaggttgcttataagagccacagcactcaagattgctcagagctgtgacatcccatcatgcatttatagtttattcctagatgtctcagtccagatgtggggagtcattttcatcataagcaaagcagcttagtaaattcttgacattccatatctatctgattttactgggtaaagggacagagagttacctcaatatcatgtttgtccgtaaagaggagaaagggttttattactcttttactcacagtaatgttggcatttaaaaaattgttgcccatctgatggatgtatagtgtatctcaaagtggtcctgatgtattactctttgctttttattattttcttccttctgtgtttttcaaacttaattttctgttcattttctaacttactggaggattggccattgattattagccgccctttcatttaaagctatcaatgtttctaagtatggcttttggtatattccacgaatttgatatgccatattttattatttagttcaaaatattttctaagtgttttgtgatttttttttattgatgcaagggttgtttagagttattgggggtaactagtgaagatttagtttattaggttttctagttattttattattaatatttagctaaatattgacattagaaaatattttctatgattttaattctttagagtttgttgaattttactttatggcccagcatatggtcagctttttaaaatgttccatgtgtacttgaaaataataatgtatatgtagtagttgttggatatactgttctataagtctcaaaatatatcaggtttattgatagtgttcagatcttccctgtgtctactttattatatgtgtgtgaagttctttcaggtagcagagaggcatgttaaaatctccactatgacattgtcattctggctgacaatgtattttgaggccatgtaatttagtttgtaaacatgctggtgggttgtctctatcattatgaaattatttctttatctctagcagtgcttcatcatatagaattcactcgatctcttatgactgtagcttccccagcttttatttggttagtggttagcatgatatgtatttttccatccttgtagttttagctgttctgtgtccttaaatgtactttttttttttaagaagtatatagttgagtttttttgtccaatctgacattatttacagttttaatggaatattttaatgcattttacatttactataattactaatatttttggatacagattattagcttgctattttctatttgtccaatgtggtttttttctttctttttcctctctggcttttcttgattaatttttaaaattagtccatgttttccagctgttaacttgtagttacatatacattaagtattttatttatttatttatttgtagcgattgggatcttgctttgttgcccaggctagtcttgaactcctggcttcaagcaattctcccacctcagcctcccaaaagtgttgggattacaggcatgagtcactgtgcccagctaagtattcttctatatacattatttctatatattttatacagatgattattcttttataatatagagattataatttacttccttgactgtgaactagtatttttaccacatcccagacaatgcaaggaccttagaacacattaattccatttatttgctcttcttttttttttcttttattgtcaggtatttaaattctatacatattttaaattctataagatgttattataattattttatgcagtaaatagtcatttagatttgtataccgtggtcgtttctgttactttttattgcttttttggtttttctgcctccatctgagaatttgtttttttaagagttttttattatttaatgtagtgcacttatattagcaatgatttctgtcaggttttttttttttttaatctaaaaattctttctgttttaaaaaatgttatcactaggtatagaattctaggttggcagttggagtccatttttttgtaggaacattggctgtcagttttattgttgcttctttgaaggaactgtgttccccattctcttaggagttccttcagctatatcccacagcactttgcttgcttgcttatttatttgggggagtttattttatttttatgggtatataatagtacatatttatggagtacatgtgatattttgatataagcatacaatgtataatgatcaaatcagagtaattaggatgtccattacctctaacatttattgattctctgtgttaggaacatttcagatctgctcttctagttattttgaaatatacaacaaattactgttaactatttttaccctattgtgctactgaacactagatcttattccttctatctaaatttttatgtacccattagccatcccttcttaattccccccttccccaccatcctttacagcctgtggtaatcatcattctactctttatctccatgagatcatttttttttttttttagctcccacatataaaggagaacatgtgatgtttgtttttctgtgcctggattatttcagttaacgtaatgacttccagttccatccatgttgtttcaagtgacaggatttcattcttttttacatctgaatgatactccattgtgtatttataccacattttaaaaaatccattcatctattgatggacacttaggtagattccatatcttggttattgtgaatagtgctacaataaacatgggagtgcatatatctctttgacataccaatttcctttcttttggatatatacccagcagtgggattgttggatcatatgtaggttctgtttttagttttttgaggaactccatactgtttccaataatgactctactaatttacattcccactaacagtgtgtgagcattctccttcctccacatctttgccagcatctgttatttttttttgtcttgttgataaaagcctttttaactggggtgagatatctcattgtggttttgatttgcatttctctgatgattggtaatgttgagaattttttcatatacctgttggtcatttgtatgtcttttaagaagtttctattcagatcttttgcccagcttttaattggattattattattattattttgctgttaagttgtttgagttccttatatattttgatggttaatctcttgccagttgaatagtttgcaagtgttttctctcattccataggtggtctcttcactttgttgactgtttcctttgctatgcagaagctttttagcttgatatgatcccatttacttatttttgctttgcttgcctgtgtttttgaggtcttacttaataaatctttgcccaggctaatgtcctgaagcatttctctaatgttttcttctagtagtttcatagttgcaggtcttacattaagtctttaattcattttgatttgattttcatatgtggcgagagatagagatctagtttcatttttctgcatatggatatccagttttctgagtaccattcattgaagagactgttctttccccaaattatgttctcggtgcttttgttgaaaattgaccaaatgtgtgtatttatttgtgcattctttattctgttttattggtctgtgtgtctgtttttatgctagtatcatgctgttttggttactatagctttgtagcataattcagagttaggcagtgtgatacctccctctttgttctttttgctcgggattgttttggctatttaggaccatgttttgttccatatacattttaggagttttaaaatttctttttgttccttttaggatgcaaatttacatgcatgttagattatttcaccatgttaaaggaaaaacttgagacaaaatacacatgcatgtgtctttacggtagaacaaaattaactttggtttaaaagatactgctattgaatctgtttttatttctaaacatatttcttggttcttgttgaatttattgatgatgaaaccatgttctcaagtgaaaacaataagctggaattcagtcatttagtgacctctatgatcataggcaattcatttatcagctttaagcctcatttttgatcatttgtaaaataggtatcatagtgccataccatgtaactgtgaatgaatgatacaaaataagcagtgtttggcataaagtaaatatcagtgttttagctgaacaccttttatgtttggttcactgtattcatggtccctgacttcaaggagcattagttatctccacaacaactctaatatagcatagaatgtggtaagtcctcaagaaaggatttaagtgttctggggagtttagaggagatgaaaagaataattgaaatactgtataaattatgataattgtttaaaatagggactaagagaaacctttgcattattgtgggttgggaggcattgaactagccctcatttgtggctcatctttttgagtagcatttaagaatttgaaagtttgtaattatttgtacacattttctttaggtaccatctacctgttcatgtaattggacaccatgctgtgagtccttactccatagttttgcccttatctgctgattgtttggccttgaagccggtgtcagatatgctgagaatagcttggaacctgtcatggtatcatgggagtgataatctgttgaagcaaatgaactctgaaactaaaacgcaagagtaagctcttatattagtttaaaaagcatttgcaattaattaattgtaattaattagttaagttttactttttccttaggtccagtagctttttcccttggtatcatctgattctgctttttaacagttataatttttactttcttttaaatattacatgtgtttattacttttaacaatctatcatatgggaaaactttaaatgaaaaagcattttactctgtactgttttagaggttaaagtctgatttgttcgtagatatgaatcactaggaaaagggtcctggattagaacaaaatctcagtaagtatatgcatgagtgttatcattagtgtgatggtgattacttttgaatatcttaatattctaatctgtctgtcttaagtgaataaaaatttttataaggaggaaaagtcaatataaacatttgggatgccaatgtaaaatcctaatattgacagatatgtatcagtttttcttctggctgtaagtcaaccttttgttaaaagaaaatgaagataaaacagcttttgggagagtttataatagaaataagtgtgagcttttatttaaatagctttatgttcctccttcattttttttctttttgtctagaattttagatgcattgaagttatctacagaggacatcctcactctgaagataacacacatggctagtgggctgcaggactgcctccattccattgttcaggctgcaacccacagggaagttagggctgctgtcaccaggatgagtttttatcttctgaatgacagattgtctttaaagggttgccctggtccatgtggggttaccttgaagtccttggcttggcacaccgcactaaacaggtcagtgtaaggtcaaggctgccagtttcaaagacctggattgcattgtattgtgttcatctcctaacctttgaagataagagtctatgcccttactgctgctatcatagaaagaaaaactccaggatttttatcatctgtaataatagccaaagagaaatttttaatttagttattgcattgttgaagggattattaataaacttgtaacaatttattcttagaaaattttacctcacaaaagcaaataattaggataagacatggatgaaacaaattgaatgtttatttctatccatgttataaatgagttgagacatcagtgaattgattaatagctgtgatacacctgccacaggctgttttgttttgcttttgttttgttcttaagtaaattatatcatttttctttttactctcaatttcatgaagttgattgccatgtggcggtcctttatagcagttaattgagaaggctctagcttgtcaatttaacatgcttaacttgtagcagatggttgcatttgcaacaagactgataagcaaccactgcaagcaggttttcattttattcttcatgtgactttagtataaaatgtataactttattatttaacataaaatgtgcagtttttaagctgctaggttaaatgagtttccaaaatatgaattcctttattagtttagctttaaaaattagtttatctgattaggctttccagtggtgtgctggtgcccactaatgcagccttgtgagagagctgatggttgaattttcaggatttttgtaaggtgattgttaaacacagccattcttaattatataaacttacaattaaataaattatatgaagacaaaaggtaatgaatatgcaaacatcactttctaattatgtggcaacattttactgttatctttgttcttgaggttatgcatacatatgcactacaggggtatgtattttatggaaataactacaatggagtaccactgtgcatctcttcacaacttcatgttacatggtagctccacattgtctacagtagtatatttacaccatggaaattgacaaacacaataagtcagcactctcagttacatatttatcagcacactcccgcatttaaacagtctcgccagttgaagaatgcataaatccttcactttaaataaatgtaatatgtccctatttgtcaaaagaaattttaacataaaagctgattgaattcattgcactaagttttctttctcttgtgaattaaaaccatagaaatagtatgcaataccacattacaggaaagactctcaaactgtgggtcagtggaagcctttagagtatttcaaattgcccaatagcagtaactgtatgtgagcatcacattttttatggttagtttcctcaggactagtgtaagtggagagtatagactgtgtatatgtttaatatatacacacatgcatatataatattcatcttgtatttggtttttaggcctgtgtttgatcatggcaacacagacactactgcctaatttataaatattcatgtatttctgctgtattatgtttcactaaggaatgtatcaaaaatatatatcacagaatccaccttttttcatgaaaactttttaaaaactttacttccagcaatgtatgtactaatgaggctttgggaaactttagttttgctttcattcagtttaatgatagaaaggaacattatctttttgactgattatctaagatgaaccaacagcttaaagggtgcttggagatagaagattcccataaatcatggctgtataaagtattgagatattgagaacatttttataagcttagtttaatatttttaaaatacagctatttcaaattatatcattctagacaaaacaaaatatagagaagcatgttcatacctgtgtgaatggttttttattgtattttaaaaataatgttattttttacacattttccatgtcagtaaatatactttgaggctaatttttcaaatatatgatatatccaaatgaatgttccgcaaaagaggtccttttaggagtgagtgtgtatgttagaataattctggctttgctcagatattttgaaattgtcctctcaggtcatttaaacagcagatgtaaggaagtcttattatattttgaagttatatttaattttttactaaaaaatgatattagcaaactcaactatccagagaagggtaaaaatgatttttacatgtataccgaaatgaacaccaccctaaaccatgactatttatcactattaacaaaagtatatttcagtttgacaaaaaacatggtttctaaaatctttttacttacggtactgtggcttctaaacataactttccaagatgattattttaacagcccaacattaatttatgtgtatgtttttatatgtgtatgctaacacacaagcatacaattataatctaatatcattttggaaacttattttaagaaaacagatgatagtcatggtttagtaggattacaagttgtcagaggtatctagagtcttctttcaactagtttctgttgagtttgcatgtttaatgcctctctactcctttcctactggaagtcctattgctactgtttttctccatttttcaccagactgtagactgactagcgaattggtttttctgcttttaaccttatgccactcatttatgttgcttcctgaatgatccttctgaaatacatgtcacctgtgggttctcttccatggtgtgctagatattaatagaattccaaccccttagcatgctgtagaaagttctttttgatctagctcttgcttaccttttcagctacagtttcctcctctctctctaacatatgctgtgtttctatgaagtgcaaatattggggttttatgaaactgcttgatattttagggcatacacttctgttttatacatccttgcttttacatagttaactccttggctgccttgtgaatatctactcttccttgagctccagggtcttcttactctgtgatgtatgtggaattctagttaccctgattgtcatgtggctttcctgcattacttctacagttgtttaaatatttgttttctcatgtgccttgggtttattacattcctttttatatccctcacatatcgcataagtcatagtatacagttggccatgcagcctcagcgtgaacacctcctttgaaggatattcattctgtttttgcgctgtgattattcgtaagttttttgttcttttagactgtacctgatcatttctacctgttattctgtcctttaaactcacagaataaataatgtcttcacatgtgacagctcttcatttaaacataactataatttcttctctattccccccaccctgctttaaatgatttgtttttttttttagatagactttaaaagccacagtgtccagacttctcatttgttcatgctattttacaagggtattgtgtttcttaggactctccctgagatctggacatgataccttatatgggtgtggtgctgtggcatggggtgaataggaagaaaggggctactgcctttcttttcctactgcttttccatcattcaacaaacatttattgatcacctactaggtgtcactcttgtaggaaatatagcagtgggcaaaactgatagggtcctgctctcatggaacttggaattaagacagctaaaagtataatcaaaagtagaaatgcttccaagcagactattaggaaactgcattagaggagcaccctatccctcttcagtagagagaaagtggttcagagaatgaagcttaagccaaggcataacaggtagaaggatgttaaaagtctatgggattggaagccgaaaagataccaggcacacagagaaacaaataccacatgatctgtcttatatatggaatctaaaaaagtcgaattcaaagaagtagagtagaattgttaccagaggcaagtggcaggtggatatgggtagggaaaagggagacgttgctgagaggttacaaaattccagttagacaagaggaatgagttctggtgatctcttacagcatagtgactatagttaataataatatatgtttcaaaatagctaaaagaatagatgttaaatgttctcaccacagagaaataagtatttgaggtgattggtatgttaattagcctgattggatcattccacaatgtatacatgtgtcagaacaccacattgtatcctaaagatacatacaattattatttgtcagttaaaaataaaacaaataaatggaatatagtttggtgcatgttatgtgacagaaatttgatactttgaatccgtaaatggatggtcagttgactcacaaccacttgcagaatatattatttctcctctagactaaaatgccatattcaacaaatattatacaaattaattttttttttaaatgccaggcaaagggataggccctgagttaggaaagagtgtcttgtgtcttcaagaggaattgaaaagaggatagtacacttagatttaggggatatgagggtggttataaaatggggttacagaggtgatattttaatgttacactggatatcatagaagacttcttataatctttgtgattgttaaatcataaatctcccaaagatctatggttgttagaatcacctctcaattttcataatccggcacttgccatcctactcagctgaatgtcattttggggatgtgagaattttaagtaaggaaaaataataatgagacaaacaccacattactaagaaatacagcattatatatccctggtgttggactgcttagtttagtattcctgttttaaaacttgctagccgtgtgactgtggaaaaacgacttaaccatatttttgcttgggtcttcttgtctttgaaatagaggtgcctacttcataatgttgttatgaagtttgacagaaaccctgctgttagaacataggctggcacaaggttggtgctccataaatgctgagtattaagattcgtattattgtcactcttattaacattttgatgcaatggctttagatttataaaaaataaaacattacagataaaattggatctcatatctcttgctgattgctttttaaaaaaaacgatttccaaactacttctcccttttaaataaaagttttattgtctactaatcttttagctctcttaaaccagtttttttttttaaagaaatcttagaaaattggctcatatccttttgctctgaacttaaaaagaaatttcatcctaagtctaccttcagtgttttccttgcctgttacaaactctagtagcgtccttgcaggcctttttttccccctcactttattaccttattttttcgagttggtcagaattaggtttgaagtactaattcttctcatcagtgaaacatgacattcccagtatgaaaagcaagtttcactgggcggttattagagtcagtgtttttccccttggtatttttttggtactttttctgaatttgttatttttctcttatgatatttgtcacttctagttattttagttacttgtccacatgttttttccactataagctcatgttcttgaaggcagatacccagtttgtttcaactttgcattttccaaagcatttaaaacagtgtctcataaaatagcatcctcacaagacatctgttaagtccacatatctatgatgaacagtggtattgtgtattttaaagcgccagaaaccatgattattgtcttttcattataggtttttacaggtgcttcctgcttgcactgaagatgagaaactgctaatagatatcatacattttttaaataaattaataaaggaacaaagaaaaaattcttcactagaacttctaaactggattctcgaattacttcttagacatgtaagtggtgttaaggaatttggattttaagtttgggaaataacttatttgtagaaatcattaacattatattatggaaaaggataattttatattgtctatgcttggtaaagtagtcttcatgtaatgaatggctcataacaacatggctttcctgatacgattgtgaatgtgtttattaaaattctgtacagtgaatgggacctacagtcttgtgtttaataaaacctgttctgcatgtgaactttctgctgcaactgtatttttaagtggggatttcagttcaggtggcaggggacagggtggatgtccagataggcatgttgagagttagctaacaaagccagatggaggcaggagggggtatagtgatggtgcagttataaagataaagtgtgttcaggccttaaataacggttactggaatatttacccttctagcccccactactgtcagatttttagctcttctaaaaattctaaattttttttttttattttttttgagacggcgtctcgccctgtcacccaggctggaatgcaatggtgcgatcttggctcactgcaacctctgcctcctgggttcaaatgattctcctgcctcagcctcctgagtagctgggattacaggtgcctgccaccacgcccagctaatttttgtatttttagtagagacagggtttcaccatgttggccaggctcgtcttgaactccggacctcaggtgatccgcccaccttggcctctcaaagtgctgggattacaggcgtgagccaccgtgcctggctctaaaatttttctaaatagctattctaaaaattttggctattcagatttcttattctaagaagcgtgtgaagaacccaagaagccaggtccctgttgttggtctatctgtctctttatgtatttatttgcaaataccgtatgaatttactcaacttagctaagataaagctttacacaaataagaagaaaaacaaaacaaaactagaaaagagggcctaaactgatataggacatagtggatcttataaggcaaatatgtttcattatatattaacacatttgcgaaacttagagataattttatgtaaaaatatgaattactgtgttgtcagaaatgctaactgatatgaatgtttgtgtgtatataaaacttatttagaggtttattatcgtcttaggctgttttctgttgtttttaacataatatcagaagctgggtaatttataaaaaacaaaatttatttcttacagttatggggtgcaggaagtccaggtttaagagggcatatctggtgagagccttcttgcagtggggactctctgaagagtcccgaggtgatgcagggtatatgtggtgagggggctgagcatgctgatgtgctatctcaggtttttctcttcttacaaagccatcagttccccttccatgataacccattaatccactatccatgaatggattagtctattcatgagggtagggccttcatgatccagtcacctccaaaggccccacctctcaatactgttactttggggattaaatttcaacatgaattttggagggaatgttcaaaccatagtaattatcttttcctttattgtagattggtgaaggtagggactgttttgttcattattgcatacccagcatttattatagtgccttgcacatagtgagctctcaataaacatttattaactcagtaataagctatgtagttaattacaagaagcacacaaaaccttaattttatcactagttaagatttaacaaaaatggaaaccatgtattactttcaaggttacttatatatgcaagtatatttatagactgaatttctagaattgtaattgctgagtcaaattgtagaggtgcgtgtgtgctgaggtttttgtggttttataaatagataacttattttgaattagatggagattttttcatattcggtcttttcatgaattgtatcttgatgtccttgctggttctccgccacaattgggttgttagtctcctttcatttcttctttcctgtcctttcttttcctcccttcccttctcccttccctttctcctttgctttttccttccattttcctcttccctcccctcccctttccttggagcgtgatttcattctggtacctgcaacttggacattagtgtagagatctttcaccttttgattaaatttattcctaaatatcttaattttttttggtagctattttaaatgaggtttttttttgggggggcgcggttactgtatagaaatgctactgattttttataagttgattttgtatcctgcaactttattgaattcatttttaagatcaaagttttttggtggagtctaggtttttctagatttaagattatatcatcagcatagagggacagcttaacttgccttttttctaatgtggatgccttttatttctttctatatactaattgctctggctaggatttccagtaccatattgaatagacatggtgagagtagacatccttgtcttgttcctgatcttagagaaaaagctttaaacttttcaccattgagaatgatgttagctgtgggtttttcatatatggcctttattgtgttgggattccttttctacttaatttattgagagtttttattatgaaaggatgttgaattttgtcaaatgctttttctgcatctgttggtataatcatgtggtttttgttcttaattctgttaatttggtgtatcacatttacgcatttgtgtatgttgaaccatccttgcatccctggaatgaattccacttgattatagtgagtgatctttttattgtgctcttggtttcagtttgccagtatttggtaaaggattttttatatctgtgtttatcagggatattagcctgtaattttcttttcttgtagttcccacgtctggctttggtatcagtgtaatgctgccgtcataaagtgagtttggaagtattccttcttcatttggttttaggagtacagagattagtattaattctttaaatgtttggtggaattcagcagtgaagccatcaatcaggtcttgggcttttttttggtgaaagactttgcattactgatttaatctccttattattggtctgttcagattttctgtttcttcatgattccatcttggtagctctatgtgtctagaattttttccacttggttgtccaatttgttgacatgaaattgttcataatagtctcttacgattccttgtgtttctgtggtatctgttgtaatgtcttcccttttcgtttctcattttgtcttctttttttattagtctagctaaaggtttgtcaattttgttcatcttttcaaaatctcaattcttgattctgttactgttttctattgtttttccagtttctatttcatttgtatctgcccttatcttcattgttttctttttactaagttttggcttcatttatgcttctttttctagttccttgaggttgtttacttgatatctttctttttgacatagatgtttattgttatgtatgtccttcttagacctgcttttgctgtatcccataagttttggttggtttggtgtccatttttgtttgtctcatgatattttaaaatttcccttttagctttttctttgacccactgattgttcaggagcatgttgcttaatttttatgtatatgtgaatactccagaattccttcttttggtgacttctagttttttatcactatggtcagaaatgatattagatatgatttcagtcttgttatatttgttaagacttgtaacaccatacatgtactgttaattttgtagtatgtcataaggtttatgtatattttataatttattcatagttatgaaattaaaattaaattcctacaagactctagatgattgtactataattttaatgcagtttttgaaaaggatttttggtacagttacatttacttatttggttttgtatggtattaaacctttcttcggaaagcttctactttatctcatatattatcaccacaagtgttataaataatactacttttaagagtgcacaaaagtgaacttaagtgttcactatcagttgggtttactccctaaatattatgctacaagataaattaatatatgttatataactaccaatgtttaggataaagggaacctggaaatagaaaatcaagtaccttttaaagtttatcctttgaagtgagtaaaataagtgagaaatgatttaagaagctcagtaaaataacatttccaagtaaattgctttgaatgtatggacatacatgaaaagatatacaaaagttgtggttgcaaaaacaaaattaggcagatatgaacgcctgattagtcagaagaatgctaagaggaagtgaaaagaaaaatcagctaacttcccgagggaagatttaggaactttctcttgtgaaatttttttccatgtgttttatcaagacattcacttattacaaacatattgtaattcttaggcaatttaggagtttattgcacctctaatctgtttttaatatgatattttgtttatagtaacctagaagtgctgaatttgaatacctttctttttggaatgcatttttttgatggaagttcacaaatgtggggctgttagtttttttcttcttttggtgaagctcagcagaactacacagcatatatattttccttggctggctttcccgtaacgggctcaatgtgcactcagacattattgagggtcttgcagttacttttggcatagcttgctgatggatgtaaagttggatatgatgagtggtaactgtgtgtgtaaacaaaatgagccatcattatagaaatggttgccttttagaggtcaacagtgacaaaataatggcccaagtagttggtttaaaattaggattgaatcctaacgtctaaagacaaaaacttcagatatgattaagcacttgacatctgtaggcatcagtagagacatcttattctactctattgtacttgagaaatggtaattcaccctatattttacaagtggtattgctgaggttcactgaatttcagtgttaacatgtaaatcaaaggtgaaaagagaaaaaaaaacttcagtaatcttcaagtggaagcaagttattaataggatgagattctttgggagaatcttaatttttaggtatacacatactgtttcagtatattcatgtattaatagtagcttctacttaatttttatcagcatatcagaattaataattcctaataataaaattgttttacaagatggagtttgcgtcttggtataaacagtttgttcattttgtcagtagttttgggagtcagaaggcacgtgaatgtgagtcagcttttggatatttagggctcagaacattatagaaaatttatttatttttatgatttactaaatgtgtatttcgattcttttattcatgtatgaaacataaaagttgcagttatgtcttattcaatcttaatttatccaaagacatatattgcttaagataaaagaaaaagttgggaaaaaaactatttagatgttaaaatactgtaaaataagagcaaaatgtcactactagtttccaaaagctctcagttatattatttataattgtatatatctctatatactataagcaatttagaggtttctttacatattttcatttcttttccctaaagagaatgcagttaattttgagttgagctcttttaggtgaaggattttataagaacaatagttacattttgattgtatctctttttgtatgtttttacatgcactagtgatgtgacactgtgctgaggatggaatattaactagctttggagtaagatgcttcttgctctgcccttgtctgtctaagacttagacaattatttaacctctttataaatctatgttcccatctgtaaaacaggaatgaaaatgcaaatcttctagtttattcaaaaagtcaaatgaaatcttactatcttttttttttagcacagtgcctgaggcatcatagatgattaataaatatcccatatatctattaatgcttctgattaatgtaacgttttcttttgtcaatattattagaaataatcctcttatattcctttatctattttttttttagttgggaaaagaggaaaaactttagaaagaactagtatttgtttactagcctatcaaggtggcaaagattattgcagtaataatccacatagcactggcttgggtgctgtgggtcttttcatgtcctgtgtaattgtatgtattggtacattttttacagggacaatttggcaatatatatcaaaaaattaaaactactataatattttgatttagtaattttattgcagaattcatacataagataaaatccaacttgagtacactgtgtgttgcagcttagtgaaattatgcatcattgattatccaggagttagtgtggtaaatccttattgttgaaaaacaatcagatattaaactaatgtttttgcagaaatattgttaataacgggaagtaggaaaaaatggttacagtagtgatttttttcacttgatacgggtttgtgaaaaatgtactgttttaattctgtttatattctcagaaacaaaaaggagagttatatatcaatatataatagtggcaatttctgtgtggcatgattatgtgtggttttgtttttctcgtcctttttttctattttatatgataaatatgtttttcttttgttgagaatatattaaacatcttttgaatttagaacatctctactaatgcagtaaaggcccacacctactagttaggtaatatagctcttactagaacttgcttagcaaccaaaccctttataggaaacaatatatagttcaattagtaaatacattttttacaaatttcattttttagagtgcaaacccactgttagacctcttggttctgacagagtcacaggcacgagaagaaacagatgatatccggactgctgtcaggcaacaacttcagaaagaactgattgctctttttgataccttgctgctcaatttcatggaagttactgacaggtaccatttgtaatattgcaggtttaggtgcatttatatagaacccaagttttctttgattttcaaagttttactttgtacttctttcaaattaagaaatacttctttcaaatacttaaataataatcagttatagtgttctgtttgtttttgtttcagtttaatctgttacagcctgattgtacctgcttggtctctttcactacacacatgcactcacatatgcacacacacagttttgttctctagggtttaattcctggttctctcttaattatctacaaatctacttgagcagtcatacctatgcctatgactttatgattatctttacactgatgactttcaaatacatatctctagttatgaattctgttttttaaaaataaaaatattaagatgaaagtcactattttaaccattttaaaatgtacatttgaatggttttagtatatccgcaatgtttgcaactgtcaccactacctaattccagaactttatcatcaccccaagagaagccttgtatccatgaaaaagtctctccctattcacacattcctctgggccctggcagccactagtcttctttctatgtctgtggatttgcctattctggatatatcacataaatgaaatcaaacaataatgtgacctttagcgtctagcttcttcacttagcatcatgtttccaagctccttgcatactgtagcaaatatcactacttctttctatgactgaataatattctatttatagatatgccatgttttgtttatccattcattcattggtggacatttgatctgtttctaccttttggctattatgaatagtgttgctgtaaacactcatatacagatttttgtgtggacatgtgtttcagttctcttgagtatataattaggagtggaattgttggttcatatggtaactgtaatggtaactctatgtttgacttttcaaggaaatgccaagctgttttccacagcagctataccattttacattcccaccagcaatgtatgagtgtttcattttcttcatatcctcaccaacacctgttattatagcatcctaatgggtgtagactggtatcattttggtttttatttgcatttccccaatgaaaaataattttgagcatcttctcatgttcttatggctatttgtgtatcttcttcggagaaatacctattcaacatctttgaggatttagtatcagtgtgcatcagggatattggcctgaaattttccttttttgttttgttttgttttttgctttaaatatgtcccagagattctggtacattgtgtcttcgttctcattgatttcaaagaacatctttatttctgccttcatttcgttatttgctcagtagtcatttaggagcaggttgttcggtttccatatagttgtgcggtttggagtgagtttcttaatcctgagttccagtttgattgcactgtggtttgaaagactgtttgttatgatttgcgttcttttgcatttgctgaggagtgttttacttccaattatgtggtcaattttagaataagtgcgatgaagtgctaagaagaatgtatattctgttgatttggggtgaagagttctgtagatgcctattaggtccgcttggtcaagagctgagttcaagtcctgaatatccttgttaattttctgtcttgttgatctgtctaatattggtagtggggtgttaaaatctcccactgttattgtgtggtagtctaagtctctttgtaggtctctaagaacttgctttatgaatctgggtgctcctgtattgggtgcatatatatttaggatagttagctcttcttgctgtattgatccctttatcattatgtagtgcccttctttttctcttttgatctttgttggttttaagtcttttgtatcagagataaggatggtagctcttgcttttttttttttttttttgctttccatttgcttgataaatcatcctccatccctttattttgagcccatgtgtgttttttgcatgtgagatgggtctcctgaatatagcacactgataggtcttgactctttatccaatttgccagtctgtgtcttttaattgtggcatttagcccgtttacatttaaggttaatattgttatgtgtgaatttgatcctgtcattatgatgctagctggttgttttgcccattagttgatgcagtttcttcatagcgtcgatgttctttacaatttggtatgcttttgcagtggctggtaccggtttttcctttccatatttagtgcttccttcaagagctcttgtaaggcaggcctggtggtgacaaaatctctcagcatttgcttgtctgtaaaagattttatttctcctttgcttatgaagcttagtttggctggatatgaaattctgggttgaaaattgttttctttagaaaggttgaatattggcccccactctcttctggcttgtaggtttctgctgagagatctgctgttagtctgatgggcttccctttgtgggtaacctgatctttctctctggctgcccttaacattttttccttcatttaatctttggtaaatctgatgattatgtgtcttgatgattatgcattcttgaggagtatctttgtggtggtctctgtatttcctgaattggaatgttggcctgtcttgctagattggggaagttcttctggataatatcctgcagagtgttttccaagttggttccattctctctgtcactttcaggtacaccaatcgaacatagatttggtcttttcacatagtcccatatttcttggagcctttgtttgttcctttttattcttttttctctaatcttgtcttcacattttatttcattaatttgatcttctatcactgatatcctttcttggtgaccttcggttgggatctttgagtggacgtgctgttcctttctgtttgttagttttccttctgacaggcccatgtgctgccggtctgctggagtttgctagaggtccactctcgaccctgtttgcctaggtatcgccagcggaggctgcagaacagcaaagattgctgcctgatctttcctctggaagcttcgttccagaggggcacctgccagatgccagccagagctcttctgtatcaagtgtcggttggcccctactaggaggtgtctccccgtcaggatacacgggggtcagggacccacttgaggaggcagtctgacccttagcagagcttgatcggtgtgctgggaggtccactgctctcttcagagtcgtcaggcagggatgtttaaatctgatgaagttgcgcccacagcctcccctttctccaggtgctctgtcccagggagatgggggttttatctataagtccctgtctggggttgctgccactttttcagagatgccctgcccagacaagggaaatctggcaatctggccatggcagccttgttgagctgcagtgggctctgcccagttcgaacttcccagtggcttagtttacactgtgagtgtaaaactgcctactcaagcctcggcaatggcggacgcccgtcccctcaccaagctctagcgtcccaggtcaatctcagactgctgctgtgctggcaacgagaatttcaagccagtgaatcttagtttgctgggctccgtgggagtgggacctgctgagccagaccacttggctccctggcttcagcacccctttccagcggagtgaacacttctgtctcgctgctgttccaggcgccactggggtatgggaaaaaagaactactgcagcttgtttggtgtctgcccaaatggccgcccagttttgtgcttgaaacctagggctctggtagggtaggcaaccgagggaatctcctggtttgtaggttgcgaaaaccgtgggacaagcgcagtatctgtgcaggagttcctcaggctcagtctgtcacggcttcccttgggtggtggagaaaattccccgaccccttgcgcttcccaggtgaggcgatgctccaccctgcttcagcttgccctctgtgccctgcacccactgtccaaccagtcccagtgagatgaaccgggtaccttagttggaaatgcagaaatcacccgccttctgcgtcgatcttgccgggagctgcagactggagctattcctatttgaccatcttgccagcaatccccccaacctttttttttttttttttaaaaagggatgggggtctcactatgtcaccccggctggagtgcagtgacacattcttagttcactgtaacctcaagctccagggcttaagagatcctcctgcctcagcttcctgagtagctgggactataggtgtgcaccaccacacctggctaattttttttactttaattttattttatttcatttttttagaaatgaggtctcactgtgttgtgttgctcaagctggccgcaagcaatcctcccacctcaggctcccaaggcactgggattataggggtgagccacagcccctggcccagtgtaatcgttacttgtattttatatgacattctctagttggtattttatgctttccttgaaaagtctcattttgatagagactattttctgccattttgtctggttcatttttttctattactatgagtttaagtaaccttttatagccagtaagatagcccattaagcccattatactttcttggtggttgattttccctcttttgcatacataggaaatgctcggaacttctttacgtttttcaaacgcagctggctctgaaactgctccagtgtctgaaagtgacggatgcgcctcatttctatggcctgccgtcccttgagcggaccttacgagggatggctaacctcactgcgtttccgggatggagctcacactctcctctcacaaagcctctagatatctgtgtgaagtacttgtcaggtctccttgaggtaagtaaaaatagcatatggtagttatttactattagttgcttttactttatgccaggccacaagtgcattatacgttactctattcaatgtagaatattatacattatttatataagtcataatagtgaaatgttttagtgatttttattaatagttaagtaaggaaggtcacttttataaataccctcattttcaaaagaaataaatggaaacttttgatgctcaaaggaagtgttcgctagagcatttcagattttggatttttggattaggaatgctcaaccagtaagtatatgatacaggtatttcaaaatccaaacaactccaaaattcaaacacttctggtcccaagcattttgtatacggcatactcaggctgtacaatgttaaaggatatttgttttttctttttcttccagtttgtgcagttctagatgctactgctatgaacattcttatcttttggtgaaaatgagcatcttttttgaaattttatcttctgttattgaaatatgtaaatatagccaatttttatatgttgaccatgtatcaggcaattcttatttccaatatcaaaacaaaagcctttaatttttcacccttcagtatgctgtttatagtttttttttgtcaattaagaaagatcaagttaaggaagttttcttttgtcctgttttgctaggagctttgttttttaattcataattgtatattgcttttttctgtatcttttaagataatcacatgatttttcccttatattccattactgattgattttaaaatgttaaacaaccttgcatttctcgaaacatttcagttaggttgtgatgtattactctttttatatgttagtggatttcgtttctcaattttttagaattctgaagtttttagaattattctatttcctcatgtaaaaaagtttttcgaattttgcatcttttttctcttaaagaatttgtcaggtttttaataatcaaaatcattccgttcttatgactaaaatgggagaatgtgagattgtaagaacgtgactttttcaaccattttaaatcttttcctttatataactttcttttttggaatagctgatttgcattggtgtgattttgttctctaatgttaggtagaatttgatcgtgaaacaatcttggtttgcagttttctttttgggaagattgtaaattgtgaaatgaaatgactttttttttttttgagacagagtcttgctctgttgcccaggctggagtgcaatggcatgatctcagctcactgcaacctctgcctcccgggttcaagtgattctcctgcctcagcctcccaagtagctgggattacaggcgcctgccaccacgcacagctaatttttgtctttttagtagagacagggtttcaccaggttggccaggctggtgtcgaactcctgatctcaggtgatccacacccgtcttggcctcccaaagtgctgggattacgggtgtgagccactgcgcctggcctgaaatgactttttaaatagatctaaaatcgttcagagtttctttttatgtgtgtcagccttagtaagttatgtttttgtagaacttaaaaactttttatctaatttttaaaatttgttactgtgaaggtattcatcaaatcatcttacacttttaatgtctgctgaatctgtagtgaggtcccctttcattgcagacattaattattcctttctcaatttttcttggtttatctttctaatagaatgaacctttggctttgttgagcctctctttaacttttttctcctgttttatttctgccaatatttattatctccttctacttttagtttagtttacagctcttttttctaacattttaaggtagaggcttacgtcattgatttttttaaaagtctttctcaaatgtgtgtttttagctctaatcctctaagcatggccttatgccatgtttttatcatcaatttaggtcaaaatatttctactgtgatataataaatacgacaatgatatggttgtacatagttctatgagaacagcctcatcacagtggcctgacaattttgcatatctgcccttgggcttcatagacaaggcttaactacagccaatctaaatcttggcagaatttcctgtgatccttctggaacatgagaatatgaaaggcttatgagcagctgactatgcaagattgattctcacttacttcacagtctattaggaagtcagttaggagcccgtttcttattggttcctaggttccgacgagcactgggctttctgccttgctctccttggggcatagctacagcttataaaactgctttactgcagcacggcatgggcttctccgcaacagagtgtcctacatctttgttatagtcatctggcccctttgtttcaatgtcatcctgtgcaagggatactagtagctggcacctttgtctattcttgcttttgctgtttatgtaggtaataaactgtctgaatccaaaaattactcattgttttcttactggacaaatctgtcagccttgttttgattgctaactgtgttcggacctcaagaatgattcttgtaggaagcactgtagagttagattttgaaagataagtaaattgatagtgatagcaatagacattctagacatggaattttctgataaaattgtatctataacctcctgtttttttttcatgctgtgggtgacttcttgacatcatataatctctacctattgccagattatttttcagaaacataaatttttcaatccaaacctctttttttttcaagagcataagactcaatattttgcatttagagatttgcctccattgtagttttttcccacatctctgaattttcagttatatctggctgtttttccaaaataaaaatgcactttaaaaagactgcttctttcacatagtttcctctcttttagggatggcaatatctacaaaaaatttaagatctaacttatttatttaccttcatttagtaaaccttttcttattcttccaaggttggatacttacctaatactgtttggcctttcctgtaggttatatacctgtaacaatttatatatgtggctattacttaatacattatatttttatttattttactttatttctttgagacagggtttaccgtgttgctcaggctggaatgcagtggtgcaatcacagctcactacagcctcaacctcctgagcccaagtgatcttcccacctcagcctcccaagtagctggggccacaggtgtgcaccactacacctggctggtttaatttttttgtagagatgggtctcactatgttgcccaggtttgtcttgaattctttggcgcaaatgatcttcccactttggcctaccaaagtgctgctattacaggcatgagccactgtaactggacctttattttgttttctgcattgctctagtagactatgagcttataagtatcatctttgggctatttctactatcccatggctactgcattgacctagcaccatggtttttacatagtggttagtgaatcagttaattaatatatgtgctacataatacatatatattgtgtatagtttttaaattaagatacagtttgaaaaacattttggaaatgtagcataaatgattataaaaatatgttttattgttgtatttttattactaaataatgatttaaataatgtatatatatattttatctggtcttatctagaacttttttccaaaagcacatattgtttttaaaacaagtttaaagatcataaatactctttgctgtactgtaaaatttaatatgaatttcactggagtccctttaataaaataaatttcggagaggttccaagatggccaaataggaacagctctagtctacagctcccagcatgagcgacgcagaagacgggtgatttttgcatttccagctgaggtaccgggttcatctcactggggcttgtcggacagtgggtgcagcccacggactgtgagcagaagcagggcggggcatcgcctcacccaggaagcgtaagaggtcagggaattccttttccaagccaagggaagccgtgacacatggtacctggaaaattgggacacttccaccctaatactgtgcttttccaatggtcttagcaaacaatacactaggagattatatcccacgcctggcttggagggtcccacgcctatagagcctcgctcactgctagcacagcagtctgagatcgaactgcaaggtggcagcgaggctgggggaggggtgtccgccattgctgaggcttgagtaggtaatcaaagcggccgggaagctcgaactgggtggaacccaccacagctgaaggaggcctgcctgcctctgtagactccacttctgggggcagggcatagctgaacaaaaggcagcagaaacctctgtagacttaaacgtccctgtctgacagctttgaagagagtactggttctcccgttacagagtttgagatctgagaacagacagacagcctcctcaagtgggtccccaacccccgagtagcctaactgggagacacttcccagtaggggccaactgacacctcatacagccgggtgcccctcttgagacgaagcttccagaggaaggatcaggcagcaacatttgctgttctgtaacatttgctcttctgcagcctccgctggtgatacccaggcaaacagggtctggagtggacctccagcaaactccagcagacctgcagctgagggtcctgactgttagaaggaaaactaacaaacagaaaggacatccacaccaaaaccccatctgtacgtcaccatcatcaaagaccaaagatagataaaaccacaaagatggggaaaaaacagagcagaaaagctgaaaattctaaaaatcagagcacctcttctcctgcagaggaacacagctccttgtcagcaacggaacaaagctggacggagaatgactttgacgagttgagagaagaaggcttcagaagattggtaataacaaacttctccaagctaaaggaggatgttcgaacccatcacaaagaagctaaaaaccttgaagaaagattagacgaatggctaactagaataaacagtatagagaagaccttaaatgacctgatggagctgaaaatcatggcacaagaactacatgacatatgcacaagcttcagtagctgatttgatcaagtggaagaaagggtatcagtgattgaagatcaaatgaatgaaatgaagcgagaagagaagtttagagaaaaaagaataaaaagaaacaaacaaagcctccaagaaatacgggactatgtgaaaagaccaaatctacatttgattgttgtacctgaaagtgacggggagaatggaaccaagttggaaaacgctcttcaggatattatccaggagaacttccccaacctagcaaggcaggccaacattcaaattcaggaaatacagagaacgccacaaagatactccttgagaagagcaactccaaggcacataattgtcggattcaccaaagttgaaatgacagaaaaaatattaagggcagccagagagaaaggtcccgttacacgcaaagggaagcccgtcagactaacagcggatctctcggcagaaactctataagccagaagagagtgggggccaatattcaacattcttttttttttatgatttgcttttttttttttttttgaagtatttattgatcattcttgggtgtttctcggagagggggatgtggcagggtcataggataatagtggagagaaggtcagcagataaacacttgaacaaaggtctctggttttcctaggcagaggtccctgtggccttccgcagtgtctgtgtccctgggtacttgagattagggagtggtggtgactcttgaccagcatgctgccttcaagcatctgtttaacaaagcacatcttgcaccgcccttaatccatttaaccctgagttgacacagcacatgtttcagagagcacgtggttgggggtaaggttatagattaacagcatcccaaggcagaaaaatttttcttagtacagaacaaaatggagtctgctatgtctacttctttctacacagacacagtaacaatctgatctctctttcttttccccacatttcccccttttctttttgacaaaactgccatagtcatcatggcccgttctcgatggtcgctgtctcttcagagctgttgggtacccctgcagacaggctgtcacttcatgcttggaagattgcacagcggccaggcagaggcgctcctcacttcccagacgaggcggccaggcagaggcgatcctcacttcccagacggggtggcggctgggcagaggcgctcctcacatcccagacggggcagccgggcagaggcgctcctcacttcccagacgggacagctgggcagaggcgctcctcacttcccagacggggcgcctgggcagaggcgctccccacttcccagactggacagctgggcagaggcgctcctcacttcccagacggggcgcccgggcagaggcgctcctcacttcccagacggggcagccaggctcaacattcttaaagaaaagaattttcaacccagaatttcatatcctgccaaactaagtttcataagtgaaggagaaataaaatcttttacagacaagcaaatgctgagagatttgtcaccatcaggcctgccttacaagagctcctgaaggaatcactaaacatggaaaggaacaagcggtaccagccactgcaaaaacatgccaacttgtaaagaccattgatgctaggaagaaactgtatcaactaacgagcaaaataaccagctaacatcatgatgacaggattgaattcacacataacaatattaaccttaaatgtaaatggtctaaatgctccaattaaaagatacagactgggaagttggataaagagtcaagacccatcagtgtgctatattcaggagactcatctcacgtgcagagacatacataggctcaaaataaagggatggaggaagatcaaccaagcaaatggaaaacaaaaaaaggcaggggttgcaatcctctctccgataaaacagactttaaaccaacaaagatctaaagagacaaggccattacataatggtaaagggatcagttcaagaagaagagctaactatcctaaatatatatgcacccagtacaggagcacccagattcataaagcaagtccttagagacctacaaagagacttggactccacacaataataatgggagactttaacaccccactgtcaacattagacagatcagtgagacagaaagttaacaaggatatccaggacttgaactcagctctgcaccaagtggacctaataggcatctacagaactctccaccccaaatcaacagaatgtacattcttctcagcaccacatcacacttattccaaaattgaccacatagttggaattaaagcactcctcagcaaatgaaaaagaacagaagttatgataaactgtgtctcaaaccacagtgcaatcaaactggaactcaggattaagaaactcactcagaacagctcaactacatggaaactgaacaacctgctcctgaatgactactgggtacgtaacgaaatgaaggcagaaataaagatgctctttgaaaccagtgagaacaaagacacaatataccagaatttctgggacacatttaaagcagtgtgtaaagggaaatttatagcactaaatgcccacaggagaaagcaggaaagatctaaaattgacaccctaacatcacagttaaaagaagtagaaaagcaagagtaaacacattcaaaagctagcagaaggcaagaaataactaagaacagagcagaaatgaaggaggtacagacacaaaaacccttaaaaaaaattggtgaatccaggagctggttttttgaaaagatcaacaaaatagatacaccactagcaagactaataaagaagaaaagagagaagaatcaaatagatgcaataaaaaatgataaaggggatatcaacaccgatcccacagaaatacaaactactatcagacaatactataaactcctctatgcaaataaactagaaaatctagaagaaatggataaatttctggacacatacaccctccgaagactaaaccaggaagaagttcaatttctgaatagatcaataacaggctctgaaattgaggcaataattattagcctaccaaccaaaaaaagtccaggaccagatggattcacagctgaattctaccagaggtacgaagaggagctagtaccattccttctgaaactattccagtcaatagaaaaagagggaatcctccctaactcattttatgaggccagcatcatcctgataccaaagcctggcagagagacaacaaaaaaagagaattttagaccatatccctgatgaacatcagtgcaaaaatcctcaataaaatactggcaaactgaatccagcagcacatgaaaaagcttatccaccatgatcaagtgggcttcatccctgggatgcaaggctggttcaacatgcacagatcaataaacgtaacccatcatataaacagaaccaaagacaaaaaccacatgattatctcaatagatgcagaaaaggccattgacaaaattcaacagcccttcatgctaaaaactctcagtaaattaggtattgatgggacgtatctcgcaataataagagctatttatgacagacccacagccaatatcatactgaatgggcaaaaactggaagcattccctttgaaaactggcacaagacagggatgccctctctcaccactcctattcaacagtgttggaagttctggccagggtaatcaggcaggagaaagaaagaaagggtattcagttaggaaaagaggaagtcaaattgtccctgtttgcagatgacatgattgtatatttagaaaaccccatcgtctcagcccaaaatctccttaagctgataagcaacttcagcaaagtcgcaggatacaaaaaatcaatgtgcagaagtcacaagcattcctatacaccaataacagacaaacagctaaatcatgagtgaactcccattcacaattgcttcaaagagaataaaatacctaggaatccaacttacaagggatgtgaaggacgtcttcaaggagaactgcaaaccactgctcaaggaaataaaagaggacacaaacaaatggaagaacattccatgcttgtggataggaagaatcaatatcatgaaaatggccatactggccaaggtaatttatagattcaatgccaccttcatcaagctaccaatgactttcttcacagaattggaaaaaactactttaaagttcaaatggaaataaaaaagagcctgcattgccaagacaatcctaagccaaagaacaaagctggaggcatcacgctacctgacttcaaactgtactacaaggctacagtaaccaaaacagcatggtactggtaccaaaacagagatatagaccaatggaacagaacagagccctcagaaataataccacacatctacaaccatctgatctttgacaaacctgacaaaaagaagaaatggggaaagcattccgtatttagtaaatggtactgggaaaactggctagccatatgtagaaagctgaaactggatcccttccttacaccttacacaaaaattaattcaagatggattaaagacttaaatgttagacctaaaaccataaaaacccaagaagaaaacctaggcaataccattcaggacataggcatgggcaaggacttcatgactaaaataccaaaagcaatggcaacaaaagccaaaatagacaaatgggatctaattaaactaaagagcttctgcatagcaaaagaaactaccatcagagtgaacaggcaacctacagaatgggagaaaatttttgcaatctacgcatctgacaaagggctaatatccagaatctataaagaacttaaagaaattttgcaagaaaaaaacaactccatcaaaaagtgggcgaaggatatgagcagacacttctcaaaagaagacatttatgcagccaacagacacatgaaagaatgctcatcatcggagaaatgcaaatcaaaacgacaatgagaaaccatctcacaccagtcagaatggcaacattaaaatgtcaggaaacaacaggtgctggagaggatgtggagaaataggaacatttttacactgttggtggaactgtaaactagttcaaccattgtggcagacagtgtggtgattccttaaggatctagaactagaaataccattttacccagccattccattactgggtatatacccaaaggattataaatcatgctgctatattcatggaactagcccaaatgtccatcagcaatagactgggtgaagaaaatttggcacatatacaccatgtaatactatgcagccataaaataggatgagttcatgtcctttgtagggacatggatgaagctggaaaccatcgttctcagcaaactatcgcaaggacagataaccgaacactgcatgttcgtgctcataagtgggaattgaacaatgaaaaacttggaaacagggtagggaacatcacacaccagggcctgtcatggggtaggaggagggtggagggatagcatcaggagatatacctaatataaatgacaagttaacaggtgcagcacaccaacatggcacatgtatacatatgtaacaaacctgtacgttgtgcacatgtactctagaactttaagtatattaaaaaaataaaataaacttcattttttaattataaatattaaaaaaggttcaactgtcagtatactaattagttattttctgctgtctattagaaatgtatgaattttaaaaaacaggtatattaaagagttaatgataatatttcttagaaagtcagctcctctagtgcatttaaaatataattcagttagtctagctagtggcctatctatctcattaagtttttcaaaaaaacaactcctggatctagtgacctttcgaatggtttttcatatcttgatttccttcagttcagctctgattttggttatttcttgtcttctgctagtttggggttgatttgttattgctgctctaattctttcagttgtgatgttaagttgttaatttgagatctttctaactttttgatggaggcatttagtgctacgaatttccctcttaacactgccttagctgtgtcccagagattctgatgtgttgtaactttgttctcatgagtttacttgtgtaacaaacattcacgttacccgtgaacctaaaagtttaaaaattaaaaaaaatatataattgaacctataagtacctagtttatagcattttttgtcatgtgatttataaatactctatttatcaaccttttacagagtcagtctcctctagaaaatgagttttactctttgaaatcaggaataggtgaggacctgccacagcggtaactaaagaagaagtgaagtgttgcctcatttatgtttagaaactatcagaagtgcttttgttttaaaattacgtgcaaagactttagatcacacctacgtttcaaataccagaaattgaaatgaactgttaatgtattggagaacaaaagggcttagttttaggtaagaagtgtaggcaaaaaggcagtagtccattctgtgttcagttgtctttgaggtaataaaatttagtaacagtttgttagctaaaggatacataaaaagcacagtccctgttatgtaatgtttcgcagttataaaaaatttgattagccaatcttgctttggtttaaaaaggaggtcgttttgtgcttcataaaacatctcgagcagaaaatctttatgactttatgttaaatggcaggcaaatattaggaaagaatccgtcacttttgttaaaaattgtagcagggtaacatttaatcttgggactatctgcttagtttattaattacataaacaggtatccctgttgtactactaatgactaaattcatcttttaaagaataaagtaaggcttatgtgagagaacattgaaacaaagtcattgttggtccaaatgatttgcttcatagtttcttagtaattaaagctgtttcctttttggaagggagccatatttctaataaaagattagcttgtttctgcacagtgaaatttgaatatgagtatttgctttttgtagctgtgaaatgagactttttaactaagcatgattaattatgataggtgaataaactatgataattaaatctttaaatcagatacatgatgtataattccagaggtctgacaaaaatatcaagttgaaagaaaatactggcaaaggtcttggcttgtcatttataagctagaattaaaaatcattacacagatcacagatgttagatatctccaaagatgacttagaggaagataataaggatctgatcatttagatattttatttttcaagtagtcacttaaaattttaaatttttgaccttggggaaggggcagctgtgggcacagcttcagcaaacttaaatattcttgcctgccggctctgaagagagcagtggatctcccagcacagcactcaagctctgctaagggacagactacctccttaagttggtccctgaaccccgtgcctcctgactgggagacacctcccagcaggggttgacagacacctcatataggagagctctgctggcatctggcaatgcccctctgggacgaagcttccagagtaaggaacaggcagcaatctttgctgttctgcagcctccgctggtgatacccaggcaaacagggtctggagtggacctccagccaactccagcagaccagcagcagaggggcctgactgttagaaggaaaactaacaaacaggaatagcatcaacaccaacaaaaaggacttccactcagagaccccatccaaaggtcaccaacatcaaagaccaaaggtagataaatccatgaagatgaggaaaacccagtgcaaaaatgcggaaagttccaaaaaccagaatgcctcttttcctccaaaggatcacaactccttgacagcaagggaacaaaactggatagagaatgagtttggtgaattgacagaagtaggcttcagaaggtaggtaataacaaactcctccaagctaaaggagcatgttctaactcaatgcaaggaagctaataaccttggataaagggtagaggaattgctaactacaataaccagtttagagaagaacataaatgacctgatggagctgaaaaaaacagcaccagaacttcgtgacacatacatgagtatcaatagccgaatcgatgaatcagaagaaaggatatcagagattgaagatcaacttaatgaaataaagcaagaagacaagattagagaaaaaaaaaaaacaaaagggaatgagcaaagcctccaagaaatatgggactatgtgaaaagagtgaacctacgtttgattgatgtacctgaaagtgacagggagaatggaccaaattggaaaaaactcttcaggatattacctaggagaacttccccaacctatcaagacaggccagcattccaattcaggaaatacagagatcaccacaaacatgctccccgagaagagcaaccccaagacatgtaatcgtcagatttaccaaggctgaaatgaaggaaaatatattaagggcagccagagaggtcgggttacccacaaagggaagcccatccctgttagtcttaccagcggatctctctcagacaccctgcaagccagaagagagtgggggcctatattcattaataaagaaaataattttcaacccagaatttcatatctagccaaactaagcttcaaaagcgaaggagaaaatcctttacagacaagcaaatgctgagagattttgtcaccaccaggcctgccttacaagagctcctgaagaaagcactaaatatggaaaggaacaaccagtaccaaccactacaaaagcataccaaattataaagaccattgatgctatgaagaaactgcgtcaactaatgggcaaaataaccagctaacatcgtaatgacaggatcaattcacacataacaatattaatcttaaatgtaaacaggctaaatgccccaattaaaagacacagactggcaaattggataaagaggcaagacctatcagtgtgctgtattcaggagacccatctcacatgcaagacacacataagtttgaaataaagggatggaggatgatttaccaagcaaatggaaagaaaaaaaaaagcaggagttgcaattttcatcactgataaaacagattttaaaccaacaaagataaaaaaaaaaacaaggcattacataatgataaagggatcaatgcagcaagaagagctaactgtcctaaatatatatgcacccaatacaggagcacccagattcgtaaagcaagttcttagagacctacaaagagacttagatttccacacaataacagtgggagactttaacacctcactgtcaatattagatcaacgagactgaaaattaaaaaggatattcagaaaaaaaaaaagggatattcaagagttgaactcagctctggaccaagcggacctaatagacatctacagaactctccaccccaaatcaacagaatatacattcttctcagcaccacatcgcacttattctaaaattgaccacataattggaagtaaaacactcctcagcaaactcaaaagaatggaaatcataacaaacagcccctcagaccacagtggaatcaaattagaagtcagcattgagaaactaactacaaaccgcacaactacatggaaactgaacaacctgctcctgaatgactactgggtaaataacacaattaaggcagaaataaattagttctttgaaaccaaagagaacaaagacacaatataccagaatctctgggacacagctaaagcagtgtttcaccaaatgcccacaggaggaagggggaaagatctaaaatcgacaccctaacatcacaattagaagaactagagaagcaatggcaaacaaattcaaaagctagcagaagacaagaaataactaagatcagagcagaactgaaggcgacaagagacacaaaaaacccttcaaaaaaaatcaatgaatccaggagctggtgttttggaaaagatcaacaaaatagatagaccactagcctgactaataaagaagaaaagagagaagaatcaaatagacacaataaaaaatgataaaagggagatcagcactgatcccacagaaatccaaactaccgtcagagagtgttataaacacctctacgcaaataaactagaaaatctagaagaaatggataaattcctggacacatacaccctcccaagactaaaccaggaagaagttgaattcctgaatagaccaataacaggctctgaaattgaggcaataattaatagcctagcaaccaagaaaaggaccagagggattcatagccgaattctactagaggtacaaagaggatctggtaccattccttctgaaactattccaaatgatagaaaagagggaatcctccgtaactcattttatgaggccagcatcatcctgataccaaaatctggcagagacacaacaaaaaaagaaaatttcaggtcattatcactgaggaacatcaatgcaaaatcctcaataaaagactggcaaaccgaatccagcagcacatcaaaaagcttatccaccatgatcaagttggcttcatccctgggatgcaaggcccgttcaacatatgcaaatcaataaatgtaatccatcacataaacagaaccagtgagaaaaaccacatgattatctcaatagatgcagaaaagtctttcgataaaattcaacatctcttcatgctaaaaattctcaataaactaggtattgatgagacatatctcaaaataataagacctatttgtgacaaacccacagccaatatcatactgaatgagcaaaagctggaagcattccccttgaaaaccagcacaaattattcataaactctttaaaaggatgctataacatttttaaaaatattataagcatattctaagttacaactgtgtactaggagggcaccacacatctttttttttttttttacagactttaaaaggaaaaatattgaaactaagaatttttgtttttgttttgaaaaattacaggatctcactctgtaacttaggccaagtgcagtggtgcaatcatagctcaccgcaagctccagctcccaggctcaagggatcctccctcctcagcttccccggtagctgggactacaggtgtccactgccatgcctggctaatttttttcttttttaaagtagactgggtcttgctatgttatgtaggctgaagaatattttcttttaacaatggtaaaatacccataacataaaatttaccatcttattcatttttaagtatataaactaaaaatattacaactttataaggtaaggattcaattcatacaagtcagtagacagttatatatttatctttatataccattgagaataaagccaccatgaaattgtttacatttgtttttcaggtcattacttctttttatgtggagcgtggaggaaatgctatgtccttcatgggaaaaggtgttacaaagagcacaattctttgcttgcttcacttatcccatgagatgatggcccaggctgggagcttggtgagcgcgttaaagctgtctatcttctgaacatttgcttgaaagggaatgtgctgtgtccaacacatttcaagcatataaacttgccacatgaaaatgtctcttttgacttttctttttaggtaacgtgaatgatttttgactagaatatttcttagaagttgtatattaacaaatctgaatcttatttgaaattgattcaaatgtgcatacactggaaaactacattttgtctacattatgggaaaaatagcttctgtcaaaaaattgttatgtttaactttttaaagagaaacaaatttttttgtttgccttttttggctgaataatggattaaaaccaagtctaaaatacattttcacgttgttttcattaaaaattcttgttttaaccttcctgcattttatttttagaaacttacctcaaatatttctgtttcccttttttccctctaggagtggatgtcactttggttcttgcctttgggta

SEQ ID NO: 15790 - DNA, 57174 bp, Homo sapiens
gttgagtttttttgtccaatctgacattatttacagttttaatggaatattttaatgcattttacatttactataattactaatatttttggatacagattattagcttgctattttctatttgtccaatgtggtttttttctttctttttcctctctggcttttcttgattaatttttaaaattagtccatgttttccagctgttaacttgtagttacatatacattaagtattttatttatttatttatttgtagcgattgggatcttgctttgttgcccaggctagtcttgaactcctggcttcaagcaattctcccacctcagcctcccaaaagtgttgggattacaggcatgagtcactgtgcccagctaagtattcttctatatacattatttctatatattttatacagatgattattcttttataatatagagattataatttacttccttgactgtgaactagtatttttaccacatcccagacaatgcaaggaccttagaacacattaattccatttatttgctcttcttttttttttcttttattgtcaggtatttaaattctatacatattttaaattctataagatgttattataattattttatgcagtaaatagtcatttagatttgtataccgtggtcgtttctgttactttttattgcttttttggtttttctgcctccatctgagaatttgtttttttaagagttttttattatttaatgtagtgcacttatattagcaatgatttctgtcaggttttttttttttttaatctaaaaattctttctgttttaaaaaatgttatcactaggtatagaattctaggttggcagttggagtccatttttttgtaggaacattggctgtcagttttattgttgcttctttgaaggaactgtgttccccattctcttaggagttccttcagctatatcccacagcactttgcttgcttgcttatttatttgggggagtttattttatttttatgggtatataatagtacatatttatggagtacatgtgatattttgatataagcatacaatgtataatgatcaaatcagagtaattaggatgtccattacctctaacatttattgattctctgtgttaggaacatttcagatctgctcttctagttattttgaaatatacaacaaattactgttaactatttttaccctattgtgctactgaacactagatcttattccttctatctaaatttttatgtacccattagccatcccttcttaattccccccttccccaccatcctttacagcctgtggtaatcatcattctactctttatctccatgagatcatttttttttttttttagctcccacatataaaggagaacatgtgatgtttgtttttctgtgcctggattatttcagttaacgtaatgacttccagttccatccatgttgtttcaagtgacaggatttcattcttttttacatctgaatgatactccattgtgtatttataccacattttaaaaaatccattcatctattgatggacacttaggtagattccatatcttggttattgtgaatagtgctacaataaacatgggagtgcatatatctctttgacataccaatttcctttcttttggatatatacccagcagtgggattgttggatcatatgtaggttctgtttttagttttttgaggaactccatactgtttccaataatgactctactaatttacattcccactaacagtgtgtgagcattctccttcctccacatctttgccagcatctgttatttttttttgtcttgttgataaaagcctttttaactggggtgagatatctcattgtggttttgatttgcatttctctgatgattggtaatgttgagaattttttcatatacctgttggtcatttgtatgtcttttaagaagtttctattcagatcttttgcccagcttttaattggattattattattattattttgctgttaagttgtttgagttccttatatattttgatggttaatctcttgccagttgaatagtttgcaagtgttttctctcattccataggtggtctcttcactttgttgactgtttcctttgctatgcagaagctttttagcttgatatgatcccatttacttatttttgctttgcttgcctgtgtttttgaggtcttacttaataaatctttgcccaggctaatgtcctgaagcatttctctaatgttttcttctagtagtttcatagttgcaggtcttacattaagtctttaattcattttgatttgattttcatatgtggcgagagatagagatctagtttcatttttctgcatatggatatccagttttctgagtaccattcattgaagagactgttctttccccaaattatgttctcggtgcttttgttgaaaattgaccaaatgtgtgtatttatttgtgcattctttattctgttttattggtctgtgtgtctgtttttatgctagtatcatgctgttttggttactatagctttgtagcataattcagagttaggcagtgtgatacctccctctttgttctttttgctcgggattgttttggctatttaggaccatgttttgttccatatacattttaggagttttaaaatttctttttgttccttttaggatgcaaatttacatgcatgttagattatttcaccatgttaaaggaaaaacttgagacaaaatacacatgcatgtgtctttacggtagaacaaaattaactttggtttaaaagatactgctattgaatctgtttttatttctaaacatatttcttggttcttgttgaatttattgatgatgaaaccatgttctcaagtgaaaacaataagctggaattcagtcatttagtgacctctatgatcataggcaattcatttatcagctttaagcctcatttttgatcatttgtaaaataggtatcatagtgccataccatgtaactgtgaatgaatgatacaaaataagcagtgtttggcataaagtaaatatcagtgttttagctgaacaccttttatgtttggttcactgtattcatggtccctgacttcaaggagcattagttatctccacaacaactctaatatagcatagaatgtggtaagtcctcaagaaaggatttaagtgttctggggagtttagaggagatgaaaagaataattgaaatactgtataaattatgataattgtttaaaatagggactaagagaaacctttgcattattgtgggttgggaggcattgaactagccctcatttgtggctcatctttttgagtagcatttaagaatttgaaagtttgtaattatttgtacacattttctttaggtaccatctacctgttcatgtaattggacaccatgctgtgagtccttactccatagttttgcccttatctgctgattgtttggccttgaagccggtgtcagatatgctgagaatagcttggaacctgtcatggtatcatgggagtgataatctgttgaagcaaatgaactctgaaactaaaacgcaagagtaagctcttatattagtttaaaaagcatttgcaattaattaattgtaattaattagttaagttttactttttccttaggtccagtagctttttcccttggtatcatctgattctgctttttaacagttataatttttactttcttttaaatattacatgtgtttattacttttaacaatctatcatatgggaaaactttaaatgaaaaagcattttactctgtactgttttagaggttaaagtctgatttgttcgtagatatgaatcactaggaaaagggtcctggattagaacaaaatctcagtaagtatatgcatgagtgttatcattagtgtgatggtgattacttttgaatatcttaatattctaatctgtctgtcttaagtgaataaaaatttttataaggaggaaaagtcaatataaacatttgggatgccaatgtaaaatcctaatattgacagatatgtatcagtttttcttctggctgtaagtcaaccttttgttaaaagaaaatgaagataaaacagcttttgggagagtttataatagaaataagtgtgagcttttatttaaatagctttatgttcctccttcattttttttctttttgtctagaattttagatgcattgaagttatctacagaggacatcctcactctgaagataacacacatggctagtgggctgcaggactgcctccattccattgttcaggctgcaacccacagggaagttagggctgctgtcaccaggatgagtttttatcttctgaatgacagattgtctttaaagggttgccctggtccatgtggggttaccttgaagtccttggcttggcacaccgcactaaacaggtcagtgtaaggtcaaggctgccagtttcaaagacctggattgcattgtattgtgttcatctcctaacctttgaagataagagtctatgcccttactgctgctatcatagaaagaaaaactccaggatttttatcatctgtaataatagccaaagagaaatttttaatttagttattgcattgttgaagggattattaataaacttgtaacaatttattcttagaaaattttacctcacaaaagcaaataattaggataagacatggatgaaacaaattgaatgtttatttctatccatgttataaatgagttgagacatcagtgaattgattaatagctgtgatacacctgccacaggctgttttgttttgcttttgttttgttcttaagtaaattatatcatttttctttttactctcaatttcatgaagttgattgccatgtggcggtcctttatagcagttaattgagaaggctctagcttgtcaatttaacatgcttaacttgtagcagatggttgcatttgcaacaagactgataagcaaccactgcaagcaggttttcattttattcttcatgtgactttagtataaaatgtataactttattatttaacataaaatgtgcagtttttaagctgctaggttaaatgagtttccaaaatatgaattcctttattagtttagctttaaaaattagtttatctgattaggctttccagtggtgtgctggtgcccactaatgcagccttgtgagagagctgatggttgaattttcaggatttttgtaaggtgattgttaaacacagccattcttaattatataaacttacaattaaataaattatatgaagacaaaaggtaatgaatatgcaaacatcactttctaattatgtggcaacattttactgttatctttgttcttgaggttatgcatacatatgcactacaggggtatgtattttatggaaataactacaatggagtaccactgtgcatctcttcacaacttcatgttacatggtagctccacattgtctacagtagtatatttacaccatggaaattgacaaacacaataagtcagcactctcagttacatatttatcagcacactcccgcatttaaacagtctcgccagttgaagaatgcataaatccttcactttaaataaatgtaatatgtccctatttgtcaaaagaaattttaacataaaagctgattgaattcattgcactaagttttctttctcttgtgaattaaaaccatagaaatagtatgcaataccacattacaggaaagactctcaaactgtgggtcagtggaagcctttagagtatttcaaattgcccaatagcagtaactgtatgtgagcatcacattttttatggttagtttcctcaggactagtgtaagtggagagtatagactgtgtatatgtttaatatatacacacatgcatatataatattcatcttgtatttggtttttaggcctgtgtttgatcatggcaacacagacactactgcctaatttataaatattcatgtatttctgctgtattatgtttcactaaggaatgtatcaaaaatatatatcacagaatccaccttttttcatgaaaactttttaaaaactttacttccagcaatgtatgtactaatgaggctttgggaaactttagttttgctttcattcagtttaatgatagaaaggaacattatctttttgactgattatctaagatgaaccaacagcttaaagggtgcttggagatagaagattcccataaatcatggctgtataaagtattgagatattgagaacatttttataagcttagtttaatatttttaaaatacagctatttcaaattatatcattctagacaaaacaaaatatagagaagcatgttcatacctgtgtgaatggttttttattgtattttaaaaataatgttattttttacacattttccatgtcagtaaatatactttgaggctaatttttcaaatatatgatatatccaaatgaatgttccgcaaaagaggtccttttaggagtgagtgtgtatgttagaataattctggctttgctcagatattttgaaattgtcctctcaggtcatttaaacagcagatgtaaggaagtcttattatattttgaagttatatttaattttttactaaaaaatgatattagcaaactcaactatccagagaagggtaaaaatgatttttacatgtataccgaaatgaacaccaccctaaaccatgactatttatcactattaacaaaagtatatttcagtttgacaaaaaacatggtttctaaaatctttttacttacggtactgtggcttctaaacataactttccaagatgattattttaacagcccaacattaatttatgtgtatgtttttatatgtgtatgctaacacacaagcatacaattataatctaatatcattttggaaacttattttaagaaaacagatgatagtcatggtttagtaggattacaagttgtcagaggtatctagagtcttctttcaactagtttctgttgagtttgcatgtttaatgcctctctactcctttcctactggaagtcctattgctactgtttttctccatttttcaccagactgtagactgactagcgaattggtttttctgcttttaaccttatgccactcatttatgttgcttcctgaatgatccttctgaaatacatgtcacctgtgggttctcttccatggtgtgctagatattaatagaattccaaccccttagcatgctgtagaaagttctttttgatctagctcttgcttaccttttcagctacagtttcctcctctctctctaacatatgctgtgtttctatgaagtgcaaatattggggttttatgaaactgcttgatattttagggcatacacttctgttttatacatccttgcttttacatagttaactccttggctgccttgtgaatatctactcttccttgagctccagggtcttcttactctgtgatgtatgtggaattctagttaccctgattgtcatgtggctttcctgcattacttctacagttgtttaaatatttgttttctcatgtgccttgggtttattacattcctttttatatccctcacatatcgcataagtcatagtatacagttggccatgcagcctcagcgtgaacacctcctttgaaggatattcattctgtttttgcgctgtgattattcgtaagttttttgttcttttagactgtacctgatcatttctacctgttattctgtcctttaaactcacagaataaataatgtcttcacatgtgacagctcttcatttaaacataactataatttcttctctattccccccaccctgctttaaatgatttgtttttttttttagatagactttaaaagccacagtgtccagacttctcatttgttcatgctattttacaagggtattgtgtttcttaggactctccctgagatctggacatgataccttatatgggtgtggtgctgtggcatggggtgaataggaagaaaggggctactgcctttcttttcctactgcttttccatcattcaacaaacatttattgatcacctactaggtgtcactcttgtaggaaatatagcagtgggcaaaactgatagggtcctgctctcatggaacttggaattaagacagctaaaagtataatcaaaagtagaaatgcttccaagcagactattaggaaactgcattagaggagcaccctatccctcttcagtagagagaaagtggttcagagaatgaagcttaagccaaggcataacaggtagaaggatgttaaaagtctatgggattggaagccgaaaagataccaggcacacagagaaacaaataccacatgatctgtcttatatatggaatctaaaaaagtcgaattcaaagaagtagagtagaattgttaccagaggcaagtggcaggtggatatgggtagggaaaagggagacgttgctgagaggttacaaaattccagttagacaagaggaatgagttctggtgatctcttacagcatagtgactatagttaataataatatatgtttcaaaatagctaaaagaatagatgttaaatgttctcaccacagagaaataagtatttgaggtgattggtatgttaattagcctgattggatcattccacaatgtatacatgtgtcagaacaccacattgtatcctaaagatacatacaattattatttgtcagttaaaaataaaacaaataaatggaatatagtttggtgcatgttatgtgacagaaatttgatactttgaatccgtaaatggatggtcagttgactcacaaccacttgcagaatatattatttctcctctagactaaaatgccatattcaacaaatattatacaaattaattttttttttaaatgccaggcaaagggataggccctgagttaggaaagagtgtcttgtgtcttcaagaggaattgaaaagaggatagtacacttagatttaggggatatgagggtggttataaaatggggttacagaggtgatattttaatgttacactggatatcatagaagacttcttataatctttgtgattgttaaatcataaatctcccaaagatctatggttgttagaatcacctctcaattttcataatccggcacttgccatcctactcagctgaatgtcattttggggatgtgagaattttaagtaaggaaaaataataatgagacaaacaccacattactaagaaatacagcattatatatccctggtgttggactgcttagtttagtattcctgttttaaaacttgctagccgtgtgactgtggaaaaacgacttaaccatatttttgcttgggtcttcttgtctttgaaatagaggtgcctacttcataatgttgttatgaagtttgacagaaaccctgctgttagaacataggctggcacaaggttggtgctccataaatgctgagtattaagattcgtattattgtcactcttattaacattttgatgcaatggctttagatttataaaaaataaaacattacagataaaattggatctcatatctcttgctgattgctttttaaaaaaaacgatttccaaactacttctcccttttaaataaaagttttattgtctactaatcttttagctctcttaaaccagtttttttttttaaagaaatcttagaaaattggctcatatccttttgctctgaacttaaaaagaaatttcatcctaagtctaccttcagtgttttccttgcctgttacaaactctagtagcgtccttgcaggcctttttttccccctcactttattaccttattttttcgagttggtcagaattaggtttgaagtactaattcttctcatcagtgaaacatgacattcccagtatgaaaagcaagtttcactgggcggttattagagtcagtgtttttccccttggtatttttttggtactttttctgaatttgttatttttctcttatgatatttgtcacttctagttattttagttacttgtccacatgttttttccactataagctcatgttcttgaaggcagatacccagtttgtttcaactttgcattttccaaagcatttaaaacagtgtctcataaaatagcatcctcacaagacatctgttaagtccacatatctatgatgaacagtggtattgtgtattttaaagcgccagaaaccatgattattgtcttttcattataggtttttacaggtgcttcctgcttgcactgaagatgagaaactgctaatagatatcatacattttttaaataaattaataaaggaacaaagaaaaaattcttcactagaacttctaaactggattctcgaattacttcttagacatgtaagtggtgttaaggaatttggattttaagtttgggaaataacttatttgtagaaatcattaacattatattatggaaaaggataattttatattgtctatgcttggtaaagtagtcttcatgtaatgaatggctcataacaacatggctttcctgatacgattgtgaatgtgtttattaaaattctgtacagtgaatgggacctacagtcttgtgtttaataaaacctgttctgcatgtgaactttctgctgcaactgtatttttaagtggggatttcagttcaggtggcaggggacagggtggatgtccagataggcatgttgagagttagctaacaaagccagatggaggcaggagggggtatagtgatggtgcagttataaagataaagtgtgttcaggccttaaataacggttactggaatatttacccttctagcccccactactgtcagatttttagctcttctaaaaattctaaattttttttttttattttttttgagacggcgtctcgccctgtcacccaggctggaatgcaatggtgcgatcttggctcactgcaacctctgcctcctgggttcaaatgattctcctgcctcagcctcctgagtagctgggattacaggtgcctgccaccacgcccagctaatttttgtatttttagtagagacagggtttcaccatgttggccaggctcgtcttgaactccggacctcaggtgatccgcccaccttggcctctcaaagtgctgggattacaggcgtgagccaccgtgcctggctctaaaatttttctaaatagctattctaaaaattttggctattcagatttcttattctaagaagcgtgtgaagaacccaagaagccaggtccctgttgttggtctatctgtctctttatgtatttatttgcaaataccgtatgaatttactcaacttagctaagataaagctttacacaaataagaagaaaaacaaaacaaaactagaaaagagggcctaaactgatataggacatagtggatcttataaggcaaatatgtttcattatatattaacacatttgcgaaacttagagataattttatgtaaaaatatgaattactgtgttgtcagaaatgctaactgatatgaatgtttgtgtgtatataaaacttatttagaggtttattatcgtcttaggctgttttctgttgtttttaacataatatcagaagctgggtaatttataaaaaacaaaatttatttcttacagttatggggtgcaggaagtccaggtttaagagggcatatctggtgagagccttcttgcagtggggactctctgaagagtcccgaggtgatgcagggtatatgtggtgagggggctgagcatgctgatgtgctatctcaggtttttctcttcttacaaagccatcagttccccttccatgataacccattaatccactatccatgaatggattagtctattcatgagggtagggccttcatgatccagtcacctccaaaggccccacctctcaatactgttactttggggattaaatttcaacatgaattttggagggaatgttcaaaccatagtaattatcttttcctttattgtagattggtgaaggtagggactgttttgttcattattgcatacccagcatttattatagtgccttgcacatagtgagctctcaataaacatttattaactcagtaataagctatgtagttaattacaagaagcacacaaaaccttaattttatcactagttaagatttaacaaaaatggaaaccatgtattactttcaaggttacttatatatgcaagtatatttatagactgaatttctagaattgtaattgctgagtcaaattgtagaggtgcgtgtgtgctgaggtttttgtggttttataaatagataacttattttgaattagatggagattttttcatattcggtcttttcatgaattgtatcttgatgtccttgctggttctccgccacaattgggttgttagtctcctttcatttcttctttcctgtcctttcttttcctcccttcccttctcccttccctttctcctttgctttttccttccattttcctcttccctcccctcccctttccttggagcgtgatttcattctggtacctgcaacttggacattagtgtagagatctttcaccttttgattaaatttattcctaaatatcttaattttttttggtagctattttaaatgaggtttttttttgggggggcgcggttactgtatagaaatgctactgattttttataagttgattttgtatcctgcaactttattgaattcatttttaagatcaaagttttttggtggagtctaggtttttctagatttaagattatatcatcagcatagagggacagcttaacttgccttttttctaatgtggatgccttttatttctttctatatactaattgctctggctaggatttccagtaccatattgaatagacatggtgagagtagacatccttgtcttgttcctgatcttagagaaaaagctttaaacttttcaccattgagaatgatgttagctgtgggtttttcatatatggcctttattgtgttgggattccttttctacttaatttattgagagtttttattatgaaaggatgttgaattttgtcaaatgctttttctgcatctgttggtataatcatgtggtttttgttcttaattctgttaatttggtgtatcacatttacgcatttgtgtatgttgaaccatccttgcatccctggaatgaattccacttgattatagtgagtgatctttttattgtgctcttggtttcagtttgccagtatttggtaaaggattttttatatctgtgtttatcagggatattagcctgtaattttcttttcttgtagttcccacgtctggctttggtatcagtgtaatgctgccgtcataaagtgagtttggaagtattccttcttcatttggttttaggagtacagagattagtattaattctttaaatgtttggtggaattcagcagtgaagccatcaatcaggtcttgggcttttttttggtgaaagactttgcattactgatttaatctccttattattggtctgttcagattttctgtttcttcatgattccatcttggtagctctatgtgtctagaattttttccacttggttgtccaatttgttgacatgaaattgttcataatagtctcttacgattccttgtgtttctgtggtatctgttgtaatgtcttcccttttcgtttctcattttgtcttctttttttattagtctagctaaaggtttgtcaattttgttcatcttttcaaaatctcaattcttgattctgttactgttttctattgtttttccagtttctatttcatttgtatctgcccttatcttcattgttttctttttactaagttttggcttcatttatgcttctttttctagttccttgaggttgtttacttgatatctttctttttgacatagatgtttattgttatgtatgtccttcttagacctgcttttgctgtatcccataagttttggttggtttggtgtccatttttgtttgtctcatgatattttaaaatttcccttttagctttttctttgacccactgattgttcaggagcatgttgcttaatttttatgtatatgtgaatactccagaattccttcttttggtgacttctagttttttatcactatggtcagaaatgatattagatatgatttcagtcttgttatatttgttaagacttgtaacaccatacatgtactgttaattttgtagtatgtcataaggtttatgtatattttataatttattcatagttatgaaattaaaattaaattcctacaagactctagatgattgtactataattttaatgcagtttttgaaaaggatttttggtacagttacatttacttatttggttttgtatggtattaaacctttcttcggaaagcttctactttatctcatatattatcaccacaagtgttataaataatactacttttaagagtgcacaaaagtgaacttaagtgttcactatcagttgggtttactccctaaatattatgctacaagataaattaatatatgttatataactaccaatgtttaggataaagggaacctggaaatagaaaatcaagtaccttttaaagtttatcctttgaagtgagtaaaataagtgagaaatgatttaagaagctcagtaaaataacatttccaagtaaattgctttgaatgtatggacatacatgaaaagatatacaaaagttgtggttgcaaaaacaaaattaggcagatatgaacgcctgattagtcagaagaatgctaagaggaagtgaaaagaaaaatcagctaacttcccgagggaagatttaggaactttctcttgtgaaatttttttccatgtgttttatcaagacattcacttattacaaacatattgtaattcttaggcaatttaggagtttattgcacctctaatctgtttttaatatgatattttgtttatagtaacctagaagtgctgaatttgaatacctttctttttggaatgcatttttttgatggaagttcacaaatgtggggctgttagtttttttcttcttttggtgaagctcagcagaactacacagcatatatattttccttggctggctttcccgtaacgggctcaatgtgcactcagacattattgagggtcttgcagttacttttggcatagcttgctgatggatgtaaagttggatatgatgagtggtaactgtgtgtgtaaacaaaatgagccatcattatagaaatggttgccttttagaggtcaacagtgacaaaataatggcccaagtagttggtttaaaattaggattgaatcctaacgtctaaagacaaaaacttcagatatgattaagcacttgacatctgtaggcatcagtagagacatcttattctactctattgtacttgagaaatggtaattcaccctatattttacaagtggtattgctgaggttcactgaatttcagtgttaacatgtaaatcaaaggtgaaaagagaaaaaaaaacttcagtaatcttcaagtggaagcaagttattaataggatgagattctttgggagaatcttaatttttaggtatacacatactgtttcagtatattcatgtattaatagtagcttctacttaatttttatcagcatatcagaattaataattcctaataataaaattgttttacaagatggagtttgcgtcttggtataaacagtttgttcattttgtcagtagttttgggagtcagaaggcacgtgaatgtgagtcagcttttggatatttagggctcagaacattatagaaaatttatttatttttatgatttactaaatgtgtatttcgattcttttattcatgtatgaaacataaaagttgcagttatgtcttattcaatcttaatttatccaaagacatatattgcttaagataaaagaaaaagttgggaaaaaaactatttagatgttaaaatactgtaaaataagagcaaaatgtcactactagtttccaaaagctctcagttatattatttataattgtatatatctctatatactataagcaatttagaggtttctttacatattttcatttcttttccctaaagagaatgcagttaattttgagttgagctcttttaggtgaaggattttataagaacaatagttacattttgattgtatctctttttgtatgtttttacatgcactagtgatgtgacactgtgctgaggatggaatattaactagctttggagtaagatgcttcttgctctgcccttgtctgtctaagacttagacaattatttaacctctttataaatctatgttcccatctgtaaaacaggaatgaaaatgcaaatcttctagtttattcaaaaagtcaaatgaaatcttactatcttttttttttagcacagtgcctgaggcatcatagatgattaataaatatcccatatatctattaatgcttctgattaatgtaacgttttcttttgtcaatattattagaaataatcctcttatattcctttatctattttttttttagttgggaaaagaggaaaaactttagaaagaactagtatttgtttactagcctatcaaggtggcaaagattattgcagtaataatccacatagcactggcttgggtgctgtgggtcttttcatgtcctgtgtaattgtatgtattggtacattttttacagggacaatttggcaatatatatcaaaaaattaaaactactataatattttgatttagtaattttattgcagaattcatacataagataaaatccaacttgagtacactgtgtgttgcagcttagtgaaattatgcatcattgattatccaggagttagtgtggtaaatccttattgttgaaaaacaatcagatattaaactaatgtttttgcagaaatattgttaataacgggaagtaggaaaaaatggttacagtagtgatttttttcacttgatacgggtttgtgaaaaatgtactgttttaattctgtttatattctcagaaacaaaaaggagagttatatatcaatatataatagtggcaatttctgtgtggcatgattatgtgtggttttgtttttctcgtcctttttttctattttatatgataaatatgtttttcttttgttgagaatatattaaacatcttttgaatttagaacatctctactaatgcagtaaaggcccacacctactagttaggtaatatagctcttactagaacttgcttagcaaccaaaccctttataggaaacaatatatagttcaattagtaaatacattttttacaaatttcattttttagagtgcaaacccactgttagacctcttggttctgacagagtcacaggcacgagaagaaacagatgatatccggactgctgtcaggcaacaacttcagaaagaactgattgctctttttgataccttgctgctcaatttcatggaagttactgacaggtaccatttgtaatattgcaggtttaggtgcatttatatagaacccaagttttctttgattttcaaagttttactttgtacttctttcaaattaagaaatacttctttcaaatacttaaataataatcagttatagtgttctgtttgtttttgtttcagtttaatctgttacagcctgattgtacctgcttggtctctttcactacacacatgcactcacatatgcacacacacagttttgttctctagggtttaattcctggttctctcttaattatctacaaatctacttgagcagtcatacctatgcctatgactttatgattatctttacactgatgactttcaaatacatatctctagttatgaattctgttttttaaaaataaaaatattaagatgaaagtcactattttaaccattttaaaatgtacatttgaatggttttagtatatccgcaatgtttgcaactgtcaccactacctaattccagaactttatcatcaccccaagagaagccttgtatccatgaaaaagtctctccctattcacacattcctctgggccctggcagccactagtcttctttctatgtctgtggatttgcctattctggatatatcacataaatgaaatcaaacaataatgtgacctttagcgtctagcttcttcacttagcatcatgtttccaagctccttgcatactgtagcaaatatcactacttctttctatgactgaataatattctatttatagatatgccatgttttgtttatccattcattcattggtggacatttgatctgtttctaccttttggctattatgaatagtgttgctgtaaacactcatatacagatttttgtgtggacatgtgtttcagttctcttgagtatataattaggagtggaattgttggttcatatggtaactgtaatggtaactctatgtttgacttttcaaggaaatgccaagctgttttccacagcagctataccattttacattcccaccagcaatgtatgagtgtttcattttcttcatatcctcaccaacacctgttattatagcatcctaatgggtgtagactggtatcattttggtttttatttgcatttccccaatgaaaaataattttgagcatcttctcatgttcttatggctatttgtgtatcttcttcggagaaatacctattcaacatctttgaggatttagtatcagtgtgcatcagggatattggcctgaaattttccttttttgttttgttttgttttttgctttaaatatgtcccagagattctggtacattgtgtcttcgttctcattgatttcaaagaacatctttatttctgccttcatttcgttatttgctcagtagtcatttaggagcaggttgttcggtttccatatagttgtgcggtttggagtgagtttcttaatcctgagttccagtttgattgcactgtggtttgaaagactgtttgttatgatttgcgttcttttgcatttgctgaggagtgttttacttccaattatgtggtcaattttagaataagtgcgatgaagtgctaagaagaatgtatattctgttgatttggggtgaagagttctgtagatgcctattaggtccgcttggtcaagagctgagttcaagtcctgaatatccttgttaattttctgtcttgttgatctgtctaatattggtagtggggtgttaaaatctcccactgttattgtgtggtagtctaagtctctttgtaggtctctaagaacttgctttatgaatctgggtgctcctgtattgggtgcatatatatttaggatagttagctcttcttgctgtattgatccctttatcattatgtagtgcccttctttttctcttttgatctttgttggttttaagtcttttgtatcagagataaggatggtagctcttgcttttttttttttttttttgctttccatttgcttgataaatcatcctccatccctttattttgagcccatgtgtgttttttgcatgtgagatgggtctcctgaatatagcacactgataggtcttgactctttatccaatttgccagtctgtgtcttttaattgtggcatttagcccgtttacatttaaggttaatattgttatgtgtgaatttgatcctgtcattatgatgctagctggttgttttgcccattagttgatgcagtttcttcatagcgtcgatgttctttacaatttggtatgcttttgcagtggctggtaccggtttttcctttccatatttagtgcttccttcaagagctcttgtaaggcaggcctggtggtgacaaaatctctcagcatttgcttgtctgtaaaagattttatttctcctttgcttatgaagcttagtttggctggatatgaaattctgggttgaaaattgttttctttagaaaggttgaatattggcccccactctcttctggcttgtaggtttctgctgagagatctgctgttagtctgatgggcttccctttgtgggtaacctgatctttctctctggctgcccttaacattttttccttcatttaatctttggtaaatctgatgattatgtgtcttgatgattatgcattcttgaggagtatctttgtggtggtctctgtatttcctgaattggaatgttggcctgtcttgctagattggggaagttcttctggataatatcctgcagagtgttttccaagttggttccattctctctgtcactttcaggtacaccaatcgaacatagatttggtcttttcacatagtcccatatttcttggagcctttgtttgttcctttttattcttttttctctaatcttgtcttcacattttatttcattaatttgatcttctatcactgatatcctttcttggtgaccttcggttgggatctttgagtggacgtgctgttcctttctgtttgttagttttccttctgacaggcccatgtgctgccggtctgctggagtttgctagaggtccactctcgaccctgtttgcctaggtatcgccagcggaggctgcagaacagcaaagattgctgcctgatctttcctctggaagcttcgttccagaggggcacctgccagatgccagccagagctcttctgtatcaagtgtcggttggcccctactaggaggtgtctccccgtcaggatacacgggggtcagggacccacttgaggaggcagtctgacccttagcagagcttgatcggtgtgctgggaggtccactgctctcttcagagtcgtcaggcagggatgtttaaatctgatgaagttgcgcccacagcctcccctttctccaggtgctctgtcccagggagatgggggttttatctataagtccctgtctggggttgctgccactttttcagagatgccctgcccagacaagggaaatctggcaatctggccatggcagccttgttgagctgcagtgggctctgcccagttcgaacttcccagtggcttagtttacactgtgagtgtaaaactgcctactcaagcctcggcaatggcggacgcccgtcccctcaccaagctctagcgtcccaggtcaatctcagactgctgctgtgctggcaacgagaatttcaagccagtgaatcttagtttgctgggctccgtgggagtgggacctgctgagccagaccacttggctccctggcttcagcacccctttccagcggagtgaacacttctgtctcgctgctgttccaggcgccactggggtatgggaaaaaagaactactgcagcttgtttggtgtctgcccaaatggccgcccagttttgtgcttgaaacctagggctctggtagggtaggcaaccgagggaatctcctggtttgtaggttgcgaaaaccgtgggacaagcgcagtatctgtgcaggagttcctcaggctcagtctgtcacggcttcccttgggtggtggagaaaattccccgaccccttgcgcttcccaggtgaggcgatgctccaccctgcttcagcttgccctctgtgccctgcacccactgtccaaccagtcccagtgagatgaaccgggtaccttagttggaaatgcagaaatcacccgccttctgcgtcgatcttgccgggagctgcagactggagctattcctatttgaccatcttgccagcaatccccccaacctttttttttttttttttaaaaagggatgggggtctcactatgtcaccccggctggagtgcagtgacacattcttagttcactgtaacctcaagctccagggcttaagagatcctcctgcctcagcttcctgagtagctgggactataggtgtgcaccaccacacctggctaattttttttactttaattttattttatttcatttttttagaaatgaggtctcactgtgttgtgttgctcaagctggccgcaagcaatcctcccacctcaggctcccaaggcactgggattataggggtgagccacagcccctggcccagtgtaatcgttacttgtattttatatgacattctctagttggtattttatgctttccttgaaaagtctcattttgatagagactattttctgccattttgtctggttcatttttttctattactatgagtttaagtaaccttttatagccagtaagatagcccattaagcccattatactttcttggtggttgattttccctcttttgcatacataggaaatgctcggaacttctttacgtttttcaaacgcagctggctctgaaactgctccagtgtctgaaagtgacggatgcgcctcatttctatggcctgccgtcccttgagcggaccttacgagggatggctaacctcactgcgtttccgggatggagctcacactctcctctcacaaagcctctagatatctgtgtgaagtacttgtcaggtctccttgaggtaagtaaaaatagcatatggtagttatttactattagttgcttttactttatgccaggccacaagtgcattatacgttactctattcaatgtagaatattatacattatttatataagtcataatagtgaaatgttttagtgatttttattaatagttaagtaaggaaggtcacttttataaataccctcattttcaaaagaaataaatggaaacttttgatgctcaaaggaagtgttcgctagagcatttcagattttggatttttggattaggaatgctcaaccagtaagtatatgatacaggtatttcaaaatccaaacaactccaaaattcaaacacttctggtcccaagcattttgtatacggcatactcaggctgtacaatgttaaaggatatttgttttttctttttcttccagtttgtgcagttctagatgctactgctatgaacattcttatcttttggtgaaaatgagcatcttttttgaaattttatcttctgttattgaaatatgtaaatatagccaatttttatatgttgaccatgtatcaggcaattcttatttccaatatcaaaacaaaagcctttaatttttcacccttcagtatgctgtttatagtttttttttgtcaattaagaaagatcaagttaaggaagttttcttttgtcctgttttgctaggagctttgttttttaattcataattgtatattgcttttttctgtatcttttaagataatcacatgatttttcccttatattccattactgattgattttaaaatgttaaacaaccttgcatttctcgaaacatttcagttaggttgtgatgtattactctttttatatgttagtggatttcgtttctcaattttttagaattctgaagtttttagaattattctatttcctcatgtaaaaaagtttttcgaattttgcatcttttttctcttaaagaatttgtcaggtttttaataatcaaaatcattccgttcttatgactaaaatgggagaatgtgagattgtaagaacgtgactttttcaaccattttaaatcttttcctttatataactttcttttttggaatagctgatttgcattggtgtgattttgttctctaatgttaggtagaatttgatcgtgaaacaatcttggtttgcagttttctttttgggaagattgtaaattgtgaaatgaaatgactttttttttttttgagacagagtcttgctctgttgcccaggctggagtgcaatggcatgatctcagctcactgcaacctctgcctcccgggttcaagtgattctcctgcctcagcctcccaagtagctgggattacaggcgcctgccaccacgcacagctaatttttgtctttttagtagagacagggtttcaccaggttggccaggctggtgtcgaactcctgatctcaggtgatccacacccgtcttggcctcccaaagtgctgggattacgggtgtgagccactgcgcctggcctgaaatgactttttaaatagatctaaaatcgttcagagtttctttttatgtgtgtcagccttagtaagttatgtttttgtagaacttaaaaactttttatctaatttttaaaatttgttactgtgaaggtattcatcaaatcatcttacacttttaatgtctgctgaatctgtagtgaggtcccctttcattgcagacattaattattcctttctcaatttttcttggtttatctttctaatagaatgaacctttggctttgttgagcctctctttaacttttttctcctgttttatttctgccaatatttattatctccttctacttttagtttagtttacagctcttttttctaacattttaaggtagaggcttacgtcattgatttttttaaaagtctttctcaaatgtgtgtttttagctctaatcctctaagcatggccttatgccatgtttttatcatcaatttaggtcaaaatatttctactgtgatataataaatacgacaatgatatggttgtacatagttctatgagaacagcctcatcacagtggcctgacaattttgcatatctgcccttgggcttcatagacaaggcttaactacagccaatctaaatcttggcagaatttcctgtgatccttctggaacatgagaatatgaaaggcttatgagcagctgactatgcaagattgattctcacttacttcacagtctattaggaagtcagttaggagcccgtttcttattggttcctaggttccgacgagcactgggctttctgccttgctctccttggggcatagctacagcttataaaactgctttactgcagcacggcatgggcttctccgcaacagagtgtcctacatctttgttatagtcatctggcccctttgtttcaatgtcatcctgtgcaagggatactagtagctggcacctttgtctattcttgcttttgctgtttatgtaggtaataaactgtctgaatccaaaaattactcattgttttcttactggacaaatctgtcagccttgttttgattgctaactgtgttcggacctcaagaatgattcttgtaggaagcactgtagagttagattttgaaagataagtaaattgatagtgatagcaatagacattctagacatggaattttctgataaaattgtatctataacctcctgtttttttttcatgctgtgggtgacttcttgacatcatataatctctacctattgccagattatttttcagaaacataaatttttcaatccaaacctctttttttttcaagagcataagactcaatattttgcatttagagatttgcctccattgtagttttttcccacatctctgaattttcagttatatctggctgtttttccaaaataaaaatgcactttaaaaagactgcttctttcacatagtttcctctcttttagggatggcaatatctacaaaaaatttaagatctaacttatttatttaccttcatttagtaaaccttttcttattcttccaaggttggatacttacctaatactgtttggcctttcctgtaggttatatacctgtaacaatttatatatgtggctattacttaatacattatatttttatttattttactttatttctttgagacagggtttaccgtgttgctcaggctggaatgcagtggtgcaatcacagctcactacagcctcaacctcctgagcccaagtgatcttcccacctcagcctcccaagtagctggggccacaggtgtgcaccactacacctggctggtttaatttttttgtagagatgggtctcactatgttgcccaggtttgtcttgaattctttggcgcaaatgatcttcccactttggcctaccaaagtgctgctattacaggcatgagccactgtaactggacctttattttgttttctgcattgctctagtagactatgagcttataagtatcatctttgggctatttctactatcccatggctactgcattgacctagcaccatggtttttacatagtggttagtgaatcagttaattaatatatgtgctacataatacatatatattgtgtatagtttttaaattaagatacagtttgaaaaacattttggaaatgtagcataaatgattataaaaatatgttttattgttgtatttttattactaaataatgatttaaataatgtatatatatattttatctggtcttatctagaacttttttccaaaagcacatattgtttttaaaacaagtttaaagatcataaatactctttgctgtactgtaaaatttaatatgaatttcactggagtccctttaataaaataaatttcggagaggttccaagatggccaaataggaacagctctagtctacagctcccagcatgagcgacgcagaagacgggtgatttttgcatttccagctgaggtaccgggttcatctcactggggcttgtcggacagtgggtgcagcccacggactgtgagcagaagcagggcggggcatcgcctcacccaggaagcgtaagaggtcagggaattccttttccaagccaagggaagccgtgacacatggtacctggaaaattgggacacttccaccctaatactgtgcttttccaatggtcttagcaaacaatacactaggagattatatcccacgcctggcttggagggtcccacgcctatagagcctcgctcactgctagcacagcagtctgagatcgaactgcaaggtggcagcgaggctgggggaggggtgtccgccattgctgaggcttgagtaggtaatcaaagcggccgggaagctcgaactgggtggaacccaccacagctgaaggaggcctgcctgcctctgtagactccacttctgggggcagggcatagctgaacaaaaggcagcagaaacctctgtagacttaaacgtccctgtctgacagctttgaagagagtactggttctcccgttacagagtttgagatctgagaacagacagacagcctcctcaagtgggtccccaacccccgagtagcctaactgggagacacttcccagtaggggccaactgacacctcatacagccgggtgcccctcttgagacgaagcttccagaggaaggatcaggcagcaacatttgctgttctgtaacatttgctcttctgcagcctccgctggtgatacccaggcaaacagggtctggagtggacctccagcaaactccagcagacctgcagctgagggtcctgactgttagaaggaaaactaacaaacagaaaggacatccacaccaaaaccccatctgtacgtcaccatcatcaaagaccaaagatagataaaaccacaaagatggggaaaaaacagagcagaaaagctgaaaattctaaaaatcagagcacctcttctcctgcagaggaacacagctccttgtcagcaacggaacaaagctggacggagaatgactttgacgagttgagagaagaaggcttcagaagattggtaataacaaacttctccaagctaaaggaggatgttcgaacccatcacaaagaagctaaaaaccttgaagaaagattagacgaatggctaactagaataaacagtatagagaagaccttaaatgacctgatggagctgaaaatcatggcacaagaactacatgacatatgcacaagcttcagtagctgatttgatcaagtggaagaaagggtatcagtgattgaagatcaaatgaatgaaatgaagcgagaagagaagtttagagaaaaaagaataaaaagaaacaaacaaagcctccaagaaatacgggactatgtgaaaagaccaaatctacatttgattgttgtacctgaaagtgacggggagaatggaaccaagttggaaaacgctcttcaggatattatccaggagaacttccccaacctagcaaggcaggccaacattcaaattcaggaaatacagagaacgccacaaagatactccttgagaagagcaactccaaggcacataattgtcggattcaccaaagttgaaatgacagaaaaaatattaagggcagccagagagaaaggtcccgttacacgcaaagggaagcccgtcagactaacagcggatctctcggcagaaactctataagccagaagagagtgggggccaatattcaacattcttttttttttatgatttgcttttttttttttttttgaagtatttattgatcattcttgggtgtttctcggagagggggatgtggcagggtcataggataatagtggagagaaggtcagcagataaacacttgaacaaaggtctctggttttcctaggcagaggtccctgtggccttccgcagtgtctgtgtccctgggtacttgagattagggagtggtggtgactcttgaccagcatgctgccttcaagcatctgtttaacaaagcacatcttgcaccgcccttaatccatttaaccctgagttgacacagcacatgtttcagagagcacgtggttgggggtaaggttatagattaacagcatcccaaggcagaaaaatttttcttagtacagaacaaaatggagtctgctatgtctacttctttctacacagacacagtaacaatctgatctctctttcttttccccacatttcccccttttctttttgacaaaactgccatagtcatcatggcccgttctcgatggtcgctgtctcttcagagctgttgggtacccctgcagacaggctgtcacttcatgcttggaagattgcacagcggccaggcagaggcgctcctcacttcccagacgaggcggccaggcagaggcgatcctcacttcccagacggggtggcggctgggcagaggcgctcctcacatcccagacggggcagccgggcagaggcgctcctcacttcccagacgggacagctgggcagaggcgctcctcacttcccagacggggcgcctgggcagaggcgctccccacttcccagactggacagctgggcagaggcgctcctcacttcccagacggggcgcccgggcagaggcgctcctcacttcccagacggggcagccaggctcaacattcttaaagaaaagaattttcaacccagaatttcatatcctgccaaactaagtttcataagtgaaggagaaataaaatcttttacagacaagcaaatgctgagagatttgtcaccatcaggcctgccttacaagagctcctgaaggaatcactaaacatggaaaggaacaagcggtaccagccactgcaaaaacatgccaacttgtaaagaccattgatgctaggaagaaactgtatcaactaacgagcaaaataaccagctaacatcatgatgacaggattgaattcacacataacaatattaaccttaaatgtaaatggtctaaatgctccaattaaaagatacagactgggaagttggataaagagtcaagacccatcagtgtgctatattcaggagactcatctcacgtgcagagacatacataggctcaaaataaagggatggaggaagatcaaccaagcaaatggaaaacaaaaaaaggcaggggttgcaatcctctctccgataaaacagactttaaaccaacaaagatctaaagagacaaggccattacataatggtaaagggatcagttcaagaagaagagctaactatcctaaatatatatgcacccagtacaggagcacccagattcataaagcaagtccttagagacctacaaagagacttggactccacacaataataatgggagactttaacaccccactgtcaacattagacagatcagtgagacagaaagttaacaaggatatccaggacttgaactcagctctgcaccaagtggacctaataggcatctacagaactctccaccccaaatcaacagaatgtacattcttctcagcaccacatcacacttattccaaaattgaccacatagttggaattaaagcactcctcagcaaatgaaaaagaacagaagttatgataaactgtgtctcaaaccacagtgcaatcaaactggaactcaggattaagaaactcactcagaacagctcaactacatggaaactgaacaacctgctcctgaatgactactgggtacgtaacgaaatgaaggcagaaataaagatgctctttgaaaccagtgagaacaaagacacaatataccagaatttctgggacacatttaaagcagtgtgtaaagggaaatttatagcactaaatgcccacaggagaaagcaggaaagatctaaaattgacaccctaacatcacagttaaaagaagtagaaaagcaagagtaaacacattcaaaagctagcagaaggcaagaaataactaagaacagagcagaaatgaaggaggtacagacacaaaaacccttaaaaaaaattggtgaatccaggagctggttttttgaaaagatcaacaaaatagatacaccactagcaagactaataaagaagaaaagagagaagaatcaaatagatgcaataaaaaatgataaaggggatatcaacaccgatcccacagaaatacaaactactatcagacaatactataaactcctctatgcaaataaactagaaaatctagaagaaatggataaatttctggacacatacaccctccgaagactaaaccaggaagaagttcaatttctgaatagatcaataacaggctctgaaattgaggcaataattattagcctaccaaccaaaaaaagtccaggaccagatggattcacagctgaattctaccagaggtacgaagaggagctagtaccattccttctgaaactattccagtcaatagaaaaagagggaatcctccctaactcattttatgaggccagcatcatcctgataccaaagcctggcagagagacaacaaaaaaagagaattttagaccatatccctgatgaacatcagtgcaaaaatcctcaataaaatactggcaaactgaatccagcagcacatgaaaaagcttatccaccatgatcaagtgggcttcatccctgggatgcaaggctggttcaacatgcacagatcaataaacgtaacccatcatataaacagaaccaaagacaaaaaccacatgattatctcaatagatgcagaaaaggccattgacaaaattcaacagcccttcatgctaaaaactctcagtaaattaggtattgatgggacgtatctcgcaataataagagctatttatgacagacccacagccaatatcatactgaatgggcaaaaactggaagcattccctttgaaaactggcacaagacagggatgccctctctcaccactcctattcaacagtgttggaagttctggccagggtaatcaggcaggagaaagaaagaaagggtattcagttaggaaaagaggaagtcaaattgtccctgtttgcagatgacatgattgtatatttagaaaaccccatcgtctcagcccaaaatctccttaagctgataagcaacttcagcaaagtcgcaggatacaaaaaatcaatgtgcagaagtcacaagcattcctatacaccaataacagacaaacagctaaatcatgagtgaactcccattcacaattgcttcaaagagaataaaatacctaggaatccaacttacaagggatgtgaaggacgtcttcaaggagaactgcaaaccactgctcaaggaaataaaagaggacacaaacaaatggaagaacattccatgcttgtggataggaagaatcaatatcatgaaaatggccatactggccaaggtaatttatagattcaatgccaccttcatcaagctaccaatgactttcttcacagaattggaaaaaactactttaaagttcaaatggaaataaaaaagagcctgcattgccaagacaatcctaagccaaagaacaaagctggaggcatcacgctacctgacttcaaactgtactacaaggctacagtaaccaaaacagcatggtactggtaccaaaacagagatatagaccaatggaacagaacagagccctcagaaataataccacacatctacaaccatctgatctttgacaaacctgacaaaaagaagaaatggggaaagcattccgtatttagtaaatggtactgggaaaactggctagccatatgtagaaagctgaaactggatcccttccttacaccttacacaaaaattaattcaagatggattaaagacttaaatgttagacctaaaaccataaaaacccaagaagaaaacctaggcaataccattcaggacataggcatgggcaaggacttcatgactaaaataccaaaagcaatggcaacaaaagccaaaatagacaaatgggatctaattaaactaaagagcttctgcatagcaaaagaaactaccatcagagtgaacaggcaacctacagaatgggagaaaatttttgcaatctacgcatctgacaaagggctaatatccagaatctataaagaacttaaagaaattttgcaagaaaaaaacaactccatcaaaaagtgggcgaaggatatgagcagacacttctcaaaagaagacatttatgcagccaacagacacatgaaagaatgctcatcatcggagaaatgcaaatcaaaacgacaatgagaaaccatctcacaccagtcagaatggcaacattaaaatgtcaggaaacaacaggtgctggagaggatgtggagaaataggaacatttttacactgttggtggaactgtaaactagttcaaccattgtggcagacagtgtggtgattccttaaggatctagaactagaaataccattttacccagccattccattactgggtatatacccaaaggattataaatcatgctgctatattcatggaactagcccaaatgtccatcagcaatagactgggtgaagaaaatttggcacatatacaccatgtaatactatgcagccataaaataggatgagttcatgtcctttgtagggacatggatgaagctggaaaccatcgttctcagcaaactatcgcaaggacagataaccgaacactgcatgttcgtgctcataagtgggaattgaacaatgaaaaacttggaaacagggtagggaacatcacacaccagggcctgtcatggggtaggaggagggtggagggatagcatcaggagatatacctaatataaatgacaagttaacaggtgcagcacaccaacatggcacatgtatacatatgtaacaaacctgtacgttgtgcacatgtactctagaactttaagtatattaaaaaaataaaataaacttcattttttaattataaatattaaaaaaggttcaactgtcagtatactaattagttattttctgctgtctattagaaatgtatgaattttaaaaaacaggtatattaaagagttaatgataatatttcttagaaagtcagctcctctagtgcatttaaaatataattcagttagtctagctagtggcctatctatctcattaagtttttcaaaaaaacaactcctggatctagtgacctttcgaatggtttttcatatcttgatttccttcagttcagctctgattttggttatttcttgtcttctgctagtttggggttgatttgttattgctgctctaattctttcagttgtgatgttaagttgttaatttgagatctttctaactttttgatggaggcatttagtgctacgaatttccctcttaacactgccttagctgtgtcccagagattctgatgtgttgtaactttgttctcatgagtttacttgtgtaacaaacattcacgttacccgtgaacctaaaagtttaaaaattaaaaaaaatatataattgaacctataagtacctagtttatagcattttttgtcatgtgatttataaatactctatttatcaaccttttacagagtcagtctcctctagaaaatgagttttactctttgaaatcaggaataggtgaggacctgccacagcggtaactaaagaagaagtgaagtgttgcctcatttatgtttagaaactatcagaagtgcttttgttttaaaattacgtgcaaagactttagatcacacctacgtttcaaataccagaaattgaaatgaactgttaatgtattggagaacaaaagggcttagttttaggtaagaagtgtaggcaaaaaggcagtagtccattctgtgttcagttgtctttgaggtaataaaatttagtaacagtttgttagctaaaggatacataaaaagcacagtccctgttatgtaatgtttcgcagttataaaaaatttgattagccaatcttgctttggtttaaaaaggaggtcgttttgtgcttcataaaacatctcgagcagaaaatctttatgactttatgttaaatggcaggcaaatattaggaaagaatccgtcacttttgttaaaaattgtagcagggtaacatttaatcttgggactatctgcttagtttattaattacataaacaggtatccctgttgtactactaatgactaaattcatcttttaaagaataaagtaaggcttatgtgagagaacattgaaacaaagtcattgttggtccaaatgatttgcttcatagtttcttagtaattaaagctgtttcctttttggaagggagccatatttctaataaaagattagcttgtttctgcacagtgaaatttgaatatgagtatttgctttttgtagctgtgaaatgagactttttaactaagcatgattaattatgataggtgaataaactatgataattaaatctttaaatcagatacatgatgtataattccagaggtctgacaaaaatatcaagttgaaagaaaatactggcaaaggtcttggcttgtcatttataagctagaattaaaaatcattacacagatcacagatgttagatatctccaaagatgacttagaggaagataataaggatctgatcatttagatattttatttttcaagtagtcacttaaaattttaaatttttgaccttggggaaggggcagctgtgggcacagcttcagcaaacttaaatattcttgcctgccggctctgaagagagcagtggatctcccagcacagcactcaagctctgctaagggacagactacctccttaagttggtccctgaaccccgtgcctcctgactgggagacacctcccagcaggggttgacagacacctcatataggagagctctgctggcatctggcaatgcccctctgggacgaagcttccagagtaaggaacaggcagcaatctttgctgttctgcagcctccgctggtgatacccaggcaaacagggtctggagtggacctccagccaactccagcagaccagcagcagaggggcctgactgttagaaggaaaactaacaaacaggaatagcatcaacaccaacaaaaaggacttccactcagagaccccatccaaaggtcaccaacatcaaagaccaaaggtagataaatccatgaagatgaggaaaacccagtgcaaaaatgcggaaagttccaaaaaccagaatgcctcttttcctccaaaggatcacaactccttgacagcaagggaacaaaactggatagagaatgagtttggtgaattgacagaagtaggcttcagaaggtaggtaataacaaactcctccaagctaaaggagcatgttctaactcaatgcaaggaagctaataaccttggataaagggtagaggaattgctaactacaataaccagtttagagaagaacataaatgacctgatggagctgaaaaaaacagcaccagaacttcgtgacacatacatgagtatcaatagccgaatcgatgaatcagaagaaaggatatcagagattgaagatcaacttaatgaaataaagcaagaagacaagattagagaaaaaaaaaaaacaaaagggaatgagcaaagcctccaagaaatatgggactatgtgaaaagagtgaacctacgtttgattgatgtacctgaaagtgacagggagaatggaccaaattggaaaaaactcttcaggatattacctaggagaacttccccaacctatcaagacaggccagcattccaattcaggaaatacagagatcaccacaaacatgctccccgagaagagcaaccccaagacatgtaatcgtcagatttaccaaggctgaaatgaaggaaaatatattaagggcagccagagaggtcgggttacccacaaagggaagcccatccctgttagtcttaccagcggatctctctcagacaccctgcaagccagaagagagtgggggcctatattcattaataaagaaaataattttcaacccagaatttcatatctagccaaactaagcttcaaaagcgaaggagaaaatcctttacagacaagcaaatgctgagagattttgtcaccaccaggcctgccttacaagagctcctgaagaaagcactaaatatggaaaggaacaaccagtaccaaccactacaaaagcataccaaattataaagaccattgatgctatgaagaaactgcgtcaactaatgggcaaaataaccagctaacatcgtaatgacaggatcaattcacacataacaatattaatcttaaatgtaaacaggctaaatgccccaattaaaagacacagactggcaaattggataaagaggcaagacctatcagtgtgctgtattcaggagacccatctcacatgcaagacacacataagtttgaaataaagggatggaggatgatttaccaagcaaatggaaagaaaaaaaaaagcaggagttgcaattttcatcactgataaaacagattttaaaccaacaaagataaaaaaaaaaacaaggcattacataatgataaagggatcaatgcagcaagaagagctaactgtcctaaatatatatgcacccaatacaggagcacccagattcgtaaagcaagttcttagagacctacaaagagacttagatttccacacaataacagtgggagactttaacacctcactgtcaatattagatcaacgagactgaaaattaaaaaggatattcagaaaaaaaaaaagggatattcaagagttgaactcagctctggaccaagcggacctaatagacatctacagaactctccaccccaaatcaacagaatatacattcttctcagcaccacatcgcacttattctaaaattgaccacataattggaagtaaaacactcctcagcaaactcaaaagaatggaaatcataacaaacagcccctcagaccacagtggaatcaaattagaagtcagcattgagaaactaactacaaaccgcacaactacatggaaactgaacaacctgctcctgaatgactactgggtaaataacacaattaaggcagaaataaattagttctttgaaaccaaagagaacaaagacacaatataccagaatctctgggacacagctaaagcagtgtttcaccaaatgcccacaggaggaagggggaaagatctaaaatcgacaccctaacatcacaattagaagaactagagaagcaatggcaaacaaattcaaaagctagcagaagacaagaaataactaagatcagagcagaactgaaggcgacaagagacacaaaaaacccttcaaaaaaaatcaatgaatccaggagctggtgttttggaaaagatcaacaaaatagatagaccactagcctgactaataaagaagaaaagagagaagaatcaaatagacacaataaaaaatgataaaagggagatcagcactgatcccacagaaatccaaactaccgtcagagagtgttataaacacctctacgcaaataaactagaaaatctagaagaaatggataaattcctggacacatacaccctcccaagactaaaccaggaagaagttgaattcctgaatagaccaataacaggctctgaaattgaggcaataattaatagcctagcaaccaagaaaaggaccagagggattcatagccgaattctactagaggtacaaagaggatctggtaccattccttctgaaactattccaaatgatagaaaagagggaatcctccgtaactcattttatgaggccagcatcatcctgataccaaaatctggcagagacacaacaaaaaaagaaaatttcaggtcattatcactgaggaacatcaatgcaaaatcctcaataaaagactggcaaaccgaatccagcagcacatcaaaaagcttatccaccatgatcaagttggcttcatccctgggatgcaaggcccgttcaacatatgcaaatcaataaatgtaatccatcacataaacagaaccagtgagaaaaaccacatgattatctcaatagatgcagaaaagtctttcgataaaattcaacatctcttcatgctaaaaattctcaataaactaggtattgatgagacatatctcaaaataataagacctatttgtgacaaacccacagccaatatcatactgaatgagcaaaagctggaagcattccccttgaaaaccagcacaaattattcataaactctttaaaaggatgctataacatttttaaaaatattataagcatattctaagttacaactgtgtactaggagggcaccacacatctttttttttttttttacagactttaaaaggaaaaatattgaaactaagaatttttgtttttgttttgaaaaattacaggatctcactctgtaacttaggccaagtgcagtggtgcaatcatagctcaccgcaagctccagctcccaggctcaagggatcctccctcctcagcttccccggtagctgggactacaggtgtccactgccatgcctggctaatttttttcttttttaaagtagactgggtcttgctatgttatgtaggctgaagaatattttcttttaacaatggtaaaatacccataacataaaatttaccatcttattcatttttaagtatataaactaaaaatattacaactttataaggtaaggattcaattcatacaagtcagtagacagttatatatttatctttatataccattgagaataaagccaccatgaaattgtttacatttgtttttcaggtcattacttctttttatgtggagcgtggaggaaatgctatgtccttcatgggaaaaggtgttacaaagagcacaattctttgcttgcttcacttatcccatgagatgatggcccaggctgggagcttggtgagcgcgttaaagctgtctatcttctgaacatttgcttgaaagggaatgtgctgtgtccaacacatttcaagcatataaacttgccacatgaaaatgtctcttttgacttttctttttaggtaacgtgaatgatttttgactagaatatttcttagaagttgtatattaacaaatctgaatcttatttgaaattgattcaaatgtgcatacactggaaaactacattttgtctacattatgggaaaaatagcttctgtcaaaaaattgttatgtttaactttttaaagagaaacaaatttttttgtttgccttttttggctgaataatggattaaaaccaagtctaaaatacattttcacgttgttttcattaaaaattcttgttttaaccttcctgcattttatttttagaaacttacctcaaatatttctgtttcccttttttccctctaggagtggatgtcactttggttcttgcctttgggtagtcatagtgaagaacatattcctactcaacaaggattggcttggttgattccattatgggttgatcgggacccagaggtgagtgtgaaggagaatcaagtgtattgtgtttagattaaaaaacaaatgacacggggccaggtgcggtggctcatgcctgtaatcccagcttgttgggaggctgaggtgggcagatcacgaggtcaggagattgagaccatcctggctaacacagtgaaaccccatctctactaaaaatataaaaaaattagctgggtgtggtggcaggcacctgtagtcccagctacttgggaggctgcagcaggagaatgctgtgaacttgggaggtgaagcttgcagtgagctgagattgtgccactgcactccagcctgggcaacagagcaagactccatctcaaaaaaaaaaaaaagacacaaaacatatatacatatacatagttatattatgggattattgtagtgactctaccttatgttttatttaagccctgttttagcttaggctgccataacaaaataccacagactgggtggcttagacaacagacacttcttttctcatagaagttttggaagctgaaagtccaagatcagagtgccggcatagtcaagttctggtgagggctcttcttctggcttgtagacggctgccttcttgctgtgtattcacgtggcctttccttggtccatgcatgtggggcaggggagggaggggtggtatagagacagatttgtctttttttttttattataatgttaccagtcttattgagataggaccactcccttatgatctctttaaaccttaattatctcctagaaaccctgtcttcaaatgtagtcacttgagcataaagacttcaacatatgagttttggagggacgcaattcagttcatagttttccatccctgagcccctgaacttcatgttcttcttccatgcaaaatgcttttattctccctcaacaacctcaaaagtcttaacttattcccaaatcaactgtaaagtctaaagtccaaaatctcatctaaatgtcatttaaaccacatctgggtaagtctccagatataaaccctcctgaaacagaattcttctgcaggtgtgaacctgtgaacccatacaagttatatgcttccaaaagatgatggtagaatagacattcccattccaaaagagagaaataggaaaaaaaggaagaagtgatgggtcccaagcaagtccaaagcctagcaaagcaaatttcattagatgttaatgctcaaggataatgttctttggcttgatggtgtgccttacaggcccaccagagtgacagcatctgtctagatggctctgtgggatgaccccacccctttggctgtcttcaagagccccgcccataaagctgtcttcaagggcagccatgttcctgaagcactgggcagggtcatcattctggcccacagaaatcagaggtctttgaaaccaaggaggaaaagccacccttgagtcctgtggtgggattagcagcctggggatctctgaatcattttttgggtcattcttttcattgaagaatacagtagtcctcccttatcagaggtttcattttccaaaagcaccctgaagatcagtagtagccaaaccctccctcacaatgcctacatcattcacctcacctcatctctttatgtaatcattgtatcatctcacatcaatacaagaaggctgagtgcaatacaataagatattttgagagagagaccacatttatgtattttgtattataacatattgttgtaattgttctagtttatttttagttattgttaatctcttactgtgcctaatttgtaaactttaccatagatatgtatgtgtaggagaaaacatagtagttatagggctcagcactatctgtggtttcaggcatctactgggggtcttggaatgtattccccatggataagggagggaccactgtagcacatatttgcttacagaatccaggaagtccaacagctttccttcattctctgcatctttctctgtcctctttagttcaaactggcaatgtctttgctgatataatcccatctctattcctggcttctgctgagatgtctgattaagtccatgaattgcacccgtgatctttttcttaaatgggtattcagccacaccctccatgttctctttagaacaagctttctcattttttttgcacagataggctgagaatttttcaaatcttgttcttgtttctttttgcttacccattcttaattccttctttaattcatctctctccctttgcattttgctataagcaatcaggaggaaccaagccaatttttcaacactttgcttagaaatcttctcagctaaatatccaatttcattgctcacaagttctgcctttcacaaaacactagaacatgaccacagcttaaccagttttcttgctactttataacaaggattgcctttcctcaaataaccttttttaaataacactttcctcatttttgtctgagatctcatgagaattacccatgtctacgtttctggcatccacctcaaaactcttctagcctgtaacccattacccagtgccaaagtcactttcatgtgtttaggcatttgtttcagcagcatccccactccttggtacaaaaatctgtattagtgtgctcaggcttccataacaaaataccattgtctgggtggcttaaaaacagaaatttatttcttacagttatagaggctgcaagtccaagatcagagtgtcaacatggttggtttctggtagggcactcttcctgatttacagagggccaccttctcactgtgtgctcatatgacctctccttggagcacgcacatggagaaagatttctctccttcctgaggccaccattcctagtgcagtagggtcccacccttataacctcatttaactgtaatcacctaatagctctgtctccaaatacaggttggggattagggcttcaacatacgagtcttgaggagacacagttcagtacacagcaccctcattttcaatcaaatttgttcgagtatagattgaaaatataaaagagaaaaggttatagtatctattaccttcagaagagtggaaaattattggagaagcttagcaattttgaaaaaaataaaaaggatctggaaattatagacatgcaacacttaagtgtcatataatgaaattaaattaaatgcaaaaaattgcatttgcattacaatacaaaattttgtattatttctttccagttttagccagtttacttttttcaagtaaaatatgctattacaataaaatcttatttatagaaatatttgaaatacattttttagtcacattgaacttggacttactacttgacaattttatgactgcatttttaaaaaattctatagctgtcattgaaactatatttttggattcgaattcagaaatttaccaaaacgtgtggcttgaacagcagtggttctacagcaagcatattataccacatcaatcttatttgggaacgtttttctcttgaataacttttgaggaaaatacgaaatgccttgtaaaatgataattgcctctttgtttagaagttttaagaaagttaaaatcatttatttggaagaaacaataaaaaattaagaaaggtagaacaaagaatagctaccttttttaagaatgaagaattgaaattgtgttcataaaatgtaagtgccctatgctttccttagaaaaaggcttgcaaactataatttttatgcatctttttatacccagttttactttgctttgaaatttgcttatatttaatttttcctatattactgctttcttgaatcatggaatggaggacactgtcttctataggtgtctcttataatttaggatcataaaaccaatggatttttttaaagtgtgatatttatgtaccagaaaaactaagaattcatgttaggaaaaaggcttatttgattcaacaactttctctttaatttgaacaggtgagattcacttcactgggattaggatcagcactgaccacccttgaaacgggctgtgtggccttagcaaacagttgtcagaacatttccggtgggctctggggaactgtggtgaacattcttctggaccagtcagaatgtagtatggtgcgccgggaggtatgtctgtcttttctcctttttttccttagaaattctttgtgatggtatccgtaagcgatacttgactgccgctcaacatggtggactgaccactgaccatgatctcttctgtctgtgaacacccaaacaaaatgacagtagaggatttaaaaggtattcatgcacaggaaaaactggagtccttccttccgataagataaaatcggaatatactatattttaatgtgaactttttttattatgcattgaaaggtagttcacaggaaaaattacttttatattatctcagcatttatgggtctctgatatttatgaagctttagtatagataagaggctgtcaaaataactctttgtagtatttatcatataacatgagagggaaaaataaaccctattttaattctttctgaatagcttgtggtttttttttattgctgcttttgttaaagtaatgattcatgtaaatggttttaaaacaataatcaaattgtacttagaggcttatgaaaaaaaacagcagctcctgggtccaccattagcagtcgccagttccaagctcaaaaggctagttttgttgctgtttgccttcatgtttttaagtagtgatgtttatatttatggctgcttcttgatttatcaactttaaagcttttccatcacttctagttatcatggttggaaatgtcagtttcttagaatcctcttgttaatcctgtcattctcccattatggttatttcatctttcattaagcagacaatcaatgctcctatttgtatgattatttaatttgatcatcttcaggatctagtcaagttggacatttgtggtttgtatttctagttagcaagtttttattgaaaggagtctgtataagagaagggagaaagcggggcagaggggtgcgtgtgtttgtgtgtgtgtgtgtgtgtaatctgaaaggggatagtagaaacctaaaattatatttcttaaatgctaccagaagaatttatgttatacaaatcattttttaataaagctgaattctgaaataggaaaagatatatttcctgatgaaataatttcatatgctgttaggtcattacctaacaaggtcattacctaagaaggtcatcacctaacaagaaatacagtttgacaattctcataatgacctctcagcatgtgcagttgaccagagatgtcttttgctattaattacaatatattggttatttcagagatgaccacaagatggcagtattgacctttttttttttttttttttttttttttttttttttttttacattttcaggcggcatttattcttcagaatctccttgtaattccaatgcctacagaaattataaaggattatacttggcaggtgggtgattttaaacaattatcaacctagtagatgtttcaaattaattggtgataaattttcagtataagtagtatatttcattattgatgaaactatatacaagacagcaagggcctcttaaaatagaacgtagaatttgttcttatgccgaccagacttaaaaattcttctctatagtgttcacaataatttaaagcaaataataatagttaacatatgtttactatgttttaggcacccttctagaaatgtaagacatagtaacttgtataattgtttgagttgtgaactgttactatccttattttctaagcttaggaacttttgcatagagagtttaaatagtttgtcctaaatcacacagctagtcagtggtacgcctttgctttgagtctaggcagtctcttacccactttgctgtattacttctctaatttagtaataataaacaaatttgtagatagttaaatatgtgttgatgttaacatctttttttccttttctaggttagtgcacagtgcgggttatagtgtatcttgctttgttttctgttgggttaactttctttttcatgttctgaatatcacatcagtaaatggttacctaacatttttatagcttacattaaaaaaattctagcttcatgggatatatgtacatgtttgttacataagtatattgcgtaatggtggtggggattggggttctcgtgtactcattacccaaatattgaacattgtacccagttaggtaatttataacctcagccgcctcccccactccctccttgggagtctcagtgtctgttatgtctgtctttatgtccatgtgtattcattggttagctcccacttatacgtgagaacacgcaatatttgattttctatttttgagttagttcacttagataatggcctccacctccatccatgttgctgcagttttaggtaatttggaagatacaaaagtacacttattggggatataagatgtgctgtttctgtccttttacctatccatatattttcaccttatagggatatatttatcatattgctacacctcactcctcaaaatcctgtataaatctaaggtttatttttaagttttaattagactatactcttagaggagttagtgaaacaagctgaaccgtagcaagggcaagtttccgcacatgacccgaagcatgaatccaggtggttgtcaaggcccaggtagcatttaactcttggaaggcttacctctccaaactttacaaacccagggtaaccctaccagtcattgtaaatcccaggcttgtaatttgctcgtaatttctttaacattgccttctgataatggctgcttatctactttccatgttgtaataaaaccaggagacaaaactggagggaatatgcaggattaatagttatattaatagtgtagtagttttggtacctgttatccggagactacattttaaaacatgttgtttttggctcaaatacaaataatctctactcccattgttaaactagtgacccatgtacatggatatacttggtgatgtactaccaatgaatttttaattattgaaataagtataaaggcagagtatattaaagttcctgggacattatgttgtaatacagaaccgtatgtagctgttcatatttttctcttagaaattaaatagtaaagttcctgtttgttgctggtggcatgcttactgcagtttattggttttgttattctccagtcttcatcatggaaatccttttctactaaaaagtggaaaatagtgatttaagttagcttttggagttttggccttgctaagttggccaaaataaaaaaagttggagagccactgctgtcccaaacaatagttgattacaacttttgctagtcttaggaaaaattagataaataaggacaatcttgtatgctttttaataaactcagattttcttcctctcttttcagtctttttttttttttggttatttttgtttgtgtaagtgtccttccttggcagtgaaaatagttaactcagtatatctgtcatccaattttaagaaagtttagtggggtctgaaattccaaagtagaaacagcttctgcaagaaggaaacaagatggttgtctctgggtgcagctagtggggcacatggtcctttgcaaccatgaaaaaggggccacatagccagtattttaaaattcaaacagtctttggtagaattatgaataataatcttattcaacaaaatgtttcatttacttattttagtgtccctttcatagtgttgtggaggatatagcatgaaacagcatgtttaggagctttgttaaaattttattttggttgaggtaaatatttgattttttttttttaacaaagagaattgcttctattgctttgcactttgttttcctgcctgcagtctaaattaatgcccgctagtgctcttgtttcataggctttctgaagcattctctttataattactactccttttcctctccttcctctgcacagtagcataaattcctacttcatgtcatgacatagaattgttgtacttgtgaatagtaataatatgcatatatgaattatgaataatattatagctgagtttcccttttattgttagatgccagaaagtagagcccttttatcaattgtgactttttctgtatgtacttaaaaaaaaaaaaagatggggtctcactgtgttgtccaggctggccttgagttcctgggctcaagtgatacgcttgcctcagcctcctgagtagctgggaccccaggcacatgctgccacacccagcttaccttctaagctttattcatggttgcactttttccatatctctggcttttttctttcttttattcctgatatgcatttactatcatgttacaatttacctttccttgtaatgggccttaaatcttttctcggacaagataggaagtaaataatttaaaacaatttatttttttaaagtattaaataattttaccaaccactgcaattcccattttaatcttccttttaaagacactaacatttaatgtcttaccactaaattaggttattttccatatttgcattatttcttaccatttaacttaatcttcctgtgtagaatgtttgtttctgacaggactacattttttatattttaaaaaatgtttctcccaacccctaccacagagaaagtaagtgctccatctgtcttgactgattcattaaaatgtgcaaaacatttgagttatccttttggtcttaatatcataagtaaatacagttagaaataaagccttaattttcatagcataagtccccttttatttttctgtggatgcagaagcatactggaagtggggtggtcaccaagaggaggagcagatgaagtatctcggcctgtcttcccttgacatctagcactcctaccaggggccttgataccaggcccctgctggatatgagaacccagttcctgctgtgtcagtctttggtgtgtcacagctcttttatattcaggacactaacttttcagagggatatttacaaacattggtcttgttcttgagtcaaactcagcctcattcaaagctacatcccagctgggtgtggtggctcatgcctgtaatcccaacacttggggaggctgaggtgagaggatcacttgagcccaggagtttgagactagcctgggcaacatagtgagaccccatctctaaaaaaaattttaaaaattggcctggaatggtggcatgcacctgtagtccctagctactcaggagactgaggcaggaggattgcttgagcccaggagtttgaggccacagtaagctatgattgtgtcactgtgctgcagcctgggtgacagaacaaaaccctgtctctaaaaacaaaaaccctgcatactacattctctgccaagaagagaaaacagagccaatattcagttgacacgaaactgtattgtggctcccaactgtccagtgtttttcagaccagtttcccacagtctgactaggagttaagactcctgaatgtggatggtttcataactgggtttagtttgaagactagtgtcagaaatccgtatccctgaaactttaacaaccaattttagagttgattataacaagaaatctattgattagagatggattattgatgtaattttctcagttcatttctgtaaacatttgttgagtgtctaaatattggagattcacagataatccaatttagtattcttgggcttatggcctacaggggatgacatgtacccaggaaacattgttataatcatgttatgtatgatgatggtagcttatgcataattttaataatatttcagttctttccacttgaaaatgatctcacatttaaatgtaaagggtaatttcatgcacttaaataacataatgggttgtcagtttgtgatttaaataaacttgttcatgctctagttgctttccatgtttgtgacaggactttgaattggtacacagactttttaaactttattttgaaaaaacttagatttataggaaatttgtagaaacaatacaatttttatgtactcttcacccagattccccaaatgttattttacacatttacttcagctctgtctagtgtcttctttctaaactattggagagttgtagacataatgcttcttttcctctgaacacttaagtgtggatttcctaaaaataaggatatcctcttacataatcacaataataattatcataattaggagattactcaaggattttcagttgtcccactgctgtttttaatagaaaaaaaagaaaaaaaaatccaatcctggatccaagatccagctcaggaatacacattgcatatacttgtcttacatatttgctttcgttcatctgaaatagtttcaaaattttaaatatttatgatcttaacatttttgaagaatgcaggctacttatttgttgtaatatacttcaattagatttgtccttttccccaggtttagatttgagttacgcatttttggcagaaaaaccatagaagtgatgggttctcagtgcaacatgtcaagagatattatatctctctttcccattgttggtgatactaactttgattacttagtaaagatagaatctgcctgttttgtcctttgtaaagttacagttttttcttttggaaggaggtgctctgagactgtaaatatctgtttctcatcaaactttctttcactagttttttgttttgttttgttttacttttttttcccccataggttattggggaacaggtggtgtttgattacatgagtaagttctttagtggtgatttgtgagattttggtgtacccatcacctcagcagtatacactgcacacagtttgtatcttttatccctcaccccttcccacccttttccctcaagtccccaaagtccgttgtgtcattcttaagcccttgcatcctcatagcatagctcccgcttatgagtgagaacatttgatgtttggttttccattcctgacttacttcacttagaataatagtctccaatctcatccagatcactgcgaataccattaattcattcctttttatggctgagtagtattccatagtgtgtgtgtgtgtgtgtgtgtgtgtgtgtgtgtgtgtgtgtgtgataccacacacaccagtttatccactcattggtggatgggcatttgaattggttctacatttttgcaattgcaaattgtgctgctataaacatgtgtgtgcaagtatcttttttgtataatgacttcttttcctctgggtagatacccagtagtgggattgctgaatcccactggtagttctacttttagttctttaagaaatctccacactgttttcctagttttaaattccattcatgattcttacctgaaacagttattacagaattgttgccaaatgatttcctaactccatcatttctttctatgtttattacatgctactgtaaggaagaacttttcattcttccttgcttatttagtgattcacttatttacaccagcatggattgaagattcttaagtttgtttaatgggctataatctgtttctatcattatttgtttcaatgttcaaatcattcttgctttggccaggggaaatttcttcataatggttcttgtgtctttatcaatatttgagccatttccttacttctggtacagcaaagtgttctagactgtccagctccatcctggaatcagatatttgctccaagggctctgatttcttttcatggagaatggtatttagaaaccaagatctgcgttctagatgtattcattgttcctggggtgtcattgcttctatgtcctgtgagtgaacaaagctagtaattgtctgtgtatatgttttaaatagtcagctcatttatagttatatattattttgatatttgatatgattaatatgtattatttttatcttttgtttgttatgaagcatcatgagtatttccagaagacaatgagtacttggtaaactgatatcattgtaatgatattcatattttacatgtagttttggatttctaatgtatttagggtcatttttacagtctttggattatagcatttttgttatatatgacaataattcatttttctccttgaaaatattatatcttcttaaatgttattcttactttgcttctagtaccttttcaattatagctaatgggtatattagcactgacactaggagtataatatgcattttaaaattagtattctgatttattgcattcttgataaagatgttttcaaattaattggagcttgatatgacataattaatttgcagttttctttgtaaatgtatttgtaatggcattctggtgatttgaagagctttcttactttccttctcagctctctctggcaattcagcagacgatctggcagccccagaactcacctgagggcaaggctagtcatgatacagaagtcttgagacagagcaattagacctgattgctctaatttccccactatgctagaagataaccccatcaattactgatggatgtatggagcagagcctagtgtgtgcatgaaagacttcattgttctggcccttgaaccattagttatctgtgaaagcctgagcctggccatcctttgtgcatatcctgggcttggctccattataaagctctcttaataagtgtagagaatggggattcaggcttaatgcttagttaaataaaaaataaaataatttttatgtaatatgtgcctatttcagattactcggttttcttttgagcagttcaagaatattttgaatgcactaattgaactttttagaagaaatttttttttcaagtaataaatacatatggttaaaaaaaagctaatagagcttatagtgaaattcactgtccctctccattcactgagacagttttacctctgattttaattcttcagggagttaccactgtatatctaaatagcatgtttgcaataatatatttattcatacactactttagtacctaaggatttagctcatgtacacaatttcctgcagataccacagtatctcatagtaccatagtggtattactgctcttatttctccactggtcacacttgctcttcctggttttgtcacccatgcatcatatcttttgaccccaacccattttgagatgagtaagacatggctgagattgtacctgtcctttcttcagtctttcctctgccgtttctaatacccatctttaatagttttatttttactttttgctttgtgagcgttgattatgtttacattctcatctgcagtctcaattttatctgtaggttgcttctaaaagttgaaaaccgtaactcactacagagacacttagtgggctgtgattacactttcttatctcggcttccaggaccaactcatctaatactcagaggaaaagttttctggtatttgtatgtatgtatacatgtatatgtgtgtgtgtatatatgtatatataaaaatataatttaaaaattgatttgggtgatttattttcccttgaggttcctgtttgttttttcttacattgtgggtccatatcatgtctcatgtctaaagtttttctaagctcttaatcatcctttctcttctgttagaatttcttttcctagtcataattctcaaaatgattgtagtggtaactagtgacaagtgcatgagagataaatatcacaagttcttgcatatttgaaaatgtctttaaattgcactggattgatagtgtggttagttaccatatgtttggtgaagattgttcctcccaagaattttgcttcactgtattctagcatccagtgctactgatgagaagttgaattttcatctgactctttttacttctttatggctgatgttttctttcattatcatctctttgtcctcaatgtttagaatttttttattatgtaccttttttccatttttcttgcttgacatttattaagctccttaatttgaagatttggatcttctatatatttttttggctctgacaaatcttttcatatttatttcttttaagatgaatttcctttttttgtgtgttatattttatctttccagaaattgtaagtcccttattaggcctcttgaatttattttctctgatttccttttgtatttctatatcttaaacctttttgcactattttctatgatattaaattttttgttcataagctaaattagcttcttcaatcttggtaggctaaataatttttaccatgatttataaacagaggaaaaatagaacagattctaaactttatttgatagatttagttataaatttgtgtctcttattatgactttcttacctatattttctaagtctgtgtttatattaataggaactagaaaagaatttttaatttattgaagggaaaatgtgattaaactaggttctttatcactgtgacaattttacatatttagagaataattgcaagagttctaataccatatttacatgtgtaacttctcacttctaaaatacttaaaaactaaagaaatgttagattttagaagacagtgggtttgtaactcttgtcttcctaacagttggtatggccatcagcctcagtaggccttgaacagaataaagaatcagcagatttaagatctctcaaagagctgtagatgtcatttttttctgtttttaagatttatacagtttacattctcttctctattttcattaaaggtttgtgaattttgggttgtggtaactgatagaggaagcattcatgtagacataattttgcaaaaatatgaaaaattgcataattttatataatctgtatggcaaaatatttttaagtggttctttgtatcattataaaatatattttgaaaactagtttttgtacaactttgattaatcacttttgatttattgaattttttagatggagtgaagctagtaaaccctctacaattcttgtcttatttgttaattccttccctatattattataatgaggactctaatttgtgatgttaagcagtttattgcaaatctcttgggtgtttggcgtgttttgtacgtttaagtatgttataacttgcttaaaagatagaatttcttgaagctgtgaatgttaagattgactgtgattttgggtgaatacttcattctatataataaaataaggtaatgtattaaagggcgccagtacctgtaacatataccttggttaataaacaggagccacataaccccattcactttgtattactctctattttacctgattcttctagacctctgcatttaaaataacgacagtgaccaccatgtgctggctgttcattacagtagtcttatttcttatataaattgctctgtttaggacgagtaagctcacagtgttggtagatttattacaacacagcagtaacaacttcatagtcataaaagacattgaatattgaagaggtttaattataatgatgtatataaatgtccttaaaaagaagtgttaatagaaataaccttgttagtgtaatcgtgcctttaacttgtgaattcctttgtcttcctgaagagtaagttaaaatatccatcttcttttggtgatggggagggtgagagaacagacacacatacaaatcttatggttaaaggtcaacttgcaatatgttttgaacgtatctttcctgttggctcttagatttctgtttgctatcttttatttttctctctcttatggcctgttttgaaatcttaactttattatcatttcccagaaaatagaaatatttataaactaatggtaggattatttgcaaacttcaaaccaatcctcattgcttgctttttgctattagatactccaggaaaagtagtaagtcacaatgcaaaaaattgtttgggaaaaatgcaaagagaaaaattgtgtaatagcagattcttttcagcctcctggtggcagttcatgtgtgtgtatgtatacatgtgtgtgttttttttccttgtcaggattaattcagtgggaagtaatgtgacagattttgccatatggatattgatggaccttttcattttacctggcttagtgataggtataaaaaataattctgaacataatatatggaccaccttatttcatatattttaacacctattattttactattatatgtaggttgaaaaatactgcttttattgtgtttttggtgcaagtatatgatttcttggttaaagctgatcattccatagaaacattttaaatgaaatggcccctcaagagaaagatcagctttgtcccttcacgggggtgtttaggcagcaaagacctagagtattatggaataatttgtcctaggtcaggctgctataactgtgtaaggacaaaagcagagtggaaggagatgggagcatctgggacccatttgtttcctcgagaggagacaatggatctttttaaggaaattgttggataaatcagtgtctcctccttctttccctctcttcctacagggtccctgtgttcatgatgaggactctggcctatcgctcattggaaaacctgcccttcaggctcttttatatcactgccatttttatgaacatttgaatcagatggtaaagcattgttacctaggacggtgtatgtttgatttgaatttttctgcttttgatagaaattcagaaagcaatgatttaaatggtaagtacgatatctttgtatttttatttttgtaatatgtaacttgtaaaaactgttaaaaatacatatatttgttttaaaaatttgaaaaatgaaagtatacagggaaaacattcatttccagttctaccacccagagagatgtattttcttcccgtcttctttctctgtatagcctttgtttgttttatgtaattatgttcatatcttgtgtacatttttgtatttccttctttcactaaatattctgcaagcatttttctatgttataaattcttcatggaaattatttttgacatcttattaatactttataagttatgcccatcagtacagttttatagtttctttctctgttaacgtctcaaacttttttggaactttcacttctaggcaatgtacagtttttttatccttcttgtgaatgagactttttcccactatattttctaattcattttgctcatgtatcaaaaagttatttattttagtatgttacttatttgtcacaatattttcctgaaacctttttattccttttgtttgtaggttcttgtagatttgctaagtataagatctgagcacataaaaat

SEQ ID NO: 15791 - DNA, 202657 bp, Homo sapiens
ctccggcggctgcagattgacgggacgagatggtcctggcagggctcatcaggaaactcggtaactgtcagcttgcccctcgcccaaggcaccccccgcgctctggccacttgctgagaatggtcgtgtcacgtttccgcggccggccgctccgcgaccgctccctctttcacccccgctttgtcaggatagcccccggggacccatctcggactttgtgtaaacttcgcggttcgcgtcccgaaggcaccagtggcctgcttctgaaaaaaactggtttattccgtcttcacgccgctcctgcccacagcataaataacgtagtctctttgcagtcgggaaataaaatagttttgtgccgttcgttgacaggtcatcagctggccgagatcagggagcgcgctctcaagagtattctctgcaagattgagcacaacttaatctgctacgctgatctcattcaggagaggcaactttttcttcatttgctggaatggttcaatttcccgtccgttccgatgaaggaagaggttctgaacctgttaagcagattggttaaggtagggtcattttgaaataaagaaaataatcagacgagtgacttgtttcttagtcatttaattgtagcgtttattgaaagttaaataattggggttaaaagtttttttaatcaaccagagatgtttaattttaattaatctgggtatatggttcatcttttatttgtgatactgaatcccacatggtctctgctgtgctcagaagtaacacagaacttcttttgagttttggtatgttctgtgtttttgagttatctttggaggttaatatttgtattctgtttttgttttctgacatttacatcttaaaaactagatatgtcagtatgaaagggagcactttaaaaataatgttacataaccgtgattcataaataccaatgttaagttgcttgcccatatgcttttagattggtattcttatgcctacctcaagagtagttagttatcggggtcagatatcaaagtgtaagtttaacctttcaaaactaaatcactgtacaatggtagaggaatcttaaactactttgacatcctgttgaccggttggggctgggaccataaggtgagtgtcagtggaaaaaagtaacccattaaaaaaataagagtagggattgataatgtgcatttctagcgttcagtgtgttggctcatctttcataaatgttatcaagtgttggatgtatgtctctataggtgtatgtgctcctcatggaagtgccttacttcggggcagagccatgaaggatttgtttttcagaaaaggaacatctgatataccaaaaataattttatgttttgattgctgtaagttatagagattttgatacagttattctcaagatcatcctcttcttattttagtatcccccagcagtccaacatttggttgacgttggtgcagtagagttcttatctaagcttcggtctaatgtggagccaaatctgcaggctgaaattgatggcattctggatggactttttcttcttccttcggaagttcctgcactatcttctgcctcataccaaaccaatcaaactggtaactctttggaatctgttaaatacaaatatattaattctaatggtaaattttaaggaaagggagattagatttttttaaaaaggatttctcccacctcccccaaacttatttttcttgtgttaacttacatgattttgacctttttcccctcctctactgttagtcaaaggatggtacatttgcattaattgctttttgggtcaggcctaaacgatgccagtgactttgcttttatgaggccagtttgacagattatttttttggcaataacaatgtatttttattgagcacatgagtgctcattgttcttagtgctttatatttgtatttttgaccttgttcgtcatattggagtataatgatatctgtcctagctcatgatcttgttgtggggaccaatcaaaacgacataatgcaagtatttttatatgctgcagtccatcatgatatacttgttaaaatccaagtcaaagagacatggatttaagtctcagttctgctgctagttgtgtgaccttggctaaggtaattaacccttccaggcttcagttttctcattcaaaaactgggataataagaaagaacaccgggctgggcatggtggctcacgcctgtaatcccggcactttgggaagccgaggcaggtggtcagaagttcaagaccagcctgaccaacatggtgccccgtcactactaaaaatacaatacaaaaattagccggacatagtggcgggcgcctgtaatcccagctagtagggaggctgaggcaggagaatcacttgaacccggggggcggaggttgcaacggtgagctgagatcactccattgcactccagcctgggtgacagagcaagactccatctcgaaaaaaaaaaaagaacactttctcatagaatcgtcatgagattagatgagacaatgtctgtaaagtgcttagcacagggcccagcatgtatgaaatgtggctgtgttggctgctgtgctgctgctgttgtgttgttgttaatgcctagtatagtgccttgcacatggaatgcatttgaattgatttgaagaaaaacatcttcatgcaatttatgtgactgagtagtaaaagtaaaaaaaaaaaaaaaaagttttgatgcttaacctgttagaccatattttcttctctgccagtactgttacagcttcagctgtgggtactgcggttcacaacaacaatagcagctgtcatttattgagttttgttgtgggcattgaatacattgatttaaacacatcatcttgttaaatcttaaagcagccttttgactgagatgttattagtcttactctatagctgagaataaaagtataaagtaacttgccccacagtaccaagttttctaacctgtagcagatgcaggattctaacattgctttatctggctcccaaacctgtgatttttaacaatatattttacagtttcgaagacatcacaaataaagtagagtcttacactgtgaatttttaatctgattccttgcgggtgaaagtagaggaatggtttagggctaaatgttatttttctttattagtgttaggaactattgccatgaaaacttaaaattacaaactatagttttagccttttcctcattttcattgcagctgaactgctgaacatataatcgcatgttatagggaattgtaaaggtattgaaagataatatttgactcctttgtttttgacaactttctttttaaggtatgaatgaaaattgaagtgatcaggaactatataattggagtcaagggagagggagatggattaggaagtagagagggatagtccttgaatactttgtagcagattcttcgtgtacattctaacaaataactgtgtttggctaacagtaaaagtgagagggaaaaagcttcttaactggaagtgggctcaatgtgcacattttttcctctttagcaagatagatcattcagaaaaaaaactggacttttttttaatttttaaaatgattccaatacttaagagaaaacattaccacttaaagaaagtaagtttcacttttagcaaataaggaatcgacaatacagtaatgtttatttccttttcagaattgtcaaaaaaccctgaaatcttaacaggatattttccccaagacaaaagtaatttccagcagatggaagtgccgccacgaccagtgggtgtgtatatgtcgggaagtaaatcctgttgacttgggaagttgaaaattaatgtacttttttcgttattgtgaagatgtatttttaccaaacttgaatgtttcagcaccaaactatcattaaatgttttagttgtttcaagttagtttaggatatcgagtagaaatgataaaattttgtgttattctaaccatatttgaacaactgtgtagatggatggtattaatggcagtagtatgtcgtactgaatgaacatgagtttttttttttttttttttttttttttgagatggagtctcgctctgtcgcccaggctggagtgcagtggtgggatctcggctcactgcaagctccgcctcccgggttcacgccattctcctgcctcagcctcccaagtagctgggactacaggcgcccgccactacgcccagctaattttttgtatttttagtagagacggggtttcaccgttttttttttagccgggatggtctcgatctcctgacctcgtgatccgcccgcctcggcctcccaaagtgctgggattacaggcgtgagccaccgcgcccggccgaacatgagttttttgaggcattgtgccctgcactacacatgtcatctcatttgttctccagcttaacgatggcaccatctatccagttacgccagccagaggctgaagatcattttagtttcttttcccatttcctcaccacccagttaattaaaaagttctgatttagaaccctgtttctggaatctggaatctcatctccatctttttgtatctggctgtgttcagcctcagctcacatgccacctcatcagagaccttcctggtgattctagccagtgatcacttcctatgtgtagttttcttcctaacacattattttttattatttttgttttaagtttgataatagccgtgaacattgcattattttcagtgtctggaacaataccaaaaaatgtattaggcactcagtatatattctttgaaggaatgaatgaatcctcctggagtgtctttgagattggtattattagtgaccacattttactaataaagacactgagattagaaaggttgaaaactttgtccttggtgaggcagttaggaagtagttaagtaatcacgtacttaccattttcttgcctgcacagttaagttgaaaaggatatgttcaagagtatatctgctgatgtcacatattcaaatgaactccatttggaagcctctgttattaaaaagctttcatggaaactcacaggtggaataacaagaaagaactgaaaacttgttaagccattagaatactttaccttttcattcattgttaggcttgtagcaagctttgtttttgaggccagatggctgagaggcttaattccatcaagatgagagacatctgaagggagggggaatctctagggttggtaaaggatgggtgtctgaatgaagccgatgaaaacattaagggggattgagattgttacacttttatgtgagttgcagtttgtcttgattgagggtctggcttattttggacacatttttactgtgtggtgtaagcctgtccttccctccacccacctctccttatttccttagaaagtaaatcctgcttttatgttagcaattttgaaagaagtaactgtgctatgtttgggaatttaataatactgctatccacatttagcgattccatgctcttttcaaagcacttggcagaaagactgccatttggaaggacttatgtagatgctatttctcagtgttgccaccttaacttgtactatataagatctgttaaaaataacttgcatggggatagtttaaaactgttgctttctcagatttcttttaatcttgttcgaacactgatacttgttttttgaccttacggtcttcaagtcatcttcgcagaggtttaaaacacctgacaccatataggatatttgaacatggctagatatggtatatcattatgttttatcatttttaattttgaaaagttaaggttttccctaaatgtcagttccttttatgttgaatttaagtttgatgttctggtcagccacagggtaaaatagaaaatttaatggaaacttcatatgtcagtctgtattggattgtgtttaatgctcttcttctaatacttattttgatatcatatgagttctgtttaaattatgaaaagagaactctcttatttatcctgtgatagaacaaatttgcagctgaccttgtttggtatattttaggttactgtaagatgcagcctttattttgggacttgttttaaagggaaaacttactcttaacattgtgaatctgtcatctctttattctttgataccataagatttgctctttcactgacagtaaatcagactgtgaagtgcttgaagttttctacatttccttggctacccctgaccaccacagacagacatgtcctctcctctaatgaaaggtacggtgcttgatgtattttcaggtatttttgttcacttatagtcattaagtttgatagttattacaatatgttttaccaggaaaagatactagtggcagtgaaaggtagtaatggtcatatttaaatgatttttatttttcaaaaagctagccagaaaaaaattcctatttgcttttaatcaatctacacatcaagtttcttttatttatttatttatttatttttgagacagagtctcactctgtcacccgggctggagtgcaatggcaccatctggctcaatgcaacctccgcctcctgggttcaagcgattcttgtgccacagcctcctgagtagctggaattacaggcacgcaccaccacgctgagctaatttttgtatttttagtagagatggggtttccccacgttggccaagctggtcttcaactcttaatctcaagtgatccgcccctcttggcctctcaaagtgctgagattccaggtgtgagccactgcatttggcccacgtttctttttgtggttggactcttgtgtagtccttggtgacaggagttttctcttattggccagattctcttattggccattgcttatgcccttgattgataaaaatggaaaattgaacataaatgtagtctttttggcagaatatatttcaaaatgtgggcttcattaggagacaaattaaaccatgtggataaggttgggtaccactgatccaatctaatgtaatgactgttaattgattgctacccacaagagtaaatagctgatatatagagatttagagagtattttaatgtccagattcactttgtgcagtttcataaatgccacaatacacgagttatctgcttttttggggtataaatctggaaaataaagaccaatttactagggctaagtccagattacaggtggatgccattaagtgatttttaataatgacatgaattctcttggaacaacatattcgagaggcaaagtgcacatgggaaagggttaggaggttgtatgatctctcagttttgagtcagtcccaaaggcagagatggcgataatttctaatgcatgcctgtagatagtgaatggtggatagtataatggaactgggctgagagaaggggtgtgatttttttggggtggggagtgaacaactgccaatcctaggtgggcagaagttgataggtgtcctctgtatgggataagaggggagtcctaatctgattcaccttgagtggggaagatcagtaaggactttaattcttagaatttgcctctgtacttttgttctgtctcatttcttaatttatttggcagatttcctagaattgtgtgctctttgacctcattgaactcgttttgcagacttgtgataatctctgagggtacagtgtttagtatgatgtcgttcctgctcttgagagggtctagtggggaatgcaaaatcaacaggcagttaacaatatcacaaataatggacaaacggaaggagcactgccctagagttgtttattggttagggaaaagatctaggaaggcttttctggagaagtgatatctcagctgagacccaaaagattgttaatggagtcattgtgtcagtaggctacttagaatctggaatagatgaactcttcttaaaaatgattaacgctatgttttgtagctctttaagaagtagtaaccacactttaatctggaacacctgtgaactattgaaggatgttatcatgcaagattttcctgctgagattttccttcaaaggccaaaaattgttcaggtcagtgccctctataattgttttagattttgaactagagaactttttgcaataaagcaaattttgcagagtaggagttcttgggaaggaactttgtactcatgtttttaaaaagtgaagtatttggctatttaaagcacttattcgctaacttgggtggatagttatagttcttccaatagtagtagtttcatttgacacttgcagtccagtctggccaccttgagttaccatttatggatcacctaaatggtagagtagactttggacattgagattgtgcaggagcccttattaaaagtaagaatagcattgcttcttgagtatctcgtttatttaacgcacagtgctacatgctgggaaaatacagtagcggtgagtaacgcagatggattcttttctttttttctagtttattgcttgtatagtagagagagagggatccagggtggggaattgcaacatcttcacagcagccagtaatggctcagcattctcgctccacactcccagggctgaaatggactccagtgggtgccaactgttaatacctaggatcaaagctggcaaatgatcgcagaggaaagctgttaattactaaaatgtggttaaatggtttagatgcttgagatgaaaagggcttgctgtgatttttaaaatgttctctgtaatgtaatgtcctgagtggggaataatttctgtcttctctcagaatggttactcaactaacagattttagaaataggaaacactgactattctatttaaatgttgttgtcttattttattttgacccatctccttgctttatgccaagtcatatttgcccatttcagtttcttatgtcttacaaatatttggcaacttattttctcttgattattcacttaggcttacttacttaagctccacattctgctttgaagttgagctctttgttcccttagtaattttcacggctcttcttgatttcagagccttttatctctgttgaaactggcctttggagatggaaagcatcgcctggcattacagtcggtgtcctgcctgcagcagctgtgcatgtatttaagaaacagacttaactttcaccgagatccaggttttttctccaataaacacggtatttatttttatctgttcattagccactggtgttatttgtagattcttctgggaaccttccattatagttactgttagggtttattgtgtacgcattttcacaacataaactccccactcctaaatgtattcaaatgattatctttacagattgcgtgaatgacagaaactgccatgatctcttgagcctttttttttttttctggataagagatatttacaaggtgtttttcttttttctcccaaacttgcagagattctatatagtgttgttgggatgtagtgactcggatatttggtatggctattcatgtaggactttggacaatttagcaagttacatatagtgttaatacattgttttgtttgaaaaatattgatttgaattttatgaagagtatttttatgcaacttgcaatgtagtcaagtgttgcagcaatgtgagacttcagagaaaaagtgccacctaatggccaaatagagtaccagcctggcttcgacaaaaccagtaccatttaggatttttgtgagcttaatgcaacctgcatcgaaagtcaaatattatagtcatttgtcatcatgtttcatagttaatccctatttcattgggagtttcactgatcctgtgctacttgaatatttatgctttaccttggttttattctagatcttagagggtatggcattgtacaaatgactggtaatagagaacgtctgggtaccccatacttcaacagaaaaagagttacaatgttgatttaaaaagttgatatctctgaagaattgttaatgtatttaataagtatgtatttattacctgttttatgcccctgatattctagcctctagggaagtataacactgaacaaacgaataagatccaagcccttatgagcttctattttaaaaggctgggcacaggtgataaacaatcaagtttgcttgagataaggagaagtacttgaaggaaataaaaagggtgatgtgacagaatgtggttgggtaaacatagcttcatttaggatagtcagggaaagtccctcagaaagcttctattttaaaaggctggggacaggtgataaacaatcaagtttgcttgagataaggagaagtacttgaaggaaataaaaagggtgatgtgacacaacgtggttgggtaaacatagcttcatttaggatagtcagagaaagtccctcagaggaggtgacctgaagggtgacaaggaatcgtcactcgaagagctgcaagaagagtgttccagggaaggccaggcctcaaggttagcactgagggtgatgtccttgagcaactgaaataaagcccatgagagtggactgcagtgagctgggcagaagaggagaatgaggtgacatcagagaggtagttaggggccagagtatattggggcttgcagatctttttaaagattttatattttctttgaagtgtagtgagaagctcttggagagttttttttccccctctctctgactgtaaatgcttttattacctaattctttttttaaattggggtaaaataggtataatataaaatatgccattataaacatttttaagtatacaatatagtgacattaataacattcacattgttgtgcagccatcaccactatctgtttctaaacctcttcattatctgaaacagaaactctaatcattaagcagtgattcctcatttttcctttccccaaagctggtaaactctaatttactttctgtctctgattttgtctattctaggtacctcatctaagaggaatcatacagtatttgtccttttgtgtctggtttatttgtaatgttttcaagcttcatccacattgtagcttgtatcagaacttcattcctttatatggctgaataatattcctttgcatgtatatcccacattttattcatctatgcatttgtcgatggacatgtgggttgtacccacatttggcggttgtgaataatgcttcagtgaacattggcatgcaagtatctgtgcagtgcctggtttcaattcttttgggtaatacccagtgaataatagtgaaattgctgcgtcatatggaaattctatctttagctttttgaagaatcaccaaactattttccacagcagctgtaccatttacatttctatcagcaatatataaagcttccagtttttccacatcatcactgacttgttcatttttttcttttttaaaaataatcgtagtcatcctagtagatgtgaagtggtatctcatggttttgatttgcatttctctaaagacctaataattaatgaccaatgaatctctaataactttttatgtgcttattgtttgttcatgtatcttctttggagaaatgtttattaaagttctttgcccattttaaaaattggactggtttctttattgctgggttttaggttacttatatattctgaaaattaaacccttatcagatatatggtttgccaatatttcctcccactctataagttatcttaacactttcttgtaatgttcccttggtgtaccaaagttttagattttgatgaagtccagcttatctgtctgttccttggttgtttgtgctttcgatgtcatagttaacaatcgattgccaaattcaaggtcatgaagatttattttttccgctaagagctttatggctttagcttttatatttaggttgttgatccactttgaattaatttttatgtacagtatgaggtagccattcttggagagttttaagcagacgagtgcatgatctagtgtttttctgctttggtagtctctaatgttgtaactgaatgccattgactagaaggtcccatgtaatcaagtcagttagatataaacctaaatgtactaagtgaatacttatagaaaagtttgatctttgcttttgtttttacccctgtagaaggattcctactatcttaatttgttaatgtttttggaagaatgatacataaataccacatagtcagaagtctgtttctactaaagaataattttattttttctttgtttccccagacacagtttcccaaaattcttctttgtcttattgtcatgaagcaagaggtactcatcattcccagaatccttccccaggaagcagcagccctcggccttctgtggttgggcgcacaggccagcgacccagaggagatggccaggactgggatgcagcgtcctctaggtgactgctagcagtgtctctggggaaatgagaaatgccggttaacttgtgtgtgtgttaatttcagaaggagataattatttttctgtccttttttttttttttttttttgaaacattaacacaggtataggccttgtgttaaaccctggcttcatactttttttgaccatgatccacggtaaggacagataaatattacatcgcaactcagtgctcagtacttgaacatatgctctgtttatgtatatatatgtgtgtgtatgtgtcccccaaaacaaaatgttcacataatagtattctgatactatgtttgacacactgaactatattttcagttccgatttcattagaaaagaaatgattctgacccaataaattgtttttaccagctgcaaacggaatatgatcaagtttaaaagaatagctttaaatgatagatacattgttgatagtattttacacatatttttgtaagtcttataacaaatggataagtgtttactgttaaaaggaatggttggagaattttataaaataaggactccttcaaggtgaacaatttatggtatttgtttgtgtaaatacagatttttttcttttttttttttttttttttgagacaaggtctcactctcttgcctaggctggagtgcagtggcacgattatagccttgacttctgggctcaagtgatcctttcgcctcagcctcctgagtggctgggaccacagatgtgcactaccatacttggctaagccttttattttttgtagagatggggtctcactatgtttcccaggctggtctcgaactcctgggctcaagtgatcttcccatcttggcctcgtaaagtgctgagattacagacatgagtcaccatgcttggcccccagtgcttggcacccagattttcatacaccaactctgcttaaaaggattggtgtggtatttgtatgttaccttatccttgggtgcaaatgtgttagaaacatattagtctctttagtgtcattctaaaaaatgttcactaagttaagcattggtctgttggcttaattattttcttgcaatactgctactactgttaacaagctaatactgattcatacctgctgtgtgtatggtgttatgccctgtgctttgcatactttgtctcctttagttgtcctagaataggattgatattatatatagcattagtattattattatcatcctcattgaggtttagagaggttaagagcataacagttggtaaagagcagagctagggttaaataaaatgataggagagtctatgctcttagtccttatattgtagttggttgttcagccatgtttttctctttctcctgaagcctttctgcctcattctcttgtgtgcttcatgcttctaagttttcactcctgagtgaacagcttcctcactgaaacttcctttcagagttacagagaagcccgagttgtttccatattttggggtgcttggtatcttgaaattgaagaaacgacaaagttggtttataatttgggcaaatttaaatgttccatagcattaatatgtctcttgtgatccagcttcggttgtggataacatcaaaagacaaaattttgaggctctttgtaagtgtgaggctctagcctttctacactttttaaatccttactccagcactttacatccgaggtaagaactttttaatgaagaaagccaaggacaatgggatgttccgtttttttgggtgcatttttgaagtcactacatgatgtcgaatgtactaagtgaagtaatacatttcccatgaggtttttctagaaacatccttcatttactaacactggcttactcagaacagtggtgaaactcagaaaatctaggaaacggtatgaactattggttttgtctctacacgttgattacagaagagctttcctataaatctgcttatttccttttggaaatgaatgggttatcagtgctaatattgattcctactataggaatgttgacatgttttgagatatcagcctgacaagcaaaatatagatgcatttttggcttcatttacaatttagagtctttttttttttttgagatggagtcttgctctgtcgcccaggctggagtgcagtgtcgctatctcagctcactgcaacgtctacctcctgggctcagaagattctcccgcctcagcctccccagtagctgggattacaggtgtgtgccaccatgcccagcgaatttttttttttgtatttttagtagaggtgggatttcaccatgttggccaggctggtcttgaactcctgacctcaggtgatctgcccgccttggcctcccaaagtgctgggatgacaggcatgagccaccactcctggccttgagtcatctttatggaatttaatttcgtaaatttgtcaaagtttctacaaatctgaccagagttgaatgaagcagtagagttgtgacttgtatgaggcttctaatatgcgaggcagcagatatgcagtaaatctgtttggggattgtttctgtatgcaaggtttatcatttgtttatcttgcagtggaagtagtagtcatgctcatgtaaactccaggatatccgttcattcacctttggatatgggacacatagatctgccagagctggaaactgaagacacattggaactacaattccagcagctcagtcttccccagttttgtgtctccattctggaatcagctgttcctctcttaagaacaggttagttgttttagaaatcgtaattctgatataatttgtgtctgttttgtatttcgttaggattttcctttttttctcttctatgttagggcctttggaatctgtatttacttatcttttgggatataaatttctaaaaacctaataaggtctttattatttttaaattaaatgtggatgccttggagggctattcagcttgcccttccattttatgagtttttattggcacaggctttcatgcttattttttttttagaatttttatctattttttgcatttattcttgctgtcatctatttttttcttttttttttggactgtatggctattttaaatttgagcagtgacaacattcagcaactggaataaggtataaaaggtggactggcatgaatagaccagaataaaaaaatctttggcttttgctctttggaaactttttgattagctgtcagttgtttactcttcccattcatttcttgctacttaagccacttaacatgttaaaaacaaaactccaaaactggattcttacctttgtagtaatttttcttaaaaaagccacaaatattttgagatcccatttttgttcagatgtactaggaaaatttgaagaggttgactgaaatatacactggtatttaattgtaattgtactgaacaatggtaacagcaataacaatatgacagaggtctgctgagtctagtaatgaaacaacagttagcacgtgtccctactgggttctgccttcatacttggttttgtgtgcattatttcgtgtatttttcatatcaacccattttgttttttcactggtagttaactaattttatctccatttttacaaatgatgaagctgagtttttgagtggtttagaaacttgcctgaagtcaaacggctaaaagcagggacttgaaccacgattcttttgaatctaaagtccatgcttttaaatactttagcattttgcaaggtgtaaagaaagttttagaaagaaaacagtcatgatttttattctcaaaatctatacattttcaacgtttgataaactcatcaggatataaataagataaccaagttttgccctttttactttatactggcaaagtaaaaatatatattccaagttaatggttctttaagtcccatgtctattttttgccacttggaggtgatggaggagaaagaagcaggaaggtatatatttggaaaacatttaaaatgtttttatcctgaggaaaactgtgtactcatactttttactcagtaagtgcttctactagctggaactatatattaattcatatactaataatgtgaaatgaagaaagatctgaactttggcatcataaagtacatatgtttatctgtctggtaagctgagaagaacagtcttagactttaatgattttgcatttaacctttccttaatttgctttaaaaagtcagattgataattataaagctatatcttggtacataaaaactaaatgttctcctgcccttttgtggtaaattatggcatgatttgtaactgttcaatatcgtaagagatttgtaagagaatttggtccagctcttctagtgaaaaaattaatctagatccttccaatctggtagtttgttttactttgattcattagaacttaacctttgggatgcggggtgggaaagtctcgtgtgaatgttcgtctcacacaggataatggaagtggagtctttgttattctgtctctgtggagaaaggaggttgctctggtgggtgtgactttgggaagtttttttgagtttaaggtgagtacaaatagtttctttagcaaatgttagcatgttcatttattcctttagttgctccagtccaagcttagcttcccaggcaactcctgtgtgggaaaatactaatttatgagaaggctcacgccttctagtactaagtagaaattattggaatacgttttctaaacctttctggtgctttgtcacatattacgtgtaaaatggatggtccctaaattcgaaaaattattttaatctatctcacagtacttgttagattattgctactttcaatatcttttccaattataaatgtatttgatttgttatgtagtaaagtagtactgtgactggaacagaagccttcagtgtgattgtaaattgtgatttctctacagttctaagaacattagaaaaaaagagaaaatgttggagcatgactaactagaaaattgagcaatatgatattcagctgattattttaaagttaagtaacttcttctcctttacttttttctgtttgtattcctaggtagcagacaagtgataataagagttctggaattgcttacagaggatatgacacttattggtgaagcaatttcaacagatatctgggatgacagcagcctttttggtatagatatggtaagaatcaatgttttctttgggatatagggaatagtattttttaagattttggttcttttaagccggtttcattgtctcattcgtgttcaaaatcttttttctttttgactcaatatgtcccaggcttatgttataaatagcctggaacaggcctatttttccaaaggttctggttacttctaatagtggaacgtatattaagaccaaaaccaggccattagaggtggttatagctactgtgatatcattcttttctttcaggaacaattaggaaatacgtatttttaaagatcgtgagtttattgctatttttcttattttaaatttgtatttcttatccttgcgcttgtagaaagtcttcgttcctagcaatatcagcataattgcttattagctttgaccttaaacatacataagatagtttcagaacagcaatattaacattgctatgaacaattctaatgaaaagttcaagatttcctggcagttctttttgagatagactaatctcactaaggatatacagtcaaaatactgtgccttaaagctaccgttacccattcagcatacagttagatttttttttgtttgttttcactattgggaattgttttttcttcataaaaatgtagctcagagatgcctctctcccatccagttacctttaagatgttttccttattggtagtcatttttattttctggctatttttttctatttttattttatttttgcaaatgtaagcaactaagtatgtagattcttatcctctccccatcctgcataaaaggtggtatattatagacactgttttgcaccctgtttttataacttaaaaatacgtcttatgtgcatagaatagtaggtatgaggattattccctatctatctatacgtgagattttctcgttcttttttataggtagcaaatgcttcgttgtgtatttgttaacctagtctcttgatggatattattgttaatataaattatgtacaaagaataatgggcttatgctatttcataaatgtgcaggtatgtctctagggtagatttatttaagtgggcatgctgtttttctaaaaaacttttatttagcttcagcggtacgtgtgcaggtttgttatgtaggtaaactgtgtcatgggggtttggtgtacagattattttgtcacccaggtaataagcctagtacccgataggtaatttttgtggtcctcctcccactctctgccgtcgagtaatccctggtgtctgttattcccctctttgggtccatgtgttctcattgtttagctcccacttataagtgagaatatgtgtatttggttttctgtttctggattagtttgcataggataatggcctccagctccatccatgttgccgcaaaggatatgatctcatgcatttttatggctgcatagtattcattggtgtgtatgtaccacattttccttaatcagtctcccattgataggcatttaggttgattccatgtctttgctattgtgaatagtgcagcagtgaacatacacatgtatgtgtctttatggtagaatggcctcaagtgatctgcctgccttggtctccgaaagtgctagaattacaggtgcgagccaccgcgcccggctgagccatgttgtttatgtagtagtacagcagttcctcacttggcatcatagataggttttcggaaactgtgactttaagcaaactgacttataacaaacccagttattttttctcatcagcatttagtgaaatggcatggaacttgtaatgctgtttcattaaagtcagtttccaagaacctgttgaccaagttaagtgaaggcttactgtagtttattcattttatttctgagtagtattacattgtgtggacataccacaatttgtttatccattcacctgttggtggacaatggggttgtttctagttattacaaataacattcctatggacattccagttgttccacatcttcaacatctattatgttcagttttttttttttttttgggggggagagggcattctgatagatgtgcaatggtatcttagtgggttttaatttgcatttccctagtgactgatgattatgagcatcttttgtaatttttagagagcaagtctaggtttttttttaaaaaaacacttattcttaagtattcttttcaatgccattgtgaatgaaaattttaaaagtttttggattgctcattgttagtatatagaaatacaattgatttttgtgtattgatcgtctatttggtggccttgctgaacttactagttctggtagttttttttgttttgttttgttttctggtagatcccttaggattttctatctataaaatcttgttatctgtgaataaaaacagttttaagatcatcttatctgtgaataaagacagttttatttctttctattcactctggatacctttaatttttttaaattgcctaattgccctggctagaagccttagtataatgttggatggatgtggtgagagccttcttcatgatttagagggaagcattcgatctttcaccattaaatacaagattagctctagtacatttgtattttgtagatgcctttataaagttgaggaagttccatgtattcttagtttgttgaaagttttgatcatgaatgattattgtattttgccaaatcttttgtctctattgagatgatcatttagctttttgaagagcagaaaaacttaattttgatgaggttcagtttcttagtttttcttttatggatcatgcttttgatattttatctaagaaatctttgcctaacttggaatacaaagagtgtttcctatgctttcttttagaattattacatatgttttaggttttatatctttgattaattttgagttgatttttgtatctagcacaaggtaaggaatgaacttttttttttatgggtatacaattattttctcagcactatttgttcaaatgactgtcctttctttcctgaattccttaccaactaactatatgtgggtttacttctggaatctatttgatcggttttctcttatgatgccaatacccaactgacttaattattgtagcttatagtgaaggcttatagttagctatagtgaagcttattgtaagtcttgaaataaggtagtataagtccttcaactttgttcttgttttttttttctgatatgtagtcctcgctctgttgcccaggctggagtgcagtggcgccatctcggatcactgtaagctccacctcccaggttcacgccattctcctgcctcagcctcccaagtagctgggactacaggcgcccgccaccacacacacacacacacacacacacacacacacacacacacaaaaaaaaaaaaaacctgctgtggttttgaatggaattgagttgaatttgtagatcaattcaggaaaaattgacatcttaatagtattgaatcttctgatccatgaataccatatatatgtcttcacttgtttagctcattatttatttttatttttattttttttaacatggaatctcattctgtcacccagactggagtgcagtggcatgatcttggctcactgcactgtccgcctcccgggttcaagtgactgtcactacagcttcagcctcccaagtagctgagattacaggcatgtgcccagctaatttttttgtatttttagtagagacagggtttcaccatgttggccaggctggtctcgaactcctgacctcaggtgatctgcctgcctcggcctcccagagtgctgggactacaggcatgagccactgtgcccagccttatttagctctttaatttgtctctgcattgttttgaagttgtcagtgtataggtcttatacatttgagtatttcagttttgggtcttgtccactggctgacttttctctttatggatcttaatatttgatatgtgtagtaatttctgattggatgctggaccttttcaatgttaccatgttgagtgtcttgattttttattttacccttttagaagcactttgggagggttctgaagcactttgggaggccagcatgggagcattacttgaagccaggagcttgagatgaacctgggcaacaaagtaagatcttgtctcttcaaaaattagtaacattagctgggcatgtaggtgcatacctatagtcccagctatttggaaagctgaggcaggaggatcactcgaacccagaagtttgaggctgacaggtggttatgttacttgtagagcagtttcattttctcaagactttaaaaaattttgctagaatgggtctaaaatagtggttttcaactggggggtaattttgcttcccagaggatgtttggcaacgtcgggagccatttttgattgtcacacctggagtggtgctgctggcttctagtagatagaagccagaacagctcaccacaacaaagaatgttttagctcaagatgtcagaaaaccttgaggaagtgttaaggttgagaaaccctgatctagaagaacctttgcttggggttaaactctgctcctgagatgtgatcctttgggacctctattgaatgtccaaagtgatgattgatgactgtctactctgcctggttgaagactgagttttattgtcttgtgtgagccctgggagttgttcaatttaaatctcagtaatcatctttggcctgtatttacagagtatctacctataatctaagccacctaatctcagcatggtctgggtggaaacttgtttaggtctctgaaattctttctttgcatagctctcccacaattcctaaccatgtcagcttccacaggcatcttcatctcctaaagtcatcgagactgtcagactctttggatttctcttgcctgtgtttgctgtacagtaattgttttcaggtatagtaggactctcattgcttattttccttctctctggcatcacagtcctgcaatgacactatgccactttctagttgatttctggggaaggacaggagatgtccttgttattatttcatggccagaattggaagttttacgtaaagtttttaattatgtcatttaagcaactggcctatctgtgagttattaggagcttaaatgtacatttatctagagtgaaaattctggatcaactttagaataatcattcaaagtgtggagagttcaggataccttgttttttgctgtttgtatttcagtagagtagataattttagaaaatatggaattaaattttgttttttttgtaagaagtgttttgataagtaatattttgcatgagtaatcaacatgtgtacagtagtagccttaagaatgttatattacaacataatatttaagagatctatggaataccagagtatgtctccatgtaactggaaaacatatcttttttaacatttcaaaatatcataaatcatttgtcatttaatatctttcattttgaaattgtcatctgataaccttgccttccttgaagatttggcattctatctcttctgttaatgtgaattcctaatgtctggtcttccttcctctccctttcttccttcccctctcccttcctcccttcccttttgctgccttgtcagggcagtagaatcaaaatttattagtcataaaaatatatattgactcttacgtttatcagttttttttctctttatgctattttgatgtaagtcggtctatatttaattaaacattgttacaggctgtctgaaatccttgtgaatagaggtctgaatataaaaaaataaattacagatatttacataataacaatacccatgtaagaaagaaacccaaacttttatttttttcataacacgagcctcttaaaaagagaaacaaactgcatattttaaaatgggtgtattttcaagtctttcattttctgataatagttctgaatcttggtttttctttagtccttaaggttatcacactattttgtagtacttttaggagatttttcacatattgaagattttcaacaagtaaatttttcctttgaagtgtgaggaatgctttatcagttgtttcttaaattaacttaaattttcttggccagaacatttatctgtaaaagttagtcattcacttttaacttttggctgctggtactttatgattcaatgaattatttttactttaaaggttaattctgttgtacaagtgccagttggtatgttacaaatgctaaataaaacagaagtacttcaaattatatttgatttacttttacttgtttaaaaagaataaatgtctcttttctttggctatattttaaaagaagcaaacaagtaaaatttcttaatgttcatacttttgccagttttcaaaagaaagacggaagcagtatttttgttgagtcattaaaggaacaaaataataaatgttgctatcaatttagaaattaagtacctgaggatatataatcaaatctctaggtatttccacacagtactaatatcagtaacatcaatcatgtctggaaccctgtaactcagcatggaagggaatttcaatttccccccttaattgaatatttttatattactcgaagtaaataaaagaaaaaatattttcaccaaaattagttatgctgacctaaagtatgtcatatgtcattccccctagtcctccatcatcaaatcaggtctattttttccctatttacatgctaagtcaggttcaagatgcaaggagaaagtagctttcacctcctgccagataacctagactcttaggtctatattctgtttcttttccgcatttcttctgtgtcattcctgtcattgcagtcattggaaagcagtcttttcatctttatgactcattgcttctaaattcccatctgacctgctgtgaactggtaacttcaacatcaaggcatgttggtagaattgtagaatgttggtaggacttcaagaggggctaagaggattgtgaaagaaactaaagatctttgtatccagtaagggctcattaaggatatttggaccagattgtgaattgataactggtgtagtgggatctctaattacatagaccttccctgctgctgccaccattccaaagacagttattttaactcacatttcttgattgcccgttattaatatatgctaggcacttgggatatcaaataagatgtagtgctttttatgcctatgggtgatagatacttttaatatgacattagtaaaatagagataagcataaaggaataacacgtaaactaagatagtttaaatatagcacttactgtatgtcagacactaagcactatttatgaggtcatttaattatcatgaccctgcaaactccataactgaggcacagtttatttttcagggtcacttgtggttttgtatttatagccattatgttttattgccaatggtgctttgaaaacactatgaactatgaacttgggatgtcagtgagggctttttttttttttttttctcttccccagactcagagtctcactctgttgtccaggctggagggcagtggcgtgatcttgactcactgcaacctccgcctcctggattgaagcaattttcgtgcctcagcctcccaagtagctgggattacaggcatgtaccaccactcctggctaatttttgtatttttagcagagactgggttttgccagattggccaggctggtctcaaactcctgggctcaaggcaccactcctggctaatttttgtatttttagcagagactgggttttgccatgttggccaagctggtctcaaactcctgggctcaagtgatcctcctgccttggcctcccaaagtgctgggattagaggcatgagccaccgtgcccggcctcagtgagggctttttgtagatctgaatgaactgagttttaaattataggtaggatttggccaagcaaataaaatagcattttttttttttaatctggcggagcgtgagaatgaaccatgagccatgacaaagaggcatggatagttctgatcggagataaaggataggcctggtagtagatggaacacaagcacctagaccatgaaatgtgaggtgcaaatagtggagagagactggtgggataaatgagggtctgctggtaggggtcttttggcatgatgctgagtagtcctgcctttcctctgaaggcatgatgagattgcttttaatcagagaagtgccttgtgagactggcaggaggaaccgtgactggctgcagtgtggaaggtccattggaagcatgtgaggggcagagcctgctgcagtttcttactccaggtgccttgtagaatccacaacccattgtatattgcagaggtagtgtgtaagttgtgtttacactataaaatctgttttattggtaatatttaagacattttgctaacctggtatttcaattttgtaccttctgttgtaaaaactatgagtatcctgtgaggacgggtcttttcccccaccgtcaactcctttagggttgttgcttaaacatctttagcccaaagaattaaaaaatgtgggccagttactattgtttttcaatcctttcctacaaaacaaaacaaaacaatacaaaaagccattttttttatgcttagaagaaatgttggaaatagaactgtaaaactcattcctaaagtattttctttttatgatattttgagaagtactcaattcatcattagaattagcaagattattttaaacaatttcacaagtaaatagacttgaataatagagatgttgttcctagtactgttttcatggagaaatactgtatggaggaattaattgcctgtcaatataataagactgtcactgtatttccaatttgttttctctagaccagtagttgtttgtatgagggcgttttactttttctgttttaattttgtaaggattgttctactttcggtttaaatatttattgctttttagttttatttcttggggatcagagaaatatagccttaaatatacactgaagttttctttgtggtaaagtatgtttaaagttaatttttgtcagtgtttcttggaaacttaaggagaagttatattctttgcagtgttcaaagtttatgtctattaattttaattatgttcaaaaagactgagttaaaatttataagtccatatcaataacatgttttgttgatgtcctgttttattcagatcacagactcatttttattgagtctttattgttaaacatgtcatcagtagaaaattactctaatttattttgccctaaattattcactattcatattgcttagaatttttgttttaattctactactcattgaacttttaaccttttattcacaaagtttttttagaattttattttctttttttacttataatcccatgacagttaaggatttatatataaatttttaatttttgttttttacttcaatatgaaattgtttcatttataggaaaatttaaactttttatagtatagttatgcttggtctactctcaaaagtttttgccttgttttgcttatgtagatcattttgtcttccttttacttctgcagtgacattgttgtacaaccattatcattatctatgcaactttttcatcatctcaaatggaatctctgtacccattaaacaataacccctcattctgcctatccccagctcctggtacctcatataagtggaatctatatttgtctttttgtatctggcttattttacttttgtatttggcttattttattttatgttttaaaggttcacccatgttgtagcatgtatcagaatttaattccttttgaatgctcaacacccttttctttttttctttgagacagagtcttgctctgtcgccaaggcctgagagcagtggtgtgatcttggctcactgcaacctctgcctcctgggttcaagttcaatcctgctgggattacaggcgtgagccatcgcgtccggcctccttttcttgcatgtatatacaacataccacattttgtttctgcatttattggtcagtggccactttcattgtttccaccttttggctgttgtgaatagtgctgctgttaacctgggtgtgtatacatctcttttggagaccctgctttcagttcttttgggtatattcccagaagtggaatttgctggatcatatgataattctgtgtttttttgaggaactgcccattatattttccacagtggctgcaccattttacattcccaccagcaatgcacaaggcttccattttttccatattcttgccaacgacttgtgctttttgggcctcataccttttagttgttccctgtatagtcatccttgaattgaagaaattctggtatattagatttttgttcttagtttgcaggtatttctcattcttcttttcatatgttttcaatggaaaattgaaagttaagtacttcagttttttttttctttcttactgagggtgtccttttacccgctagtttatgggggcatatcagtatatctgggatatactttgtctatattgatgtgacttacaagacagtctactatgcatagattcttcttcatatttaatgtataccttttagtttaaaagatatgatttctcttgaagtagtaaattatttaaatttatgatggcataacattttccacttgaaaccttattatctaaagagagtttataaaatttgatatttaattgttttttaattatttgactttccttgatgcatttctttagaaatgttggtatcaatttgaggacagagatcatcatgtctcttgtactaatgcattgttctttcattatgcctgccactgtgttaggcgtatagtaagcataagaaatacttgacgaggggtttgcgtgttaacgttccaaattggaacaattaggcactagaaactaggaggaaattatggttcatttaccttttatattctattgtttgtatttattcattgttaagattcatcatattaaatacttaaaagattattgtatttttaaaatgtaggtggtttatcattcttttgtgctttttaaattatgtcagcaggcattggtaattctcacaggaataaattctgttttgatttgttttcctatttaatgaaaatgataatattttaaactgttctccatggcttttgtatactggcccctaaaattggttgttttcttctgtttcatgttgtgtaaatgttttcagaaggagaaactactcctggtgttgggagcccttggagaaaccatgtgctaccataaaagtagtatcagtttggagcagccagaggtgatgcttgtgcaccacagaatggcctttatcagcatttccctgtttgcagttcgactgctacaaacgcttctccctgttgaaaaggtaaggcaggcaatgctgctcatttgtactttacagactattataaataaatgctctgttgtaaatttcttctgctcttttcatggtgtgaaggtattgtgctttaggccattttcaaaataagtgtaacaggttatatgggaaatgtagaaattgagaaatggctaacattttgaacaattttgacaaatcatttgatgggaaattattttttaatcgtgctgttgcttttattgcatatgttttattgcagtctgtacgtttgtttattccttgttcattcagtgaataatttattgattgcttacagtggactaacagtattacttgctggatgtaaaactgaataggttagaattagtccctggcctcatggaacttagttttgtaaaagacaagacttggctgttatctatacatatacatatacatatacatatacatatacatatacatatacatatacatatacatctacatctacatctacgtatacatatacatatacatgtatatgtttgacttctttggtttctttaataactttgggatcacttgagggaagagattatgtcttaatatacgaatacatttttccatacatatatacatatataattggtacacttgtatcttttaattgattggagggcattgaaagcctactgatcttatctctgcagtgtgtgtcttggttcttatcattaatatcaagagtagcctttccttctcttcagctaggtacgtgttgtcagagttctttacttattcactatttcccaggttccttgacacacagaatacaaacaatagtttccattgctgctccagaaattattttatagttagcatatcttaatgtcatggaaccttttctttttcttgttttatctattcaaaatactgttagcagtgctttagtttctaagtattggtcaagttggtttctgaggactgtcctatttcttgtatttgttgtactttatgtatattgctggtgtgttgcatattttagtaacttaagggattttttttttttttggtcccatgcatttctcttgaaggtatcccactatttcctttctgtcagcaacttaattgcttaatatttttattttagcacctgatcaaaagaatttcagaagtcatctttggtaggattaaatatcctgatttttatttgattcatctagttaatatttggtaacttgttttatgtctaaaccatatttgtagtttgagttacgtaatatatgatttcataccttagtatgtcttttgaaagttgtttttttaattaacgtgttgctttaggtgtctttcacaaagctgcttttctgcccatgatagcaataaactatcttctgtgctagtctttattctagtacttttctttttcctacttttctattttacctagacctttcttttcttaagctttggtgttttcagtttttaacttttattcagaaaataaaatgttcatttaaaaaacattttgatgtacaaagaagaataaaaattcatttataatttcaagttagttttgaggcttttttcttttctgctttaagtccaattgacagcgtctataaaagttatttattctttttttttttttttttttttggttttggttttgtttttgagacggagtctcactctgtcacccaggctggagtgcagtggcactttcttggctcactgcagcctccacctcccaggttcaagtgattctccttcctcagcctcccaagtagctgggattataggtgtgagccaccacacccagctaattttcgtattttttttttttagtagagaccagatttcgccatgtttgccaggctgatcttgaactcctgacctcaggtgatgtgcccgcctcggcctcccaaagtgctgggagtactcgcgtgagccactgcacctggcctgtttattctcttttttttttttttaaccatttcttattatctaacatacattttccatttaattaaacacttcataaattttaatgggtactaatattttaccagcaagatgttctatgatttccacaagtattccagaaattaagcttttaggtttctttttttctttttttggtattttgataaataacactatgctgaattgctacttacgcatgtttactcatattttggattcttaaattcctagtggcattactagttcaaaggctgaatgcttaaacatgtttttattataagcataatttaaaaatattatagtttcacgagtttcattgtttttaactaaagaatggataaaaagagtagtacacggaaaagataattgtgagaatatatggccgggaaattactaaaaagaagcactttttgaaagtgcctaaggctggtgtctcttctgtgtgtttgccaattacagtttctgaaattgtgcactgttagtttaactagaacacttaaatttttaaatgatttttaaaatgctatcagaaaaaaacattaattctgtaaaggcttttttttttttttttaaactttcatatacattcagaaaagtacatagttcagtgctttttctactaagtgaatgcatctgtctttaaaaagtgaccacccccataacagaaaatagaatgttaccagcattccaaagaccccttctctgttacctctccctccttctccaagccacactcctttctgacttctgtcactatagatcaattggcctgttttgaatgttgtttaaatgaaattataaagtatgtactctctcaactccttcttgaggttcataactattgttgcctatagcattaatttgttaacttttattacaaaatattccattgtatgaagtctgttaaaagtgattttaatatgtgtaaatatttctttaaaatcttcttactgactgtatttttaaacgtgaggttatctctgaatttgaatgttagtggtaaaaatatctcagatcattcagacatcagtgtttcgtggtgtacttattaccaaaacaaaggagtgacacactaaaatgcaggtatgggagaaattatgaaaactagaaaactattccttatgcctctttgttgcccttagttattaaacatttgcagctttgtttcctagaattctgtagagcatatagtccaaactctattttcttttttttttttttttttttgagttggagtcttgctctgtcaccaggctggagttcagtggcgtgatctccgctcactgcaacctccgcctcctgggttcaagccattctcctgcctcagcctcccgagtagctgggattgcaggtgtgccccaccatgcccggctaatttttgtatttttagtagagatggtgtttcaccatgttagccaggatggtctcgatctcttgacctcttgttttgcctgccttggcctcccaatgtgctgggattataggcatgagccaccgcgcctggcccaaactccattttctaagtatcacttatatacacaatgtattatcaggtgatccaggaaaacggataaaacactgcattttaaatatagtattttgctttaaggaaaataacatcacttgtgttacttttaatttttaacttgtattcactagtcattatgtttctgaagtccttttctgttttgaagagtgacaatttttcaaggcataagcatcaagaatggaagaattccagtctcttaagaaaggaattgaatttaaaatatgggtgtcttccttaatattatataaatgaaaaattagtggtgctacaattgcttgctattaagtattgcaaatggtcaatctatctatgggtcgaagtattgatggaaaacttatcctatcagttgcatcatgtagtttttgattgtattttttcatctatgtgcttatttggacaggaaccaaaaagaaatcagtaatttattttacttagtgccagaataatgtaaagttaattttccatgcttttttttttaaaggtagttattgttttattgtttccgtttttaaaaacaaatcaattatctaatttttggtagttattttaaatatataacttggaactttattaaaacaattttgatcattgtgggagattgtaattaaggtatttgtttttagatgattatatttgttttgattaattgactaagtactttaaaatgagatctaaacaaaaatgctatttcattgatgttaaatttcttctttggtttatataaatgtaaggttatgctgccctctgtctgttgctagcccactaataattgaagtagaatttggactctgaaactttttgcctttaaagtggtttttttgagttgccactgaccaagtaggtagtttggatgttggaaaataaatatgaatctatgtagagatttcctaagtttaacaaaatgtcctctgatgcctgttttgaaactgatatttgttgatattaaatgattttggagaatactcatgtataggttaaaatgatacgttggtaatcttctgaaaaatattgtggttgagtaaactaaattggtaaaacaaatgaaggtaatttcatttggggaaacatctgggaagtaagagctaaaagtactagccctgttctggaagcagaagcacagagcattctaggaactgctgttactcttagctagtgatgcttaccaaggctaaggaagaatttgtaacacaaggtctttagcttttcagggaggtatataaaaagatctaatgacctggtgaagccagttgagtgactgagagcagtgcttttcaaacggtaatgttcaaacagatcacttagagatattgttaatcacatcttgcatattctgattcatcaggtaaagggtagggcctgagagccggcatttctaacagactcatagaattatgccatggctgctgagtggctagtttacaggaaacatttatagcccctcctcccaatgcacatgaggtgatgttgctgattattttttatctaatggggtgatggatttgcactgaaacatcttcacttttagttctgatggcatgtgactaatgcttatatatgcaggacagctatcttagattaggggtgtaaattgtgattagtccattgggccatgtaaagattagctaatgacattagcatggggctttgagttgttgagatagcaagagtttcaaatacaagtacgcagggtgaaacattggaattcctttgtggtgaagcgagaaaaggaaattaatatttattgagtgctatatgccatatgctctgcttaatgcttgtttaattctcacagcagctgttatttttctgactagagtcagagagaactctcttaaactagaacacagtgcctttagagttagatccattaggatttactctcttagcacagtgtaaatcgcctttgctaatttctctttatcttcctaactcttcaggagtggaaccccaggactgacagtagccctcatgaaatatatcccatttgtgattgttaaatgccatctatttgttgatgcctgccaaatttatacttccagaccagacatataacctgaactctgaacttacctgtatccagtgtcctttttgatgtcttcacttgggtgacaataaatgtctccaactgaacatgtcccaaacttcattctttgtttccccttccaaatatgttcttcctatagtcttgcctgtctcggtaaatgtcaactttgttgttcaagttgatcgttgatcaggcaaaaaccttagagtcagccttgattcctttcttttgctcatatgtggatataatccctgagcaaaatttgtcatttctcccttgaatacctatacagaatctgaatacctgagttaagcccaccattctgtcctgcctggattactgcagtaaagtcctctgtctcttagcttccacttttgcacattaccatcagttctctacagaccaattttgatacttgtttaaaatgttccagtggctttcagcagaggacaattccttatgacgacccaaagccttaactgatctggcccaccactcctttctgactccatccctcagaaccagctccactggctttcttgctaccaaataatagtttttgtaattgctcttccctcttctataaatgctttccctcagatagccacgtggctcctgacccttccagggttctacttaaatgtcatcttattagcgaggccttcctctactactttggagaagtagcagttccctgcctccactccccattacttctctgttcctcttcatctttcctatcctgttttaaaacactttttagccacacctaacatcttaggaagtatatcgatttacactctactttcttcagtgggatgtgagcttcatgcgggcagaggttgtattttgctctctgctgggttcccaggactggagaggtacctggcatatagtggaggaacatagtaaggcctaattaatattcaccgagtgagtgaataataggtgagcagataattgagtttctctttttcctcccccgcccacaaaaaaaaggaaagttcttcacagaataatgaaatttctctttactttctaatagctgctgttttactaatctggaggtttgtcatgtctgtgtaatctaaaattttgatttctgtagtttctgatcttcatttagcaactatattcatttaaaggtatcgttgtttagctgattcagctcttagactttcaggtagttaatgattatccttgaaataggttatccatgaaataaatcatgaccaaacccacttttgtaaagacagcatttcagccgtaatagtgagtcttgtcaagagattttctctgaacgtcaaatttttagtcctttttattcctttaattgatatttagaatcctgtcacaaaactagaaccatttttttaaaaaccataattctttcagttttaaatctattgatttaaggttataatgtgtataatatttcatttgggcatattgattttatactaattaaggggctatcttctgtattttagaactatttaaaatattatattggatttccactatcccctctaaaagacaaaaccaaagaaaaaaattcgtttctgttcaaatcaatctatagctatacttgatttcgtgttattaatatgtcattaataagctctgtcatgttcagctatgggatggggaagtgttcttgtcttcagtttatcaggttattggggagatttgcgtacatgtacagaaaatacttagagaaaaaggcctcatgccttagttcaatagcagaggtatatacaaggtgcagggctcaaggagagaagaagttggtttggggaagaagaaagtagttagtatcttaggctttgagaaagagttgatatttggacttgagacattttgtattgaaaaaagacagagatagaggtagatgatgtgttgggaaatgggattttctttggaaaaagtttcagttttttgacaaagaattgctaaaaaggaagttggattagattaagactatagcccactatgtttctctaaaataagttttttttaaacaaagttttaatttttttgtttttttaattcaccaaggcaagcgagtttttatcagagcctatgtcaacagcattatttctcctttctttggacatgcctatttctttggaatatccaaatattcatgaagctgttgtggcctatttggaacagctgaattctgaaaactacagtatttataaacgaactgcagaggccgtttattcaattgaatgcacctgtaacttcctgtctgatattgggaaagaggtaaaaagcttttttaatatctcttttaaatccctttgacatattttgaaaatttaatctatacttttcaaattgatggacatataattaaattgtcacaggtgggatacattattcctgagtgggtcaattatacataacctgttatttaacaggttaaagtaaggatatgatttgtatagaagtaaaacgaagactttaattaatggtgtatattcctaacatcagtgatttacaaaaaagcagtggttattacaaatgtcttaatatttaataatgagtacctctattaagtgacttactgatatgaactgaatgacagttgatgtaaccaaaattataagggctattttagtgcttacttgtagacatatttttgcctcaatattttatagatagttcttacatatatataaaggctgatttttgaaatatattaagtacagtgatgaactacattgtttataatgtattaggatgactttatggcagtgttacagcaataattatgtgtcggtatttatcccttttaaaaatactattagaatattagtatgttatcaatgaaagggttaatgggtcttagagacagacattgatacaagagttgtttattgtttgaaaataaggacatggatcctgaagatcttgaagaattagggataaaattcttactcattttggtgcctacagtagaatctatctgaacctatttattttctttgaattttttttttttttgacagccttctcagttgcctaggctacagccttgatctcttgggctccagcaatccatctgccttggcctcctaagcaactagtactataggcacatgctaccacacctggctaatatttaaattgttttgtagagatgaggtctcactgtgttgcccaggctggtcttgaactcctggcgtcaagctgtcctcccaccttggcctcccaaaatgctaggattaaaggtgttagccaccgtgcctggccttgaacttgatatttatgatttttcttacttaccactgtagtttgttttttttcccctttccttttgccatgttagtaccactgtcttcttgttttctctgtgatagaattttgaattgtgtctttaagttgaagtatttctgtggcttttttttttttttgagacgaaatctcactctgtctcccaggctggagtgcagtggtgcagtcttggcgcactgcaagctccacctcccgcctcagcctctcaagtagctgggattacaggctcgtgccaccacaaccagctaattttttgtatttttagtagagacggggtttcgccatgttggccaggttagtcttgaactcctgacctcaagtgatctgcccgcctcggcctcccgaagtgctgggagccactgggtctggcctctgtggcattttgtgtggtcagttaatcacacatgtgttcaatgtcctgtgtgttcctagtggtcaggctgctacaagaggcaggtttataataaaataaatacattagccctacttttattaggggaggtagagctacaaagaagtaatcaaagaaccaggcaacttgattgtaactttaagcttactcagagttaaataatagaaagtctcatgtggcatttagctagggaattttcctacatttctccacctcggctgacatttttaggttgcttgatgagaaagtggacttaaacaaatgtaaacagtctcatggtctctgaatggtctaatttcttgaagctgcttagttagctgttgagaatatcattgcacatgaacttgacatttattgttccattctgcttcttttgtagggagagaagaatctcttagaattagtggagctggcagaccaagccttgcgtagcttttcctatcatcagcatttcccgctaataaaggaaatcatcagcatttgttcaaagatgtaatattttctttcttaatgtgattacgttattattggacacttagggtgtgtgtaaacttagaaacagtgaaagtgaaactgactgtatatctttgttattattttttagtttaattgcttttatatgtgtctgatttttaaagggtatatgtacagctgcattaggatacttaactgttatattcaagattaaacttcaaaaatgtcatgcctacaatcaaaatgaataatccttggatttttatacatttgtttttggtatccatccagactattcacacacattgtttatttatctttaaagttttaattaataacttaaactgagagttttgtaacttttattactttgtacctttttcttatgtggatttttagaaaagactgtgtattggttaatttattttgaggacatcagcaaatttctatttagaacttagtgtctttattgcttttggaaagaataaattctgtgatgtgataatcattaactgagtaggggattttaaagacattttgggtttttaaaaatactctttaagacagaacctcctctgccctgaaacaaataagtgcttaggtgagtacttgctagtattggttatttttaataagatctcagtttgaggagttggagtaggaagaaatcccttccagtatgctttgcagtcttttgcttactaacttacttgcctcacatgtcttggttgttttaccttttcaccagctggaaatctgctcaggccagtccattactacaaggagaaagtcagaaggtgcttctccatatgttgtctcacccattgccacgagtgaaagctgaaacttaccactgctgtctggaaatcacgaaggtgaggttttgttttttcgtatgttttgtttttgagaacaaatagtagactctcttgttataccttcaaacttaatttacttgaccttttgtatgagatataagaactatatcccataaaagtagatgataattactagtcaattctggaaaatttgtactattaaattctcttaacttagtaagtccagcaattgaattgctttatttgaagttttattaagaattacatttatgttgtattaatgatggaaaaattataaggaaaattgatttccaggtattcaaaagtgatttctatgcccaggaaaccttttaggttgttgtggcctagattttatggttttaattctgttttttttaatgttattttttatttttcttttcttttgaaatatttatttttctgtcttcttaaatgataaaatatttcagcatagaatattaaatatttcaatattgaaaagaacactgtacataggacaatatttaaaagtatatatattactgcgtactcttgaaagtgtccttttgtatttaacactcttgtaagtactatttggttataataagtgtttacattttgccatttttacttctgattcatttttattcaaagaaaaatactagttatagaggaagcttctttgctttctcttctcccaccagcatagcctagccactcttacacagctggtgtatattcttcccatccagttgttgtatattatttataaagctgtatctttatatataaatattatctttaaataatttaaagaattttatatatagcatgattagtatatatagcaggatttgagatttgcctagttcattcaccttaactgctattaagtttgaatatacttccttttattgaatgataaatatttaggttcagtctcctttttattgaagtaagtttttcagtattttcagtgacagtctgtgactgtgtgcatacgtttgaaaatgtcatgatttcactttattttgaatagtaatttggctgcatataaaatacaggttgactgctagtttttattagcactttgccagtattgcttaattcttattcggcttctatcattgttgagaagtctgatatcagttaattatgatttcttttaatttttttctctagtttgttttaaaatattttccttttctgtggtgccctgcggtttcattaaaatatgtctccatgcatacatgattttccatttatcttgcttaggacttttcgctttgaacactccatctgccttcacttctgtataattcttggtcatgcttattttgaatattgcttttctcttatccttgctgttttctccaagtggaactcttattagacctgtgttagaccttcttagtttaccctttgtgtcttttaagccttctttcatattttccacatctttttaggttttatttgggtagaatttctcagtgttatcctttcagtacactaattctttcctcagctttgtctaatttactttttttgatggtgatatgtatatataacataaaatttattttaggccaggtgtggtggctcatgcctgtaatcccagcatttgggaaggccaaagcaggaggatcactggagcccaggagtttgagaccagcctgggcaacatagggaaatcctgtttgtacaagaaaaaaaaaaaaaatagctgggcatggtggcatgtgcctgtagtcccagctacttgggaggctgaggcaggaggattgcttgagactgggaggtcaaggtacagagagctgtgatcatgccactgcactcaagcctaggcaacagagtgagtacttcatttctggaaaaaaaaaaaaaaaaggaaaaaattttaccattttaactatgttctgagtgtacaattcagtggcataagtacattcgtattgttgtaccatcatcaccattacccatctcccaaattgaaactttatagtcattaaacaataactcctcattctccccttctcccagcccctgacagccacctttctactttctgtctctatgaatttgaggtccctaggtaactcatataagtagaatcatacagtgtttgtctttttgttactggcttatttcacttaatataatgttctcaaggctcatccatgttgtaacatgtatcaacatttcattcctttttaagacttaataataatctattgtctgtatatatgaacactccaattctgaaaatccaaaatctaaaaggctccacaatctgacacttttcgagtgccgaaatgacacttaaaggaaatgcacgttggagcatttccagttttgaattttcagattagggatgctcaactggaaagtataatgcaaatattaagaaatccaaataatttcaaaatctgaaacacttctggtcccaagcatttcagataagggacactcatcctatactacattttgtttattcatccgttgataggcatttgggttgtttccatctttttgcaattgtttatatacccagaagtggaattggtagatcacacagtaattctgtgtttaatttttgaggaattgccctactgttttccacagtgactgtactattttatgttcccactggcagtgccaaggattccagtttctcttcatccttggcaatactttttatctggattttttttttttttgagatggagtctcgctgtgtcaccaggctggagtgcagtggcacaatcttggctcacagcaacctctgcctcccgggttcaagtgattctcctgcctcagcctcccaagtagctgggactacaggcgtgcatcaccatgcccagctaagttttgtatttttagtagagatggggtttcaccatgttggccaggatggtctcgatctcttgacctcatgatccacccacctcggcctcccaaagtgctgggattacaaatgtgagccaccgtgtctggccttgtttttttttttttttttttttttttttttaataatagtaaccatcctaatgggtgcaaagtcatttcccatcatagttttttttaaatttatcaagttttgattatcacttatactgtttttcatgtctataccttttctttgctttctttaactgacttgttcttttttcatgtaatctttcattagtttctgttttttttttttttttttcaacttttattttagggttgggggtacatgtgcaggtttgttacatgggtaaattgtgtgctgctggggtttggtgtacaaatgattttgtcagccaggtagtgagcatagtacccaataggtagttttttgatcctcaccctctgatatggtttgtctttgtgtccccacccaaatctcatcttgaattgtaattctgtaatccccacgtgtcgtgggagggacccagtgggaggaggtaattggaatcatgggggcagtttcccccatcctgttcttctaacagtgagtgagttctcatgagatctgatggttttataaacatctggcattgtctctgctggcattctgtctctctcctgccgccctgtgaagaggtgccttctgacatgattatttcctgagacttcctcagccatgcagaactgtgagtcaattaaacttctttccttatgtattacccagtctcgggtatgtccttatagcagtgtgagaataggctaatacgttctcttcccaccttcccttgtgaagtaggccccactgtctgttgttcccatctttgtatccatgtgtatacgcagtgtttagttcccacttctaagtgagaatgtgctgtatttggtttttctgtgttaattcacttaggataatggcctctggttgcatccatgttgctgcaaaagacattattttattcttttttaatggctgagtagttttccatgatgtatatgtaccatagtttctttatccaatccactgttgatgggcatctaggttgatcccatgtctttgctattgtgagtaatgctgcagtgaacatctgggttcatgtgtctttctggtagaaagatttatatttttttgggtctatacccagtaagggattgctaggtcaaatggtagttctgttttaatttctttgagacatctccaaactgttttccacagtgactgaactaatttaaattcccacaagcagtgtatagggcttatagtactgtgttcccttttctctccaaccttgccaacacctgttattcttttactttttaataatagccattctgactggtatgagatgatatctcattgtggttttgatttgaatttttctaatgattagtgatattgagcattttttcatgtgtttgttgaccgtgtgtatgtcttcttttgagaagtgtctgtttatgtcctttgcccatttgtaatggggttatttgttttttacttgttgatttaagttccttatagattctggatattagacctttgtcacatgcatagtttgcaaatattttctcccattctgtaggctttttacttagttgatatttttacttagttgatagtttcttttactgtgcagaaactttttagtttcattaggtcccacttatctatttctgtttttgttgcaattgctttttttggagacttcatcatgaaatattttccaagacctgtgtccagaatggtatttcctagggttgttatagttttaagtcttacatttaagtctaatccattttgagttgatttttatatatggtgaaaggaagggggtccagtttcaatcttttgaatacgcctaaccagttattccagcactgtttactgagtagggagttatttccccgttgtttgttattgttgtcttttcaaagatcagatggttgtaggtgtctggctatatttttgtgttctctaacctgttctagtggcctgtgtatctgtttttgtaccagtaccatgctgttttggttactgtagccccatagtatagtttgaagtcaggcagtctgatgcctccagctttgttctttttgcttaagtttgctttggctattcggtctctttttttggttccatataaattttagaatggttttttctaattctgtgaagaatgacattggtagtttgataagaatagtgttgaatctgtaaattgctttgggaagtatggccattttaacaatattgattcttcctattcataagcagagaatgtttttccatttgtgtcatctctgatatctttctgcagtgttttacaattctcattgtgatttggctctgagcttggatgttattggagtacagaaatgctactgatttttgtacattgattttatatcttggaacttcaccgaagtcatttatcagttctaagaacttttgggcagagaatatggttttttcttttttttttttttttttcaggtatagaatcatctgtgaagagagagagtttaacttcctcttcctatttggatgccttttatttttcttgcctgattgatctggctaggccttccaatagcatattgaatagaagtggtgagagttggcatctttgtcttgttctggttctcaaggggactgtttctagcttttgcttgttcagtatgatactggctgtggctttgtcatggataactcattattttgaggcttcaatgcctagtttgatgagggtttttaacaagaaggaatgttgaattttatcaaaagccttttctgtgtctgttgagatgatcatgtggtttttctttttggttctgtttatgtgatgaatcacatttattgatttgcatatgttgaatcaaccttgcatccagtggataaggcatacttgatcgtggtggattagctttttgctgtcctgctggtttcagtataccaatattttgttgagaatttttacatttatgtccatcagagatattggcctgaagttttctttttttgttgtgtctctgctagggtttggtatcaggatgatgctggcctcatagaatgagttagggaggagtcactcctccttcattttttggaataatttcagtaggattggtaacagttctttttacatttggtagaatttggctgtgagtttgtctggcccagtgtttttttctggttggtaggctttttttattttttaatgactgattcaactttggaggaacacattactgttctgttcatggttttaatttctttctggtccaatcttgggagtttgtatatttccagaaatttatccatttcttctaggctttctatttggtatgcatagagtttttcttaatggtctctgagggtctttctgtggggtcagtgataatgtcacttttgtcatttctgattgtgtttatttggattgtctctttttttctttattaatctagctaatgatatatcaatcttgtatattcttttggagaaccaaaatttggttttgtcgatcttttgtgtgaatttttgtgtctcagtttcattcagttcagccctgattttggttcttctgctagctttcaggttggtttgctcctgcttttctagttcctctaagtgtggtgtcaggttgttagtttgcaatctttctaacttcttcatataggcatttagtgctgtatagtttcctcttaacactgccttagctgtgttctaaagattctgatatattgtgtttctgtttttgttagtttcaaagaattttatgatttctgccttaatttcattctttactcaaaagtcattcaggtgcaggttgtttaagttccctgtaattgtatcatttttgagagatcttcttggtaataatttctatttttattgcactgtggcctgagagtgtggttggtatgatttcggttttcttgaatttgttgagaattgctttacagctgagtgtgtggttgatcttagagtgtgtgctgtgtgcagatgagaagaatgtgttttgcttttgttgagtggagtactctgtagagtctcctaggtccatttggtcaggtgtcgagtttaggtcccaactatttttgttagttttctgcctcagtgatttgtctaacactgtcagtggggtgttgaagtctcccactattattttgtggttgtctaaaactctgtaggtctctaagaacttgttttatgactgggtgctccaatgctgggtgcattatatttaggatagttaaatcttcttgttgaattgaaccctttatcattatgtaatgcctttctttatccttttgatcattgttggtttaaagtctgttttgtctgaaataagaagagcaactcctgctctttttttgttttctgtttgctggatagatctttatctccattctattactttgagcatgtgggtgtcactgcatgtgagttgggtctcttgacagcatatagttgggtcttggttctttatccagcttgccactctgtgctttttaagtggggtgtttagcccgtttatgttcaaggtcagtattgatatgtgaggatttgattctgtcgccatgttgctagctggttgttacgtagacttgattgtatagttgcatcatagtgtcagtgggagatgtattttagtgtgtttttgtggaggcaggtaatggtcttttgcttccttttttagcactccattgaggaccccttgtaagtcaggtctcatggtaatgaattccctgagcgtttgcttctctgaaaataattttgtttttcctttgcttatgaagcttagcttggctggatatgaaatacttggtttgaatttctttaagcatgctgattataggtccccaatcttttctggcttgtaaggtttctgctgaaaggtctgctgttagcctgatggagttctttttatatgtgacctgctctttctttctagcttccttttaagattttttctttcctgttgaccttggagaatctgatgactatgtgtcttgggggtggtcatcttgaatagtatctcactggggttctctgagtttcctgaatttgcttattgacctgcctagtgaggttggagaaattttcgtggaaaatatccacaaatatgccttccaagttgcttgctctctctccttctctttctggaatgctgatgggtgttaggttcgttttgtttacataatcccatatttcttgaagtttttttttttaattcttttttctttatttctgtttgcctgtgatgattcaaaggagtagtctttgagctctgagatttttttcctcagttatgttattaatgcttccaattgcattatgaaattcctatcatgaaatttttgtttccagaagttcagttttgttcttacttaaaatgtttgtgtcagatccaatcatggatcaaaccaccattttactggtttccatgggtggggcttcagccttcttctatatcttgtcgagcttccttgccttccagcttctgaattctgtcattttagccatttcagtttggttaagaacgattgctggggagctagtgtggttatttgaaaataagaagacattctggcttttagaattgccagaattcttacactgtttttttcttacctgtgtgggcagatgttcctttaatctttgaagttgctgtactttggatggggccttttgcttttatattatttgatgccattgaggattttactgtggtataagttgggattagtcaattggcttggtttctgtgtgctttcagggccagagctcagctcagcacccctgggctgtgtgctctaaccctgggggtgcactgaacaggccagtggctttgatttctggtcccttgaggtcaagcatctgctgcactggaggagccgagatgttcccagactgctggcaacaactttccgatggtgactgcccgagaaagtgctctgggggggcgtggggcggtgctttgggagagtgcacttgtggtgggggtaaccatgggcaagtgcgcactggcaggggaggctgcaggcaagtgcacaccagtaggtattggctgtgggtgggtgtgtgcttgcaaaagcgctctgacaggaaggcagaggctgttggcaaaagacctatggggtggctgttggggagcatttcggcagggcagctgaggctgtgttgcaagctagtgagacagacaggaccctttgagaggctggcagacagggtggcattcagatcaggttggcccagtcttgtgggaaagatagccctgctctttctacttctggcagcgaactaaggctaaagccacctagaggagtatatcaagatttgggtgatgggcacctatcagggaacctgccccaatagtcacgtagtttcttttctgttttccctaagtgtcggctgggttgggaaataaagggacagagtacaaaagagggaaattttaaagctgggcgtccgggggagacatcacatgtcggtgggttccgtgatgtcccacaagctgcaaaaccagcaagtttttattagggactttcaaaaggggagggagtgtacaaatagggtgtgggtcacaaaaatcacgtgcttcacaaggtaatagaatatcacaaggcaaatggaggcagggcgagatcataggaccgcaggaccgcaggcaaaattaaaattgctaatgaagttttgggcaccattgtcattgataacatcttatcagtagacagggtttgagagcaaccggtctgaccaaaatttattagatgggaatttcctcttcctagtaagcctgggagcgctatgggagactggggcttatttcacccctacagtctcgaccatagaagacggccacacccaagggggccattttagagacccaccttcaagggcacattctctttctcagggatgttccttgctgagaaaaagaattcagtgatatttctcccattagcttttgaaagaagagaaatatggctctgttccacccggctcaccggcagtcagagtttaaggtgatctctcttgttccctgaacgttgctgttattctgttcttttttcaaggatcccagatttcatattgttcaaacacacatgctctacaatttgtgcagttaacgcaatcatcacagggtcctgaggcgacatacatcctcctcagcttacgagatgacaggattaagagattaaagtaaagacaggcataggaaatcacaagcgtatttattggggaagtgataagtgtccatgaaatcttcacaatttatgtttagagattgcagtaaagacaggcataagaaattataaaagtattaatttggagaactaataaatgtccatgaaatcttcacaatccacattcttctcccatggcttcagccggtccctccgttcggggtccctgacttcccgcaacaggcacctatggccatgccccattgcagccattactgcgccagaccctctgggctctgtgcagactggcattctgtctctggcaactcattgggcagttctcccttgcaactcaaaggtctgtgcaggtcatggggtctcccatagttaggatcctagaggatcgttgcaagagtgggctgctccatgcctgttgcacttgccacttccctaagagctgctcaaggccaggaacaagtcctctagtttcttcttttgtgttgttgtgaattttaaacatatttattttataatcttgtttagattatggtattagaatcctcccacttgttatggctattgaatcttccttatgttgtttattttagcagatactgttattttgattttcaggtcttctttggcagggtagctttttcttgtgatcttgtattctctagatggtggttgtatatttgtttctgccttgcctttagggatttgacagttagtggtgatgcaccttggaaggggtttgtaatgaagttacattttcatttgtgtatgttgaaataataaaaagaatcagaggaggaaagattgaagatagtgggtagcaagtagctaattaaaagaagctagtgcctttgaaagttgaaggcggtgggaccttgaacatgatggctaattggggttaggtgggcttagatatcacaggaagttgcaggagcctccttctattgagtctgtattttctttgagattgaaagtgagatgttgaatgtgtgaaatgactaatatgagtagatatttgataatatcaaatagtagcatttttgggctgcatgaagagcttagtcaattgtgtctataatcttaatagggagactcttctactttgcatgtttatctttggctagctggtgtggtttctgggaatgtgaaccttgcgatcaatcaagggttgagttatttcattgctgtcggggaggagggaatgcctgtggtgcaagtgagctgagtagttgaaatgacatgtcgactgtagaaccaaaggctgtaaagactacagggaagaaagtagaagggtttatggactggaggtcaaagaaggaccatatttcaagttgagtaagaagattagaaacctacatttatgattttagaggtagaacaagtgaaaagagaaggggtcctcagttatagggcaggtgagtatcattgagataaataggtcaagaaactaagatcactgtatttgggatagttattataccccgaaatttaaaatggtggaatacgatttgatatctttcttgaggcagattttaaataattattggaaataaaaatttttgcagataggaaaatatttggtgtaaattgagttattgatgtatatgatcattttggtatatgatgaatttcaagtaggaataatctggatgttaattttttagaggagttctaaaaaattaacatccagataatttttcctgtcatagaatgataggaaaaaaggaatgtcagaaataaatatgtatgtgtcagtttcgaatttgtttttaaaaaaaatgcactgaattttagtaattttgaaaattctaaattttaatatactatagtttttataaccaagtgtcatacattttgttgcaaaatttaaactgaaagaatattttttgttaaaactcgccttattatcctagttgtagaaggagataaaataaaagaatgtgaactttcatttaatgttttattttcttgttaactatttggaaatttatattagttgacactgttcttgcaaaatattgtgatttttcttttgtcacaaaagataatcatctgtatagtgcaatgtggttttaaaaaattcatgtgtatttactatcagggagttataataatccaagtcaaaagctccaaatgatgagatttcttgtagttagcccctgtgtcataaagatatagtatcttggtttggatataaggatttgtaaaggcatttcactttaattggctatgtctgtcagatgatattattccagtgtcttctggtaaatctccaaggcattgctgcagctttacctacctaaatgtaggagcgtgctagtaatgtggaggttactttttctgaagaggcaagttagctttttattgtaagacttaactttgaggacggtatggtaaagaggtaaaatagcttttaaatttagggatgattaaatggccaccacttccatgttacctacatctaacattcatttagcaatatttactggacactttaccatatgctagactgtagtgatataaagtacagaaaagagccttatcagagagcttatattctgataggggacagagagagatgtatgtaataattaagaaaaattccttaaatacataaaaagtatgtatgtgtatgtgtgtgtgtatatatgtatatatagttttctttataacactatatgtatagaatatgtatatatatatatagtttacaacactgcatatacattcaatgtatatagtgttttaaataaaatagtgttgtaaagacaatgaaaggataaaggactagagaatgactagtaacgtggactaaatttatgtaggctggctagggagggagggagaatttctagcccgaggaaacaacaggtgaaaagcctctgcttttcaggtgagaatgtactttgcgtgtttcacgaacaaaaagaagggcagtataatgagataatagaaaaatggtaccagattgggtctgaaaagtaggcagggtgccaaacattataaagctatgaattgtattctaagtacagtgagatgctatgaatgattttaacgtgatctgatgatctttctgaaaagatcactctcccattgtggggaatggattgtagggggtcaggatggaagcaagaagaccagtttcattgtagtagccctgatgagatgtggtggtgtagtggagatgaagagaaggaaatgaatttaggaggtattacggacgtggagctaattggtcttgctgataatgagagtaggagatagagagtgatcaaggatgaattttaaggttttggatctagcagttggattgatgtcccaaatatgggattgtggattgggtagaattctgttttgaacctaagtttgacatgcctttttatatcaagtgcatatgttaagtagactgttaaatataataatgctaatgctaataatttcattgataatgatagcagctaacatttattgagcatttactcttatgtatcaagtacttttataagtatattatctcattgaatcctcctaacagctctgtgagctaggtactacctctttctgaaaacggagatactttgaatttgtccaaggtcattcaactaaaagtggtgaaactgggctttgaaccctataggctcactccaaagcccatattcttaagcattgcaccacactacctttggagtgtggagcccagattaggtataaaattttcagtcatcagcttagagatgatattaaagccacaagccttgataggatcaactactgagagactagggaagagaaggctgtctaggatctaaccagttagaagttgggaacagagggagccagaagtggagacagaggttagaaggaagagtcacatgagaacagagatgaacacgttggatttggcatcgttgaggttgttggtgtcctctatgagaagctcctgtggaatggtaggaacctaagtcctgctgatgtgcattgaagagggtttggcaaatgaggaagtactgactgaggacagcgaactcttgtgaggactcgtggtgggaaggagagctgaaaaatgaattgttatcaagaggagaaagccagggccatagacacattagaatatgtcatatggtgattagaataatcatgtgaagaaaaataaaggtgctggagaaaaataagacaattttaggaagtaaatcttggtttcagaaggggatagtcacagtttagatggtagataagtatcttaaggaagtaggtgacagctattgtttagggctgaggctttagatctttgaaaaccttgtaatatgaacgaagttgctgtctgtggcatgaagttaacagttgaaagaaaaataatgtatgcaaatacatatgtgagtgtatgtgtgtaactttttgacctttgaattgttgataataggaagtagaaatttgcagaatgaaaaaaagtagtattcatgtaactcattatttattgtatttttaccttctatattgtatttaaattccattaatatttcaagtagctttttttcccctctcaccttaaatagctgctaacaaaatactattctctatcacatattgagaaaaaaattcctgatagttactctaagtgttggttcaaagtaattgtattttaggtacatagctgtattgatgataactttatataatcatatatatatcacatatataggacataaatatgtagcataaaaaattatatataataggtatattatatataaaatatgtattctttatattctatatatatagaatataaatatatatagtatataaagttatgtctcccataacttgaagtccttgaagtcttttcatgttgaatttttctttcccaacctttgtaagtaaaatgcaaacaccttaggataagtttcttactgtgtttatgtcctttgtgtctgtcatgatgaattaactttaagagattatggttgtctcagccgtttgtttacttaatttatcatgattatgcttgtggcagaaagtaatataatatgtatctcctacaaactaagaaactgttagacaggagaatctttttcattctgtcttgttaaaaaaagtttcaatgaagtaaaaactaaaatagaaatgggattgtaaacagaagaaagatggatcttttggaaaaatcagtgttgctaatttaaaaatactttttaatattattttacaggaatgtttaggtgtccataatgtcactaaacccgtgtcttcactttgcaatggaattcattttctacttcatccaaaagttctgtatgaaatctctgtatttggcattcaagagcccgaaagtgaggtatgacattaaacatgagtgaaaatattacagtaacttagatactcagctaaatcaaggtgatattctaatatagtttagatagcatggtgagaaactaaaaagaaacctgtctttggtgcattggttcagttgaagtgttatttaaataaaaataaatgttacataaaatgtgggaataaaaatacaggacacacttgatttcaaaaaattcagatcagtttacttacatttttcatctaagatgtagagaactatacagtacaggtagtaagcagattatttcagttagggaaatttttactcaagggacaaatgtacattaaaggtaaaaaattagaaatattaaggaagaaaaacagaacagaatgtaagatgatgctgtggaagtacgaacatttgaaagaaagagatgttaattatagcatctttccacatgctataaaatgttccaggtgtgtcaggtgacctagcgggacatctcatttgactggtttatcgggtctgtgttgttgagcaggtgaacactgctgccaaggccattctgttatacctgcttcagggacgattgatgatgacagcattgacctggaacaagtttattgaatctctctgtcctgtcatcccaatactacaggtattctgtgaaattcactttttatgataccatttatctttggctgggtgtgattgatttaaatgcatgcaaacagctaaactgtcaagttgtgagagaaatgaagagaagctgtgaaggcgctggggataagtgaacaggaagtgggtggctgtcttgtttctggcagaaagttaaaccaggatagctaatttgtctgtatatattttatatatctgggtgggaggttaaaaagtgaggtgcattcacagcattgactgtgaaaaatagaactcaaccttatataaaggcttttaggcagagctaacagtgctttttaaggagaccttacataactaacttgcctcatgagttctatccatgcatatgtatgattagagtgataccgtaattaacatgctcctagaaacagcttttttttttttttttaaaaaagcaatccttctggacattaaaggagtcagtttcctgtctcttttggatgaaaaggtggagttcagaaatgccatcataagcacagtcctcttttagaagagagagcctgggccttgtgccttgagactcacagattccatgcgtgtagcatttagagcactccatcttcttagggtggggatgggctgaggatctgtgaggtgcttcaccgaggggaggtgccactattagaatcttagaaaatagaaaaatcagcaagtgtcaagaaggttggcatgttttcctgaagttctcctgtatgtatgtgtattttcttttaaatacagttttatttaggctccttggctcatagaagttattttaaaaaataatgattttattcaactgaatccaaagacatttatgagttgctgataggacaatacaattcttattttcaagttgaaaagttatgtatacaattagacaataatttctctttaaaaacaaatctattagggctatgccgacacagaagatcctctgggtaactgcattctccttctaagcaaagcaagttctgacacagaagagatgcttccgtgtactacccgattaaagtccatgctgcgacttttgctagtgaaaaagccatcgtgagtacaacgtaatcttgtgaacgtcaaagattgatggaaacatgctaagaaagtatagtaactatatataatttgaaacaaaactaaagaatttttaaggagggtgttattccattactagaggaaaccaatgcgtgaaactaagcagatacaaggtcttgtatgtacttgctgacgtttcatccactttacagccaagttattccttgccagatcagcctgtgttacaggactgctactaagtgccgctcagtagtgccctaggcaagttggagagccatggagataaatagatggtaaaaattatagtgcattcccatcttctctttagaaattgttagccttccagagtgatccttttgtaaacatctgttctgaatattcagtttttcataagtatagtaggccagttgtctcaaataccagagttatgcaggtattttaatcccatatagctgtgttcttacttggggaactgaaaacatatcctttctttgactgccattaatataagcattgttttaattaatgaaaagaaggagaatgatactgtttttcttccttctctgtcattgcaacatgaatcttttctattattatttttaggtaacagtggttagattttcccttactgaaaaaagaaaaaaatgctgagtcgagatggataagcagggataaagaggaatagttggttgaaaaggctaggaagaatggacagacattcttttcacaatggataatttgtgtttcccaaaccttacatcaggaaaatacagcagcttatttatagacagatcattggactgaaagataaggaaataggtggaagttaactaaactattaagagaatggaaggaggaaaattatagtctttaaaatatctctgtattgtagagagtaatgttatgggtgatccaggaagaagtagggcagagggagttaacgtgcttgtgttctcaggggttgtcttctacacatgcagaaaagctgttccctgttaattaacatgctagtgtggtactccttacttgaacaaacccccagtttggagaattaacacaatagggggcatttcttgtttgtttttcgggcccaaggtcctcagtttaataaagacattctaaggcaggacacccccaggagcatagtgcaaggaaaggccagatctttctttgggtaagataagtctctattatatagaatttgaaacaattcaaatgacatatttgttttccttattgtattaattctaccccatcccatcaacccatccataaactccatgtagacaggaaccctgtccgttggctaatctttatattctcagaacttcatagcgtaccttatacataaatacacagtcatgcgttgcttaatgacatggatgcatcctgagaaatgctttgttaggtgattttgtccttgtgtgaacatcatagaatgtaccttacacaaacctaagcaataataacttaactacatacataacctaggctatatcctatagcctattgcttctaggctacaaacctgtacagcatgttactgtactgaataccatatgcagttgtaacacagtggcatttgtgtatctaaacatagaaaaggtttagaaaaatatagtaatataatcctatgacaccactgttgcatatgtgatctactgttgactgtaacattgttatgcagtacatgactgtactcaaaagttttaaagaatgacatacatgtataggaataactggattctggcatcctatgctaaacctaaaaagatgctaaatgtatataccagagaacaagatgcataaatacatgctttacatatctcatctctagccacctttgctaggggttatacctgtctctcaactgacaaccccagatgtgaatacagatatcattggcttagaatgtaaggaacaaaggaaaactattaggtaggtgtttagcctttctaagctctcttgaggtaactcaggaaatggagagggagaaagtttgcctgacttattagtcctctggagatgatatcagttaacaatattgcagtaaatatctactttgtgtttgattcaggaagtatttattgggtgtcttactatgtatctatgagctgtgggaacgtagcagcacacaacacagacatgggccctgccctttcagcatttagtgtgtaaccgggaatatagctcttattatcaattattctttattattaattgtcataaagtgagataaaagttatgatacaggggctcaaggtggcaggcctgcatacagaaggcaacctgctctagtctgtagtaggagggccaccctaatgatgcatgttttaattgttgtcttataggtagttcttaaaacctggcaacttgtattattgcttaaaatttgtccagtttccaggtagttcaagaacctatcagaggagtgacagatacatggttgtctcaatatctgccgcctcagtgacctttgtccactcagtggtttttctgtttctctatttcattgtttagtggcatacagtatttactcttttcttgaaaggtctcccacctccccactcagctgaccttattcctaatcccttccagataaggaaaaagtatttgtattttcatatttgacaggaatctgtttggcccctaatatgagaagattttgatacattgtagtgttatcacacttccattatgagcgtcattactctcctgtgggttcaacttaacatttggactgtggtcagcggtctgtgatactttttatggtggagaatagttcactagatttgaagacaggagttattgatttaattcgcagatgtacttattgaagtttactgatatttaatctcagtgagtctgtctcatttgtagttattattttttgtttctgatgtttattttataactattacattgaataaatcattataattatatatcgaagaatttttagtagaaaaagtaaattattactagtaatggcagtataattgtgactacttattgtactttgttgatatataattacttgtaattacaagcccttttaaaatagacatttgcatatcacgaaagttcgacttaagtactttgtgttctcagggtccgttcgctagcattaaagcttttagcattccatcttaccagtgaagaaggggctgatacaaagcgtcctctaatagacgccagagttctctccagagttactgatttattcattgggaagaaacctattgaactcagactggatgacagaagagagctggttattaaggtgactataaattttgagtttattactgtgtggtaatttgatacatttttatatcatgtattttatgtgacattcttcagtttgtgtatgtcctggggagggagagaagtatggggattcagggctggtttgaaattgtgttctggctttatctggcttctagatacgttgatttattgcagtggtcccaacctttttggcactagggaccagtttcacaggacaatttttccatggatcagggcaggagtattgttttgggatgattcaagtgcattatatttattgtatactttatttctattgttattacattgtaatatataatgaaataattgtacaactcaccataatgtagaatcagtgggagctctgaacttgtttttctgcaactagacagtcccatgtgggggtaatgggagacagtgacagatcatcagacattagttaaattctcttaaggagcagccagccaagatccctcacacacctagctcacaatacggtttgcactcctatgagaactgaatgccgccactgatctgacaggaggtggagctcagatggtaatggcagcaatgggcagcggctgtaaatacattttcctgtctttagctaggactgtacctatagcatactggactgatggagaattctataaagaaagctgtccactagtccactgttttcatggattcattcctgtgttttgtactttctcatttcactcaagtttgcaatctgtctgttttattttagactaacttgccaaggcctgtagtagtatggtagagccacatgtaatacagtcggtttttttgtttgtttgtttgctttttaatggggaaacacattatgttcttctaaactgaatgttcagggctttatgacagtgctggcagggggattggagagtcttcactggccacataccaggtctggttgggacttccctgagtactaagccattggtagtcactcctgtgccctgatgtatggaggaaggcggggagagggcattctaatacgtcttctgtgagtccatgttaggactggaagatagcagtgagtgggagaaaggagcttcatctttgttattttcttgtccctttttcctgatgctggttttgccacctcagattctgttctagcatgaagtgacagtaagggacttgtctggggggtagctttgaaggggtgctggacagcaagtcccagagtgctgtttgctctggggtcttctaaaagaaagaatggagaggcccacgggaataccagctggtggcttctgggagcaacagggaaatcttgagtcataggtctgggtcgcttttctcaggttagcctggtactacctgtaaagatgttagggaacatggttgttttctgttacctttgtaaggttgctaatggattaatgggttatgaataacttcctagcaaaaatgtatattaagaagagaggggccgggcacagtggctcttgcctgtaatcccagcactatgggaggctgagatgggtggaccacttgagcccagcctaggcaatatggtgaaaccctgtctctactaaaaatacaaaaaattagctggggttggtggtgcatgcctgtagtcccagcaacttgggaggctgaggtaggagaatcacctgagcccaggaagtcgagtctgcagtgagctgagattgcaccactttactccagcctgggtgaccagagtgagaccctgtctcaaaaaacaaaaaaaaaaaaggaaaacttatttgacatgatgactctttattttagatcttaagttccttcctgacctactgcatcattgttgcaaattttatttatttatgtatttattttaaacttttatttcagtttcaggggtacctgtgcgggtttgttatataggtaaactcgtgtcatgggggtttgttgtacagattatttcgtcaccctggtactaagcctagtacccgatagttatttttcagatcctctcccgcctcctaccccccaccctcaggcaggccccagtgtccgttgttcccctctttgtgtccttgtgttttcatcatttagctcctgcttataagtgagaacatgcagtatttggttttctgttcctgtgttattttgctaaggataatggcctccggcttcatccatgttccctcaaaagacatgatctcgtccttttttagggctgcatggtactctatggtgtatatgtaccacattttctttatccaatctgccattgataggcatgtaggttgattccatgtgtttgctgttgtgaatagtgctgcagtgaacatacacatgcatgtgtctttatggtagaatgatttgtatttgagtatccaacatctataaggaacttaaacagatttacaaaaaaaaaccaaacagctccattaaaaagtggacaaaggacagaacagacatttttcaaaagaagacatacatgtggccaaaaggcatatggaaaagagctcaatatcactgatcattggagaaatgcaaatcaaaactgctacgagggaccatctcacaccagtcagaatggctatttatttattttttttgtgagacagagtttcactcttgttgcccaggttggagtgcagtggtgcgatcttggatcactgccgcctccgcctcctgggttcaagcgattctcctgtctcagcctcccgagtagctgggattacaggtgtgtactaccacacccagctaatttttgtatttttagtagagatggagtttcacaatgttggccttttgtgtttctagtagagatggggtttcaccatgttggccaggcttgtcttgaactcctgacctcagatgatctgcccacctcagcttcccagagtgctgggattataggcgtgagccatcgcacccggccagaatggctattattaaaagtcaaaaaatagcagatactggtgaggttgtggagaaaagggaatacttacacactgttgatgactgtgtaaattagttcaaccattgtgaaaagcagtgtggcaattccttgaagacctaaatacagaactgctacttaacccagcattgtgtgaatttacctgtaattatgttggttatttaaataagttgactttttgagcttttgttcatagggcacaaactataaaatcttattggagaattggaagcagataaatgtaattttggtttttttttttttttggtttgtagttggagactgttgaaaaggtatatgaaatcttcacctcagatgatgttgatctcgttttgagaaagtcagctgctgaacagttagctgtgattatgcaaggtaatgtcttttaagggaaatgattgctgtactgctgataatagaattttagattgccatatggtactggcaggagttggcaactatggtttatgcgccagatccagcctgtggccttttttttgacagccctcaagaatggtttttgcatctttagagttgttaacaaaatccaaccaaaaccaaagaatatgcgagagaccatatgtgtgtgtctagcaaagcctaacaacatgcttactaacctggttctttacagaagaagtttgctaatgccttattattatttgacctgtaaaatgccatttgatagaattatcttctttctaaaatattagtgtacttccaatagtgaagtgcatgttccttcctctgtttactgagtgcatgcatcatattttcaatctgtaccatcttgcttagggaaattaatcaaataatacttttgtggtaggtaaaagaaaaatagtacactgtagctatgccttttctttaaacgtttatttttatttttttaaattatactttaagttctagggtacatgtgcacaatgtgcaggtttgatacataggtatacatgtgccatgttggtttgctgcacccatcaactcatttatattaggtatttctcctaatgctatccctcccccaacccccaactctgtgacaggcccgggagtgtgatgttccccgccctgtgtccaagtgatctcattgttcagttcccacctgtgagtgagaacatgcggtgtttggttttctgtctttgtgatagtttgctgagaatgatggtttccagcttcatccatgtccctgcaaaggatgtgaactcatccttttttatggctgcatagtattccatggtgtataaatgtttatttttaaaaacaactagtgtaatacactgttagctttgtttgtagtgttgttattccataggcttttgttctttgggttagttttgaatttttccccatacgtgatgtatgtactttaatatttatgagaaatgataactttgagtttatgtaaaaagatttttatggttagcacttcttgtcttgacattagtggaaactggaatgagagagttatttgaaaaaacatattccacatatttttagttttaacaacaatcacacagactacagaaaagaagactagaaaatgtggaaagccctggttaaaaaaaagatcaagaaaaactcgttaaagagtattccttcaatattgttaacatttcaaaagtatgccttataattttggtatgcactatattggggggcaatggaaatttttttttttaagtagcagctaaagattgttacaatgatagcttccacttcaatatcagtatgtgagtgtatgtgtttttcctaatgagaatataggagaaaatttgtctgcaagttgttaaatacttgtaacgaatatataatcaattacagttttgggttccggtaacatttgtgtgtgcgtgtgcacatgtctatacatataagatttttttatgtatatacaaaaacttctttattacaaacataatatgtgaatatatgcttattaaaaagaagctcaagttctccagaaatatatagtgtattataatcttgttccttttatatttgctattaatagtttgaggttagagatttttttatagatagaaaaatgttcatgttgtaagtcatattttacacatgagcttgtggagaattataaacatttgaaggtgataaatttggaagagtcaatgaaataatataaagaagataatttgcatgtataaatataagcattcatttgtacacttaaattctcgtagttttcagagtctgaactagttccataattctttttttatagttttgtattttatgtgacagaagtaagatatgctttttacttaaacattttcaaattggacaggtgtacgtaaagtaaaaagttaaaagtttcatactcttatgtcaaccccaggtctaagtatttttaatagtttgaaggttgtgtggatatcagttctgagtatttcaaaatacgtgttttaaactacaaaaaatgtgctttaacttttagtaactttttttatctacagatattaaaatgcatgctgtggtgaaaaagttatgcttaattgacaaaataattgagtatttaaatgaatgtgtgagtcaagatggcaaggtaaggctaatgtgcatctagacattgttttacaggctgttttgattaatcagatctgaaattgaactgagcagaatttggatgagtacttggattttaaattctaagtaacacctcctatctcattcattttttttttttaaattcgaaaagtggagtctctataaaggaaaactaatcctaaaatttccataagataggtgatagaagtatatacgaaacttactttcagtggaaagtaattcctagtatttatttacattttagtttcagataattttgatgaaaacgcataaaatttagagtaagataatattatggtctgtttgatctcacctgataattggtgaaaatgaaaagctgtgtttttcctcctggcccaggttgtagaatgtttggtacaaccatgcctcacactcttgaggaaggttttatgtggtgatccagtcatgcgtgtttcgctctcgcaacagtcttctcttttgaccgtgttattcagaggtaaataaaagaaaatctgctaataattagattgttcttaaattttaagtgtttcttctttaattgtaagtcacatttactttttattttactattagaacaacagcatttattagtgaatacactactaatgtaaatggaaaatgtttaatatttttgtggaaattgctttctaatcctgttgctgagtggaggctagagctgagaaaagctgaaacctctgattgttctttgtgccttgatgtagatgtcatctggtgctcagacagtaaactattatctataaagagagaaagttgcagctgctgttattactatcttctttccaatatctctttcgtctttcttgttttgcttatacctttggatcttggtacattttgtctgattatttcatttgacaggtgttaagagtataggctcaacctgtgtgagtagaaactagaccatcctaaatgactctgagcctaaatttattacattctataaaatgtggtttttaaaaacccattttaatttgattctaatttagtaaggtgttagatgaacacgtttcatgtagttttgtccttcctgtcttctctgtttttttttttttctcaatggagagcttggtaacattttgtactattttttttcttagagacttaggccactgctttttgatattttgcaagagtcatgtagaatcatctgaatgtgctgaagagtcacgtacaagcatctgaatgtgcttcatcttgtctattatcaggcatataggagataagtgagatttatgttcaaaatatgttattataatgtagtcattttattttagcatcttttcctcctgttggcttctgcttgccaagtgagtaagatgcagtttatttaagtagcagccctaaaaccaggtaaagctctaaacagattcagtgtgtttaggctcataacattttgagtggactataacgtttttataagattgtatagactgatcatctgaaagagcagcagttacggatttttagttttctttaatcctgttaataattgtcttcttattaacctcattcacttgaatttagttcctggtttaccttttcatttataattttcatttaaattattcaagcatggaacttattatgaacacctactggattcaaaagcacatttcaaggcaatataatctatacccttttcagtatttcagtttttctatttcattgctgtttgtggaaattactttcaatgagtttgagaatgaatatagtatcctccattaatggatttagtttcaggaaaaattttacttacttacttatttatttattgagaaagaatttcactcttatcacccaggctggagtgcagtggcacaatctcggctcagtgcaacctctgcctcctgggttcaagcatttctcctgcctcagcctcctgagtagctgggattacaggtgcctgccaccatgcctgggtaatttttgtatttttagtagaggctaggtttctccatgttggccaggctggtctcgaactcctgacctcatgtgatccacctgccttggcctcccaaagtgctgggattacagtcgtgagccactgtgcctggccgaaaaattaatttttaaccagctgcttaaccaagaaaacccatttctcagcaaacgtttattaagcacatgctttgtgctaggtgcaatgctaggcccttgggttatattggtgagcatggtaaatgaccctcatggagcttacagtagagttggagacattgacaagtaaatatacagtacaccacagtaatacttgtaattggggattcctggtgccagaggacatgctggtcagattggttggtgaaaagtatcagagattgtttctagggaatgtggcatctaagatggaatttcagaaatgagtaggagttcaaataggcaagattgacttctagatggagccgtggttgtgtgtatgagaaattgatgtgtttgagatggagctggctggatttggggagtgtggagtgaaggggaaatgatgggatgaggcagggagggcagttcgtgcagggcctgggagattttattaaacagcagtgaagagctgtttaaggttgttaaacaggggagtatgtgttttaggaagattatttctgtagcatggatagtggatcaaatgagtacaataaataacttctcagataacactgctttgaattataaactttatgttatgacagaattctatagtgtatttcagggttagaaattaacttagaaatcatttactataccatctgtgtgaggtctagagagatttagcaacttggccaaggctataaccaaaaaatggttattgggttatttactttgctactgagagagaatcgaaacttccttacctttgtttgtttctgttttaaataatcacagacctatacatccccattgtaaaaattcaggcaatatagaactatacaaattctaaaagttttcattttcttctcgttctcaatttccccaaagaagactgttctggttatcattaggaatatatttttccgaatgattttttctacatacacatgtagttttcattctgtatattacagtattgtgttgcttccttttttcaactggaaatgtaacttgaatatctttctatattatttcatgtgagtatacattctttaaaaaaccctaaaaactactgcactggtgttgcagaatttcagtttgctatgttactgggtatttgttttagatttttcaccatgacagtaatcatgttgtgtgatcatctttgtgcattcagtgttggaattcctaggtcaaagagattttataagataatggttaagttcctttccaaatcactctcaccaaaggtgtttaaaaatgcttattttcattacaactttgccaacactgaatatgtctcattaattttttttaatcttataggtaaaaatatataattgttttattttcttattttagttttagtgaagttatcttttcatatatattcaaatttcttcatctatggattacttattttcctgttgtatttactttctttttagtgacttgtagggttttttattataagataggcacaatccttatgcttgattttatgtgattaatattttctctcaacttttctatcctttaaatttatttattattatatttttaaccttaaacttaaatattttatggaaacatatagaacttttctgttatggcagttgggcaattttttatcatgctcttcaagtaggactttctctagttccagattgaaaacacttttcctgtgtttcaagtgttgtttaaaaaaattaaatttgaaatcaggcaaaggcattgctgtaattcttatttatttggaaatattatggttcattctattcatcactgatgtgaaatgtcttttattataagttaatttttacatgttctctgtttctttactttttggtttatggctatttttaatcatgccaattacataaggatgattttcttttcctgcagttaggaaaaatctcttctctcaaaacttcttattgctgcttccctgaatttgctaactgtgtattatgttgttattcctgtgagataacatcgtacttctttgtttagaatttcataggtttcaaggagattgtagcattgggatcattacagaagtgggaactgagacttaatgttaaagaatctcaccagggcatttagctaagtagtaagtggtagagctagtgttaagtctgtccattcagagcacttcccttttccatcatcttgtcataattaaaaggaaccaaaacaatgacacagcccaaggataacattttaaagtcaaatccaagttctgtgatcacatgtttgtagtaaagggcaaaagttataaaataagatctcttggtgaggaaactttagctagaattatctgactcggcataaccttcttagaggctgtatcagtttgtttctctaattacctaagactagacagtgtctagtgagtgtatctacaagtgtggctcctggactggcagcatctgcatcctctgagaacttattagaaattcacattcacaggctccaccctaaacctatccaatcagaaactgttttaaccagccttccaggtgattcttgtacatccacaagtttgagatgaaagcctgtgttttagtgtcaccttatctgggtttatgttgcatttcttttctcttcaaatcaagatattttaaatttgaagttcattctttctagacgtacaaatatttcataaagttgtgcttctttttattcagtttccttaatatttcatgaagattgtagtgtcgtgactgaagttggagcactattttgtcttctattatttgatgaagtatcgagaatggatatgtggtgagatataagaatttataagttttttactcttaactatttatctcaggtatctgatgtaatcttatagcaaggcatggaaatttctgatttacgaagcttatgctgtccatgctacacatatgtggtatgaattttgatttgaataaacagtattcaaaagcctattagctcagaaagtctatctcaaattttatttttaaacattactaaatataaactttaaaattactgcagtaatttttgtctttaatacatttttagtacataccttcaactatgtgtttttttcttaatatttcatgatttttaaaaaacctcggaagatatttaggacgatagtatatgattagcgctgatcttgagcaggatccgtgggaggagacgcacaaagtccacctgctagtcccaccactgcattgtatgaatcatttgttatgtggaatttttttttaaaacataatttactcttcataagcaaatctaggaagtagcaaacatgttgtttctatactaaatgatagactcagttgcactgcttgatttcatttgcagtcaacgaagtgaggtaagttgtatttgttagacaaaacttggtctactcagttgtttctttgtttttgtttttcttttatgaaataggtctgttaatccttccaataaaccttctttgccatcggtcttcagtttgcctgtttccgtttttagaaggtaaaggatttatttctctgattttcttgaaggacgaaatgttgttacagaaagggaaatcaaaatctataatttgtcacaattttcatttagcatttaaatcccataacttgggctttcatggttccttcacaatggtgctttgaagatttcagtaagtatatctccccaccaccaattttttattttgataccgttcaaatttacaggaaagttgaaagctatacggtgcatacttgtatgtcgttcagcctagagtcatcaattatttacatatgagtctctttgctttctctctcctaatatatatttttatttatatttaattctccctcacccaccaattggaaataagtttcagacataaattcactcctttcctatatattccagcatgcacatccttaagttaaggacattattctacataactgctacaatatgatcccatctaacaagattaaaaataattctataacatggtgtggtttctccagttatctccaagtatcttttgtgtatattttttcagaatgcaataaccagttaaggttctgcattgtatttggttttcatgtctctttagacttttgtaaaaagtaaattgtttttattgacatatatcgtacataaagcatacaagtcataagggtacagcccttgaatttttctgagtaaacgtacttatttatctcacacagattgacatagaatattactgacagaccggaaaccctttttgtgctttctcattaccttctaccaccccaaaatgtaatcctattttaatttctattgctgtacattatttttgctagtttttgaactttataaatagagtgcattattatattgctttttgctcaacttggagagatttgtccatgttgctgcatgaagcaatcaatagttggttcatttttattctatgtagtattctgtctaagaatatacaacacttttatttaccattctatttgtggatgtttaatttgttttctgttttgggctattatgaagaaatgactgctaagaacattcttgaacacgtgtcattgttggaatataggatatttatgtttagctttagtagatgttaccagacagtattacgaagttgttgtgctgatttacattcctaccatcagtggaaaagtactagctgccccacatcctcactagcctttggtatttgcattaccagtcttaatggtgtttagtttggctaaataatgaaactcacacgactgcagtagtcatgcttagaatgagatcacatttgtgggtgctgggagctgtcttggcttggaagcctcatgtcccaaatagaaaatatgttctctagtaagtgtgctgtaggcatagtttccaggttgcttataagagccacagcactcaagattgctcagagctgtgacatcccatcatgcatttatagtttattcctagatgtctcagtccagatgtggggagtcattttcatcataagcaaagcagcttagtaaattcttgacattccatatctatctgattttactgggtaaagggacagagagttacctcaatatcatgtttgtccgtaaagaggagaaagggttttattactcttttactcacagtaatgttggcatttaaaaaattgttgcccatctgatggatgtatagtgtatctcaaagtggtcctgatgtattactctttgctttttattattttcttccttctgtgtttttcaaacttaattttctgttcattttctaacttactggaggattggccattgattattagccgccctttcatttaaagctatcaatgtttctaagtatggcttttggtatattccacgaatttgatatgccatattttattatttagttcaaaatattttctaagtgttttgtgatttttttttattgatgcaagggttgtttagagttattgggggtaactagtgaagatttagtttattaggttttctagttattttattattaatatttagctaaatattgacattagaaaatattttctatgattttaattctttagagtttgttgaattttactttatggcccagcatatggtcagctttttaaaatgttccatgtgtacttgaaaataataatgtatatgtagtagttgttggatatactgttctataagtctcaaaatatatcaggtttattgatagtgttcagatcttccctgtgtctactttattatatgtgtgtgaagttctttcaggtagcagagaggcatgttaaaatctccactatgacattgtcattctggctgacaatgtattttgaggccatgtaatttagtttgtaaacatgctggtgggttgtctctatcattatgaaattatttctttatctctagcagtgcttcatcatatagaattcactcgatctcttatgactgtagcttccccagcttttatttggttagtggttagcatgatatgtatttttccatccttgtagttttagctgttctgtgtccttaaatgtactttttttttttaagaagtatatagttgagtttttttgtccaatctgacattatttacagttttaatggaatattttaatgcattttacatttactataattactaatatttttggatacagattattagcttgctattttctatttgtccaatgtggtttttttctttctttttcctctctggcttttcttgattaatttttaaaattagtccatgttttccagctgttaacttgtagttacatatacattaagtattttatttatttatttatttgtagcgattgggatcttgctttgttgcccaggctagtcttgaactcctggcttcaagcaattctcccacctcagcctcccaaaagtgttgggattacaggcatgagtcactgtgcccagctaagtattcttctatatacattatttctatatattttatacagatgattattcttttataatatagagattataatttacttccttgactgtgaactagtatttttaccacatcccagacaatgcaaggaccttagaacacattaattccatttatttgctcttcttttttttttcttttattgtcaggtatttaaattctatacatattttaaattctataagatgttattataattattttatgcagtaaatagtcatttagatttgtataccgtggtcgtttctgttactttttattgcttttttggtttttctgcctccatctgagaatttgtttttttaagagttttttattatttaatgtagtgcacttatattagcaatgatttctgtcaggttttttttttttttaatctaaaaattctttctgttttaaaaaatgttatcactaggtatagaattctaggttggcagttggagtccatttttttgtaggaacattggctgtcagttttattgttgcttctttgaaggaactgtgttccccattctcttaggagttccttcagctatatcccacagcactttgcttgcttgcttatttatttgggggagtttattttatttttatgggtatataatagtacatatttatggagtacatgtgatattttgatataagcatacaatgtataatgatcaaatcagagtaattaggatgtccattacctctaacatttattgattctctgtgttaggaacatttcagatctgctcttctagttattttgaaatatacaacaaattactgttaactatttttaccctattgtgctactgaacactagatcttattccttctatctaaatttttatgtacccattagccatcccttcttaattccccccttccccaccatcctttacagcctgtggtaatcatcattctactctttatctccatgagatcatttttttttttttttagctcccacatataaaggagaacatgtgatgtttgtttttctgtgcctggattatttcagttaacgtaatgacttccagttccatccatgttgtttcaagtgacaggatttcattcttttttacatctgaatgatactccattgtgtatttataccacattttaaaaaatccattcatctattgatggacacttaggtagattccatatcttggttattgtgaatagtgctacaataaacatgggagtgcatatatctctttgacataccaatttcctttcttttggatatatacccagcagtgggattgttggatcatatgtaggttctgtttttagttttttgaggaactccatactgtttccaataatgactctactaatttacattcccactaacagtgtgtgagcattctccttcctccacatctttgccagcatctgttatttttttttgtcttgttgataaaagcctttttaactggggtgagatatctcattgtggttttgatttgcatttctctgatgattggtaatgttgagaattttttcatatacctgttggtcatttgtatgtcttttaagaagtttctattcagatcttttgcccagcttttaattggattattattattattattttgctgttaagttgtttgagttccttatatattttgatggttaatctcttgccagttgaatagtttgcaagtgttttctctcattccataggtggtctcttcactttgttgactgtttcctttgctatgcagaagctttttagcttgatatgatcccatttacttatttttgctttgcttgcctgtgtttttgaggtcttacttaataaatctttgcccaggctaatgtcctgaagcatttctctaatgttttcttctagtagtttcatagttgcaggtcttacattaagtctttaattcattttgatttgattttcatatgtggcgagagatagagatctagtttcatttttctgcatatggatatccagttttctgagtaccattcattgaagagactgttctttccccaaattatgttctcggtgcttttgttgaaaattgaccaaatgtgtgtatttatttgtgcattctttattctgttttattggtctgtgtgtctgtttttatgctagtatcatgctgttttggttactatagctttgtagcataattcagagttaggcagtgtgatacctccctctttgttctttttgctcgggattgttttggctatttaggaccatgttttgttccatatacattttaggagttttaaaatttctttttgttccttttaggatgcaaatttacatgcatgttagattatttcaccatgttaaaggaaaaacttgagacaaaatacacatgcatgtgtctttacggtagaacaaaattaactttggtttaaaagatactgctattgaatctgtttttatttctaaacatatttcttggttcttgttgaatttattgatgatgaaaccatgttctcaagtgaaaacaataagctggaattcagtcatttagtgacctctatgatcataggcaattcatttatcagctttaagcctcatttttgatcatttgtaaaataggtatcatagtgccataccatgtaactgtgaatgaatgatacaaaataagcagtgtttggcataaagtaaatatcagtgttttagctgaacaccttttatgtttggttcactgtattcatggtccctgacttcaaggagcattagttatctccacaacaactctaatatagcatagaatgtggtaagtcctcaagaaaggatttaagtgttctggggagtttagaggagatgaaaagaataattgaaatactgtataaattatgataattgtttaaaatagggactaagagaaacctttgcattattgtgggttgggaggcattgaactagccctcatttgtggctcatctttttgagtagcatttaagaatttgaaagtttgtaattatttgtacacattttctttaggtaccatctacctgttcatgtaattggacaccatgctgtgagtccttactccatagttttgcccttatctgctgattgtttggccttgaagccggtgtcagatatgctgagaatagcttggaacctgtcatggtatcatgggagtgataatctgttgaagcaaatgaactctgaaactaaaacgcaagagtaagctcttatattagtttaaaaagcatttgcaattaattaattgtaattaattagttaagttttactttttccttaggtccagtagctttttcccttggtatcatctgattctgctttttaacagttataatttttactttcttttaaatattacatgtgtttattacttttaacaatctatcatatgggaaaactttaaatgaaaaagcattttactctgtactgttttagaggttaaagtctgatttgttcgtagatatgaatcactaggaaaagggtcctggattagaacaaaatctcagtaagtatatgcatgagtgttatcattagtgtgatggtgattacttttgaatatcttaatattctaatctgtctgtcttaagtgaataaaaatttttataaggaggaaaagtcaatataaacatttgggatgccaatgtaaaatcctaatattgacagatatgtatcagtttttcttctggctgtaagtcaaccttttgttaaaagaaaatgaagataaaacagcttttgggagagtttataatagaaataagtgtgagcttttatttaaatagctttatgttcctccttcattttttttctttttgtctagaattttagatgcattgaagttatctacagaggacatcctcactctgaagataacacacatggctagtgggctgcaggactgcctccattccattgttcaggctgcaacccacagggaagttagggctgctgtcaccaggatgagtttttatcttctgaatgacagattgtctttaaagggttgccctggtccatgtggggttaccttgaagtccttggcttggcacaccgcactaaacaggtcagtgtaaggtcaaggctgccagtttcaaagacctggattgcattgtattgtgttcatctcctaacctttgaagataagagtctatgcccttactgctgctatcatagaaagaaaaactccaggatttttatcatctgtaataatagccaaagagaaatttttaatttagttattgcattgttgaagggattattaataaacttgtaacaatttattcttagaaaattttacctcacaaaagcaaataattaggataagacatggatgaaacaaattgaatgtttatttctatccatgttataaatgagttgagacatcagtgaattgattaatagctgtgatacacctgccacaggctgttttgttttgcttttgttttgttcttaagtaaattatatcatttttctttttactctcaatttcatgaagttgattgccatgtggcggtcctttatagcagttaattgagaaggctctagcttgtcaatttaacatgcttaacttgtagcagatggttgcatttgcaacaagactgataagcaaccactgcaagcaggttttcattttattcttcatgtgactttagtataaaatgtataactttattatttaacataaaatgtgcagtttttaagctgctaggttaaatgagtttccaaaatatgaattcctttattagtttagctttaaaaattagtttatctgattaggctttccagtggtgtgctggtgcccactaatgcagccttgtgagagagctgatggttgaattttcaggatttttgtaaggtgattgttaaacacagccattcttaattatataaacttacaattaaataaattatatgaagacaaaaggtaatgaatatgcaaacatcactttctaattatgtggcaacattttactgttatctttgttcttgaggttatgcatacatatgcactacaggggtatgtattttatggaaataactacaatggagtaccactgtgcatctcttcacaacttcatgttacatggtagctccacattgtctacagtagtatatttacaccatggaaattgacaaacacaataagtcagcactctcagttacatatttatcagcacactcccgcatttaaacagtctcgccagttgaagaatgcataaatccttcactttaaataaatgtaatatgtccctatttgtcaaaagaaattttaacataaaagctgattgaattcattgcactaagttttctttctcttgtgaattaaaaccatagaaatagtatgcaataccacattacaggaaagactctcaaactgtgggtcagtggaagcctttagagtatttcaaattgcccaatagcagtaactgtatgtgagcatcacattttttatggttagtttcctcaggactagtgtaagtggagagtatagactgtgtatatgtttaatatatacacacatgcatatataatattcatcttgtatttggtttttaggcctgtgtttgatcatggcaacacagacactactgcctaatttataaatattcatgtatttctgctgtattatgtttcactaaggaatgtatcaaaaatatatatcacagaatccaccttttttcatgaaaactttttaaaaactttacttccagcaatgtatgtactaatgaggctttgggaaactttagttttgctttcattcagtttaatgatagaaaggaacattatctttttgactgattatctaagatgaaccaacagcttaaagggtgcttggagatagaagattcccataaatcatggctgtataaagtattgagatattgagaacatttttataagcttagtttaatatttttaaaatacagctatttcaaattatatcattctagacaaaacaaaatatagagaagcatgttcatacctgtgtgaatggttttttattgtattttaaaaataatgttattttttacacattttccatgtcagtaaatatactttgaggctaatttttcaaatatatgatatatccaaatgaatgttccgcaaaagaggtccttttaggagtgagtgtgtatgttagaataattctggctttgctcagatattttgaaattgtcctctcaggtcatttaaacagcagatgtaaggaagtcttattatattttgaagttatatttaattttttactaaaaaatgatattagcaaactcaactatccagagaagggtaaaaatgatttttacatgtataccgaaatgaacaccaccctaaaccatgactatttatcactattaacaaaagtatatttcagtttgacaaaaaacatggtttctaaaatctttttacttacggtactgtggcttctaaacataactttccaagatgattattttaacagcccaacattaatttatgtgtatgtttttatatgtgtatgctaacacacaagcatacaattataatctaatatcattttggaaacttattttaagaaaacagatgatagtcatggtttagtaggattacaagttgtcagaggtatctagagtcttctttcaactagtttctgttgagtttgcatgtttaatgcctctctactcctttcctactggaagtcctattgctactgtttttctccatttttcaccagactgtagactgactagcgaattggtttttctgcttttaaccttatgccactcatttatgttgcttcctgaatgatccttctgaaatacatgtcacctgtgggttctcttccatggtgtgctagatattaatagaattccaaccccttagcatgctgtagaaagttctttttgatctagctcttgcttaccttttcagctacagtttcctcctctctctctaacatatgctgtgtttctatgaagtgcaaatattggggttttatgaaactgcttgatattttagggcatacacttctgttttatacatccttgcttttacatagttaactccttggctgccttgtgaatatctactcttccttgagctccagggtcttcttactctgtgatgtatgtggaattctagttaccctgattgtcatgtggctttcctgcattacttctacagttgtttaaatatttgttttctcatgtgccttgggtttattacattcctttttatatccctcacatatcgcataagtcatagtatacagttggccatgcagcctcagcgtgaacacctcctttgaaggatattcattctgtttttgcgctgtgattattcgtaagttttttgttcttttagactgtacctgatcatttctacctgttattctgtcctttaaactcacagaataaataatgtcttcacatgtgacagctcttcatttaaacataactataatttcttctctattccccccaccctgctttaaatgatttgtttttttttttagatagactttaaaagccacagtgtccagacttctcatttgttcatgctattttacaagggtattgtgtttcttaggactctccctgagatctggacatgataccttatatgggtgtggtgctgtggcatggggtgaataggaagaaaggggctactgcctttcttttcctactgcttttccatcattcaacaaacatttattgatcacctactaggtgtcactcttgtaggaaatatagcagtgggcaaaactgatagggtcctgctctcatggaacttggaattaagacagctaaaagtataatcaaaagtagaaatgcttccaagcagactattaggaaactgcattagaggagcaccctatccctcttcagtagagagaaagtggttcagagaatgaagcttaagccaaggcataacaggtagaaggatgttaaaagtctatgggattggaagccgaaaagataccaggcacacagagaaacaaataccacatgatctgtcttatatatggaatctaaaaaagtcgaattcaaagaagtagagtagaattgttaccagaggcaagtggcaggtggatatgggtagggaaaagggagacgttgctgagaggttacaaaattccagttagacaagaggaatgagttctggtgatctcttacagcatagtgactatagttaataataatatatgtttcaaaatagctaaaagaatagatgttaaatgttctcaccacagagaaataagtatttgaggtgattggtatgttaattagcctgattggatcattccacaatgtatacatgtgtcagaacaccacattgtatcctaaagatacatacaattattatttgtcagttaaaaataaaacaaataaatggaatatagtttggtgcatgttatgtgacagaaatttgatactttgaatccgtaaatggatggtcagttgactcacaaccacttgcagaatatattatttctcctctagactaaaatgccatattcaacaaatattatacaaattaattttttttttaaatgccaggcaaagggataggccctgagttaggaaagagtgtcttgtgtcttcaagaggaattgaaaagaggatagtacacttagatttaggggatatgagggtggttataaaatggggttacagaggtgatattttaatgttacactggatatcatagaagacttcttataatctttgtgattgttaaatcataaatctcccaaagatctatggttgttagaatcacctctcaattttcataatccggcacttgccatcctactcagctgaatgtcattttggggatgtgagaattttaagtaaggaaaaataataatgagacaaacaccacattactaagaaatacagcattatatatccctggtgttggactgcttagtttagtattcctgttttaaaacttgctagccgtgtgactgtggaaaaacgacttaaccatatttttgcttgggtcttcttgtctttgaaatagaggtgcctacttcataatgttgttatgaagtttgacagaaaccctgctgttagaacataggctggcacaaggttggtgctccataaatgctgagtattaagattcgtattattgtcactcttattaacattttgatgcaatggctttagatttataaaaaataaaacattacagataaaattggatctcatatctcttgctgattgctttttaaaaaaaacgatttccaaactacttctcccttttaaataaaagttttattgtctactaatcttttagctctcttaaaccagtttttttttttaaagaaatcttagaaaattggctcatatccttttgctctgaacttaaaaagaaatttcatcctaagtctaccttcagtgttttccttgcctgttacaaactctagtagcgtccttgcaggcctttttttccccctcactttattaccttattttttcgagttggtcagaattaggtttgaagtactaattcttctcatcagtgaaacatgacattcccagtatgaaaagcaagtttcactgggcggttattagagtcagtgtttttccccttggtatttttttggtactttttctgaatttgttatttttctcttatgatatttgtcacttctagttattttagttacttgtccacatgttttttccactataagctcatgttcttgaaggcagatacccagtttgtttcaactttgcattttccaaagcatttaaaacagtgtctcataaaatagcatcctcacaagacatctgttaagtccacatatctatgatgaacagtggtattgtgtattttaaagcgccagaaaccatgattattgtcttttcattataggtttttacaggtgcttcctgcttgcactgaagatgagaaactgctaatagatatcatacattttttaaataaattaataaaggaacaaagaaaaaattcttcactagaacttctaaactggattctcgaattacttcttagacatgtaagtggtgttaaggaatttggattttaagtttgggaaataacttatttgtagaaatcattaacattatattatggaaaaggataattttatattgtctatgcttggtaaagtagtcttcatgtaatgaatggctcataacaacatggctttcctgatacgattgtgaatgtgtttattaaaattctgtacagtgaatgggacctacagtcttgtgtttaataaaacctgttctgcatgtgaactttctgctgcaactgtatttttaagtggggatttcagttcaggtggcaggggacagggtggatgtccagataggcatgttgagagttagctaacaaagccagatggaggcaggagggggtatagtgatggtgcagttataaagataaagtgtgttcaggccttaaataacggttactggaatatttacccttctagcccccactactgtcagatttttagctcttctaaaaattctaaattttttttttttattttttttgagacggcgtctcgccctgtcacccaggctggaatgcaatggtgcgatcttggctcactgcaacctctgcctcctgggttcaaatgattctcctgcctcagcctcctgagtagctgggattacaggtgcctgccaccacgcccagctaatttttgtatttttagtagagacagggtttcaccatgttggccaggctcgtcttgaactccggacctcaggtgatccgcccaccttggcctctcaaagtgctgggattacaggcgtgagccaccgtgcctggctctaaaatttttctaaatagctattctaaaaattttggctattcagatttcttattctaagaagcgtgtgaagaacccaagaagccaggtccctgttgttggtctatctgtctctttatgtatttatttgcaaataccgtatgaatttactcaacttagctaagataaagctttacacaaataagaagaaaaacaaaacaaaactagaaaagagggcctaaactgatataggacatagtggatcttataaggcaaatatgtttcattatatattaacacatttgcgaaacttagagataattttatgtaaaaatatgaattactgtgttgtcagaaatgctaactgatatgaatgtttgtgtgtatataaaacttatttagaggtttattatcgtcttaggctgttttctgttgtttttaacataatatcagaagctgggtaatttataaaaaacaaaatttatttcttacagttatggggtgcaggaagtccaggtttaagagggcatatctggtgagagccttcttgcagtggggactctctgaagagtcccgaggtgatgcagggtatatgtggtgagggggctgagcatgctgatgtgctatctcaggtttttctcttcttacaaagccatcagttccccttccatgataacccattaatccactatccatgaatggattagtctattcatgagggtagggccttcatgatccagtcacctccaaaggccccacctctcaatactgttactttggggattaaatttcaacatgaattttggagggaatgttcaaaccatagtaattatcttttcctttattgtagattggtgaaggtagggactgttttgttcattattgcatacccagcatttattatagtgccttgcacatagtgagctctcaataaacatttattaactcagtaataagctatgtagttaattacaagaagcacacaaaaccttaattttatcactagttaagatttaacaaaaatggaaaccatgtattactttcaaggttacttatatatgcaagtatatttatagactgaatttctagaattgtaattgctgagtcaaattgtagaggtgcgtgtgtgctgaggtttttgtggttttataaatagataacttattttgaattagatggagattttttcatattcggtcttttcatgaattgtatcttgatgtccttgctggttctccgccacaattgggttgttagtctcctttcatttcttctttcctgtcctttcttttcctcccttcccttctcccttccctttctcctttgctttttccttccattttcctcttccctcccctcccctttccttggagcgtgatttcattctggtacctgcaacttggacattagtgtagagatctttcaccttttgattaaatttattcctaaatatcttaattttttttggtagctattttaaatgaggtttttttttgggggggcgcggttactgtatagaaatgctactgattttttataagttgattttgtatcctgcaactttattgaattcatttttaagatcaaagttttttggtggagtctaggtttttctagatttaagattatatcatcagcatagagggacagcttaacttgccttttttctaatgtggatgccttttatttctttctatatactaattgctctggctaggatttccagtaccatattgaatagacatggtgagagtagacatccttgtcttgttcctgatcttagagaaaaagctttaaacttttcaccattgagaatgatgttagctgtgggtttttcatatatggcctttattgtgttgggattccttttctacttaatttattgagagtttttattatgaaaggatgttgaattttgtcaaatgctttttctgcatctgttggtataatcatgtggtttttgttcttaattctgttaatttggtgtatcacatttacgcatttgtgtatgttgaaccatccttgcatccctggaatgaattccacttgattatagtgagtgatctttttattgtgctcttggtttcagtttgccagtatttggtaaaggattttttatatctgtgtttatcagggatattagcctgtaattttcttttcttgtagttcccacgtctggctttggtatcagtgtaatgctgccgtcataaagtgagtttggaagtattccttcttcatttggttttaggagtacagagattagtattaattctttaaatgtttggtggaattcagcagtgaagccatcaatcaggtcttgggcttttttttggtgaaagactttgcattactgatttaatctccttattattggtctgttcagattttctgtttcttcatgattccatcttggtagctctatgtgtctagaattttttccacttggttgtccaatttgttgacatgaaattgttcataatagtctcttacgattccttgtgtttctgtggtatctgttgtaatgtcttcccttttcgtttctcattttgtcttctttttttattagtctagctaaaggtttgtcaattttgttcatcttttcaaaatctcaattcttgattctgttactgttttctattgtttttccagtttctatttcatttgtatctgcccttatcttcattgttttctttttactaagttttggcttcatttatgcttctttttctagttccttgaggttgtttacttgatatctttctttttgacatagatgtttattgttatgtatgtccttcttagacctgcttttgctgtatcccataagttttggttggtttggtgtccatttttgtttgtctcatgatattttaaaatttcccttttagctttttctttgacccactgattgttcaggagcatgttgcttaatttttatgtatatgtgaatactccagaattccttcttttggtgacttctagttttttatcactatggtcagaaatgatattagatatgatttcagtcttgttatatttgttaagacttgtaacaccatacatgtactgttaattttgtagtatgtcataaggtttatgtatattttataatttattcatagttatgaaattaaaattaaattcctacaagactctagatgattgtactataattttaatgcagtttttgaaaaggatttttggtacagttacatttacttatttggttttgtatggtattaaacctttcttcggaaagcttctactttatctcatatattatcaccacaagtgttataaataatactacttttaagagtgcacaaaagtgaacttaagtgttcactatcagttgggtttactccctaaatattatgctacaagataaattaatatatgttatataactaccaatgtttaggataaagggaacctggaaatagaaaatcaagtaccttttaaagtttatcctttgaagtgagtaaaataagtgagaaatgatttaagaagctcagtaaaataacatttccaagtaaattgctttgaatgtatggacatacatgaaaagatatacaaaagttgtggttgcaaaaacaaaattaggcagatatgaacgcctgattagtcagaagaatgctaagaggaagtgaaaagaaaaatcagctaacttcccgagggaagatttaggaactttctcttgtgaaatttttttccatgtgttttatcaagacattcacttattacaaacatattgtaattcttaggcaatttaggagtttattgcacctctaatctgtttttaatatgatattttgtttatagtaacctagaagtgctgaatttgaatacctttctttttggaatgcatttttttgatggaagttcacaaatgtggggctgttagtttttttcttcttttggtgaagctcagcagaactacacagcatatatattttccttggctggctttcccgtaacgggctcaatgtgcactcagacattattgagggtcttgcagttacttttggcatagcttgctgatggatgtaaagttggatatgatgagtggtaactgtgtgtgtaaacaaaatgagccatcattatagaaatggttgccttttagaggtcaacagtgacaaaataatggcccaagtagttggtttaaaattaggattgaatcctaacgtctaaagacaaaaacttcagatatgattaagcacttgacatctgtaggcatcagtagagacatcttattctactctattgtacttgagaaatggtaattcaccctatattttacaagtggtattgctgaggttcactgaatttcagtgttaacatgtaaatcaaaggtgaaaagagaaaaaaaaacttcagtaatcttcaagtggaagcaagttattaataggatgagattctttgggagaatcttaatttttaggtatacacatactgtttcagtatattcatgtattaatagtagcttctacttaatttttatcagcatatcagaattaataattcctaataataaaattgttttacaagatggagtttgcgtcttggtataaacagtttgttcattttgtcagtagttttgggagtcagaaggcacgtgaatgtgagtcagcttttggatatttagggctcagaacattatagaaaatttatttatttttatgatttactaaatgtgtatttcgattcttttattcatgtatgaaacataaaagttgcagttatgtcttattcaatcttaatttatccaaagacatatattgcttaagataaaagaaaaagttgggaaaaaaactatttagatgttaaaatactgtaaaataagagcaaaatgtcactactagtttccaaaagctctcagttatattatttataattgtatatatctctatatactataagcaatttagaggtttctttacatattttcatttcttttccctaaagagaatgcagttaattttgagttgagctcttttaggtgaaggattttataagaacaatagttacattttgattgtatctctttttgtatgtttttacatgcactagtgatgtgacactgtgctgaggatggaatattaactagctttggagtaagatgcttcttgctctgcccttgtctgtctaagacttagacaattatttaacctctttataaatctatgttcccatctgtaaaacaggaatgaaaatgcaaatcttctagtttattcaaaaagtcaaatgaaatcttactatcttttttttttagcacagtgcctgaggcatcatagatgattaataaatatcccatatatctattaatgcttctgattaatgtaacgttttcttttgtcaatattattagaaataatcctcttatattcctttatctattttttttttagttgggaaaagaggaaaaactttagaaagaactagtatttgtttactagcctatcaaggtggcaaagattattgcagtaataatccacatagcactggcttgggtgctgtgggtcttttcatgtcctgtgtaattgtatgtattggtacattttttacagggacaatttggcaatatatatcaaaaaattaaaactactataatattttgatttagtaattttattgcagaattcatacataagataaaatccaacttgagtacactgtgtgttgcagcttagtgaaattatgcatcattgattatccaggagttagtgtggtaaatccttattgttgaaaaacaatcagatattaaactaatgtttttgcagaaatattgttaataacgggaagtaggaaaaaatggttacagtagtgatttttttcacttgatacgggtttgtgaaaaatgtactgttttaattctgtttatattctcagaaacaaaaaggagagttatatatcaatatataatagtggcaatttctgtgtggcatgattatgtgtggttttgtttttctcgtcctttttttctattttatatgataaatatgtttttcttttgttgagaatatattaaacatcttttgaatttagaacatctctactaatgcagtaaaggcccacacctactagttaggtaatatagctcttactagaacttgcttagcaaccaaaccctttataggaaacaatatatagttcaattagtaaatacattttttacaaatttcattttttagagtgcaaacccactgttagacctcttggttctgacagagtcacaggcacgagaagaaacagatgatatccggactgctgtcaggcaacaacttcagaaagaactgattgctctttttgataccttgctgctcaatttcatggaagttactgacaggtaccatttgtaatattgcaggtttaggtgcatttatatagaacccaagttttctttgattttcaaagttttactttgtacttctttcaaattaagaaatacttctttcaaatacttaaataataatcagttatagtgttctgtttgtttttgtttcagtttaatctgttacagcctgattgtacctgcttggtctctttcactacacacatgcactcacatatgcacacacacagttttgttctctagggtttaattcctggttctctcttaattatctacaaatctacttgagcagtcatacctatgcctatgactttatgattatctttacactgatgactttcaaatacatatctctagttatgaattctgttttttaaaaataaaaatattaagatgaaagtcactattttaaccattttaaaatgtacatttgaatggttttagtatatccgcaatgtttgcaactgtcaccactacctaattccagaactttatcatcaccccaagagaagccttgtatccatgaaaaagtctctccctattcacacattcctctgggccctggcagccactagtcttctttctatgtctgtggatttgcctattctggatatatcacataaatgaaatcaaacaataatgtgacctttagcgtctagcttcttcacttagcatcatgtttccaagctccttgcatactgtagcaaatatcactacttctttctatgactgaataatattctatttatagatatgccatgttttgtttatccattcattcattggtggacatttgatctgtttctaccttttggctattatgaatagtgttgctgtaaacactcatatacagatttttgtgtggacatgtgtttcagttctcttgagtatataattaggagtggaattgttggttcatatggtaactgtaatggtaactctatgtttgacttttcaaggaaatgccaagctgttttccacagcagctataccattttacattcccaccagcaatgtatgagtgtttcattttcttcatatcctcaccaacacctgttattatagcatcctaatgggtgtagactggtatcattttggtttttatttgcatttccccaatgaaaaataattttgagcatcttctcatgttcttatggctatttgtgtatcttcttcggagaaatacctattcaacatctttgaggatttagtatcagtgtgcatcagggatattggcctgaaattttccttttttgttttgttttgttttttgctttaaatatgtcccagagattctggtacattgtgtcttcgttctcattgatttcaaagaacatctttatttctgccttcatttcgttatttgctcagtagtcatttaggagcaggttgttcggtttccatatagttgtgcggtttggagtgagtttcttaatcctgagttccagtttgattgcactgtggtttgaaagactgtttgttatgatttgcgttcttttgcatttgctgaggagtgttttacttccaattatgtggtcaattttagaataagtgcgatgaagtgctaagaagaatgtatattctgttgatttggggtgaagagttctgtagatgcctattaggtccgcttggtcaagagctgagttcaagtcctgaatatccttgttaattttctgtcttgttgatctgtctaatattggtagtggggtgttaaaatctcccactgttattgtgtggtagtctaagtctctttgtaggtctctaagaacttgctttatgaatctgggtgctcctgtattgggtgcatatatatttaggatagttagctcttcttgctgtattgatccctttatcattatgtagtgcccttctttttctcttttgatctttgttggttttaagtcttttgtatcagagataaggatggtagctcttgcttttttttttttttttttgctttccatttgcttgataaatcatcctccatccctttattttgagcccatgtgtgttttttgcatgtgagatgggtctcctgaatatagcacactgataggtcttgactctttatccaatttgccagtctgtgtcttttaattgtggcatttagcccgtttacatttaaggttaatattgttatgtgtgaatttgatcctgtcattatgatgctagctggttgttttgcccattagttgatgcagtttcttcatagcgtcgatgttctttacaatttggtatgcttttgcagtggctggtaccggtttttcctttccatatttagtgcttccttcaagagctcttgtaaggcaggcctggtggtgacaaaatctctcagcatttgcttgtctgtaaaagattttatttctcctttgcttatgaagcttagtttggctggatatgaaattctgggttgaaaattgttttctttagaaaggttgaatattggcccccactctcttctggcttgtaggtttctgctgagagatctgctgttagtctgatgggcttccctttgtgggtaacctgatctttctctctggctgcccttaacattttttccttcatttaatctttggtaaatctgatgattatgtgtcttgatgattatgcattcttgaggagtatctttgtggtggtctctgtatttcctgaattggaatgttggcctgtcttgctagattggggaagttcttctggataatatcctgcagagtgttttccaagttggttccattctctctgtcactttcaggtacaccaatcgaacatagatttggtcttttcacatagtcccatatttcttggagcctttgtttgttcctttttattcttttttctctaatcttgtcttcacattttatttcattaatttgatcttctatcactgatatcctttcttggtgaccttcggttgggatctttgagtggacgtgctgttcctttctgtttgttagttttccttctgacaggcccatgtgctgccggtctgctggagtttgctagaggtccactctcgaccctgtttgcctaggtatcgccagcggaggctgcagaacagcaaagattgctgcctgatctttcctctggaagcttcgttccagaggggcacctgccagatgccagccagagctcttctgtatcaagtgtcggttggcccctactaggaggtgtctccccgtcaggatacacgggggtcagggacccacttgaggaggcagtctgacccttagcagagcttgatcggtgtgctgggaggtccactgctctcttcagagtcgtcaggcagggatgtttaaatctgatgaagttgcgcccacagcctcccctttctccaggtgctctgtcccagggagatgggggttttatctataagtccctgtctggggttgctgccactttttcagagatgccctgcccagacaagggaaatctggcaatctggccatggcagccttgttgagctgcagtgggctctgcccagttcgaacttcccagtggcttagtttacactgtgagtgtaaaactgcctactcaagcctcggcaatggcggacgcccgtcccctcaccaagctctagcgtcccaggtcaatctcagactgctgctgtgctggcaacgagaatttcaagccagtgaatcttagtttgctgggctccgtgggagtgggacctgctgagccagaccacttggctccctggcttcagcacccctttccagcggagtgaacacttctgtctcgctgctgttccaggcgccactggggtatgggaaaaaagaactactgcagcttgtttggtgtctgcccaaatggccgcccagttttgtgcttgaaacctagggctctggtagggtaggcaaccgagggaatctcctggtttgtaggttgcgaaaaccgtgggacaagcgcagtatctgtgcaggagttcctcaggctcagtctgtcacggcttcccttgggtggtggagaaaattccccgaccccttgcgcttcccaggtgaggcgatgctccaccctgcttcagcttgccctctgtgccctgcacccactgtccaaccagtcccagtgagatgaaccgggtaccttagttggaaatgcagaaatcacccgccttctgcgtcgatcttgccgggagctgcagactggagctattcctatttgaccatcttgccagcaatccccccaacctttttttttttttttttaaaaagggatgggggtctcactatgtcaccccggctggagtgcagtgacacattcttagttcactgtaacctcaagctccagggcttaagagatcctcctgcctcagcttcctgagtagctgggactataggtgtgcaccaccacacctggctaattttttttactttaattttattttatttcatttttttagaaatgaggtctcactgtgttgtgttgctcaagctggccgcaagcaatcctcccacctcaggctcccaaggcactgggattataggggtgagccacagcccctggcccagtgtaatcgttacttgtattttatatgacattctctagttggtattttatgctttccttgaaaagtctcattttgatagagactattttctgccattttgtctggttcatttttttctattactatgagtttaagtaaccttttatagccagtaagatagcccattaagcccattatactttcttggtggttgattttccctcttttgcatacataggaaatgctcggaacttctttacgtttttcaaacgcagctggctctgaaactgctccagtgtctgaaagtgacggatgcgcctcatttctatggcctgccgtcccttgagcggaccttacgagggatggctaacctcactgcgtttccgggatggagctcacactctcctctcacaaagcctctagatatctgtgtgaagtacttgtcaggtctccttgaggtaagtaaaaatagcatatggtagttatttactattagttgcttttactttatgccaggccacaagtgcattatacgttactctattcaatgtagaatattatacattatttatataagtcataatagtgaaatgttttagtgatttttattaatagttaagtaaggaaggtcacttttataaataccctcattttcaaaagaaataaatggaaacttttgatgctcaaaggaagtgttcgctagagcatttcagattttggatttttggattaggaatgctcaaccagtaagtatatgatacaggtatttcaaaatccaaacaactccaaaattcaaacacttctggtcccaagcattttgtatacggcatactcaggctgtacaatgttaaaggatatttgttttttctttttcttccagtttgtgcagttctagatgctactgctatgaacattcttatcttttggtgaaaatgagcatcttttttgaaattttatcttctgttattgaaatatgtaaatatagccaatttttatatgttgaccatgtatcaggcaattcttatttccaatatcaaaacaaaagcctttaatttttcacccttcagtatgctgtttatagtttttttttgtcaattaagaaagatcaagttaaggaagttttcttttgtcctgttttgctaggagctttgttttttaattcataattgtatattgcttttttctgtatcttttaagataatcacatgatttttcccttatattccattactgattgattttaaaatgttaaacaaccttgcatttctcgaaacatttcagttaggttgtgatgtattactctttttatatgttagtggatttcgtttctcaattttttagaattctgaagtttttagaattattctatttcctcatgtaaaaaagtttttcgaattttgcatcttttttctcttaaagaatttgtcaggtttttaataatcaaaatcattccgttcttatgactaaaatgggagaatgtgagattgtaagaacgtgactttttcaaccattttaaatcttttcctttatataactttcttttttggaatagctgatttgcattggtgtgattttgttctctaatgttaggtagaatttgatcgtgaaacaatcttggtttgcagttttctttttgggaagattgtaaattgtgaaatgaaatgactttttttttttttgagacagagtcttgctctgttgcccaggctggagtgcaatggcatgatctcagctcactgcaacctctgcctcccgggttcaagtgattctcctgcctcagcctcccaagtagctgggattacaggcgcctgccaccacgcacagctaatttttgtctttttagtagagacagggtttcaccaggttggccaggctggtgtcgaactcctgatctcaggtgatccacacccgtcttggcctcccaaagtgctgggattacgggtgtgagccactgcgcctggcctgaaatgactttttaaatagatctaaaatcgttcagagtttctttttatgtgtgtcagccttagtaagttatgtttttgtagaacttaaaaactttttatctaatttttaaaatttgttactgtgaaggtattcatcaaatcatcttacacttttaatgtctgctgaatctgtagtgaggtcccctttcattgcagacattaattattcctttctcaatttttcttggtttatctttctaatagaatgaacctttggctttgttgagcctctctttaacttttttctcctgttttatttctgccaatatttattatctccttctacttttagtttagtttacagctcttttttctaacattttaaggtagaggcttacgtcattgatttttttaaaagtctttctcaaatgtgtgtttttagctctaatcctctaagcatggccttatgccatgtttttatcatcaatttaggtcaaaatatttctactgtgatataataaatacgacaatgatatggttgtacatagttctatgagaacagcctcatcacagtggcctgacaattttgcatatctgcccttgggcttcatagacaaggcttaactacagccaatctaaatcttggcagaatttcctgtgatccttctggaacatgagaatatgaaaggcttatgagcagctgactatgcaagattgattctcacttacttcacagtctattaggaagtcagttaggagcccgtttcttattggttcctaggttccgacgagcactgggctttctgccttgctctccttggggcatagctacagcttataaaactgctttactgcagcacggcatgggcttctccgcaacagagtgtcctacatctttgttatagtcatctggcccctttgtttcaatgtcatcctgtgcaagggatactagtagctggcacctttgtctattcttgcttttgctgtttatgtaggtaataaactgtctgaatccaaaaattactcattgttttcttactggacaaatctgtcagccttgttttgattgctaactgtgttcggacctcaagaatgattcttgtaggaagcactgtagagttagattttgaaagataagtaaattgatagtgatagcaatagacattctagacatggaattttctgataaaattgtatctataacctcctgtttttttttcatgctgtgggtgacttcttgacatcatataatctctacctattgccagattatttttcagaaacataaatttttcaatccaaacctctttttttttcaagagcataagactcaatattttgcatttagagatttgcctccattgtagttttttcccacatctctgaattttcagttatatctggctgtttttccaaaataaaaatgcactttaaaaagactgcttctttcacatagtttcctctcttttagggatggcaatatctacaaaaaatttaagatctaacttatttatttaccttcatttagtaaaccttttcttattcttccaaggttggatacttacctaatactgtttggcctttcctgtaggttatatacctgtaacaatttatatatgtggctattacttaatacattatatttttatttattttactttatttctttgagacagggtttaccgtgttgctcaggctggaatgcagtggtgcaatcacagctcactacagcctcaacctcctgagcccaagtgatcttcccacctcagcctcccaagtagctggggccacaggtgtgcaccactacacctggctggtttaatttttttgtagagatgggtctcactatgttgcccaggtttgtcttgaattctttggcgcaaatgatcttcccactttggcctaccaaagtgctgctattacaggcatgagccactgtaactggacctttattttgttttctgcattgctctagtagactatgagcttataagtatcatctttgggctatttctactatcccatggctactgcattgacctagcaccatggtttttacatagtggttagtgaatcagttaattaatatatgtgctacataatacatatatattgtgtatagtttttaaattaagatacagtttgaaaaacattttggaaatgtagcataaatgattataaaaatatgttttattgttgtatttttattactaaataatgatttaaataatgtatatatatattttatctggtcttatctagaacttttttccaaaagcacatattgtttttaaaacaagtttaaagatcataaatactctttgctgtactgtaaaatttaatatgaatttcactggagtccctttaataaaataaatttcggagaggttccaagatggccaaataggaacagctctagtctacagctcccagcatgagcgacgcagaagacgggtgatttttgcatttccagctgaggtaccgggttcatctcactggggcttgtcggacagtgggtgcagcccacggactgtgagcagaagcagggcggggcatcgcctcacccaggaagcgtaagaggtcagggaattccttttccaagccaagggaagccgtgacacatggtacctggaaaattgggacacttccaccctaatactgtgcttttccaatggtcttagcaaacaatacactaggagattatatcccacgcctggcttggagggtcccacgcctatagagcctcgctcactgctagcacagcagtctgagatcgaactgcaaggtggcagcgaggctgggggaggggtgtccgccattgctgaggcttgagtaggtaatcaaagcggccgggaagctcgaactgggtggaacccaccacagctgaaggaggcctgcctgcctctgtagactccacttctgggggcagggcatagctgaacaaaaggcagcagaaacctctgtagacttaaacgtccctgtctgacagctttgaagagagtactggttctcccgttacagagtttgagatctgagaacagacagacagcctcctcaagtgggtccccaacccccgagtagcctaactgggagacacttcccagtaggggccaactgacacctcatacagccgggtgcccctcttgagacgaagcttccagaggaaggatcaggcagcaacatttgctgttctgtaacatttgctcttctgcagcctccgctggtgatacccaggcaaacagggtctggagtggacctccagcaaactccagcagacctgcagctgagggtcctgactgttagaaggaaaactaacaaacagaaaggacatccacaccaaaaccccatctgtacgtcaccatcatcaaagaccaaagatagataaaaccacaaagatggggaaaaaacagagcagaaaagctgaaaattctaaaaatcagagcacctcttctcctgcagaggaacacagctccttgtcagcaacggaacaaagctggacggagaatgactttgacgagttgagagaagaaggcttcagaagattggtaataacaaacttctccaagctaaaggaggatgttcgaacccatcacaaagaagctaaaaaccttgaagaaagattagacgaatggctaactagaataaacagtatagagaagaccttaaatgacctgatggagctgaaaatcatggcacaagaactacatgacatatgcacaagcttcagtagctgatttgatcaagtggaagaaagggtatcagtgattgaagatcaaatgaatgaaatgaagcgagaagagaagtttagagaaaaaagaataaaaagaaacaaacaaagcctccaagaaatacgggactatgtgaaaagaccaaatctacatttgattgttgtacctgaaagtgacggggagaatggaaccaagttggaaaacgctcttcaggatattatccaggagaacttccccaacctagcaaggcaggccaacattcaaattcaggaaatacagagaacgccacaaagatactccttgagaagagcaactccaaggcacataattgtcggattcaccaaagttgaaatgacagaaaaaatattaagggcagccagagagaaaggtcccgttacacgcaaagggaagcccgtcagactaacagcggatctctcggcagaaactctataagccagaagagagtgggggccaatattcaacattcttttttttttatgatttgcttttttttttttttttgaagtatttattgatcattcttgggtgtttctcggagagggggatgtggcagggtcataggataatagtggagagaaggtcagcagataaacacttgaacaaaggtctctggttttcctaggcagaggtccctgtggccttccgcagtgtctgtgtccctgggtacttgagattagggagtggtggtgactcttgaccagcatgctgccttcaagcatctgtttaacaaagcacatcttgcaccgcccttaatccatttaaccctgagttgacacagcacatgtttcagagagcacgtggttgggggtaaggttatagattaacagcatcccaaggcagaaaaatttttcttagtacagaacaaaatggagtctgctatgtctacttctttctacacagacacagtaacaatctgatctctctttcttttccccacatttcccccttttctttttgacaaaactgccatagtcatcatggcccgttctcgatggtcgctgtctcttcagagctgttgggtacccctgcagacaggctgtcacttcatgcttggaagattgcacagcggccaggcagaggcgctcctcacttcccagacgaggcggccaggcagaggcgatcctcacttcccagacggggtggcggctgggcagaggcgctcctcacatcccagacggggcagccgggcagaggcgctcctcacttcccagacgggacagctgggcagaggcgctcctcacttcccagacggggcgcctgggcagaggcgctccccacttcccagactggacagctgggcagaggcgctcctcacttcccagacggggcgcccgggcagaggcgctcctcacttcccagacggggcagccaggctcaacattcttaaagaaaagaattttcaacccagaatttcatatcctgccaaactaagtttcataagtgaaggagaaataaaatcttttacagacaagcaaatgctgagagatttgtcaccatcaggcctgccttacaagagctcctgaaggaatcactaaacatggaaaggaacaagcggtaccagccactgcaaaaacatgccaacttgtaaagaccattgatgctaggaagaaactgtatcaactaacgagcaaaataaccagctaacatcatgatgacaggattgaattcacacataacaatattaaccttaaatgtaaatggtctaaatgctccaattaaaagatacagactgggaagttggataaagagtcaagacccatcagtgtgctatattcaggagactcatctcacgtgcagagacatacataggctcaaaataaagggatggaggaagatcaaccaagcaaatggaaaacaaaaaaaggcaggggttgcaatcctctctccgataaaacagactttaaaccaacaaagatctaaagagacaaggccattacataatggtaaagggatcagttcaagaagaagagctaactatcctaaatatatatgcacccagtacaggagcacccagattcataaagcaagtccttagagacctacaaagagacttggactccacacaataataatgggagactttaacaccccactgtcaacattagacagatcagtgagacagaaagttaacaaggatatccaggacttgaactcagctctgcaccaagtggacctaataggcatctacagaactctccaccccaaatcaacagaatgtacattcttctcagcaccacatcacacttattccaaaattgaccacatagttggaattaaagcactcctcagcaaatgaaaaagaacagaagttatgataaactgtgtctcaaaccacagtgcaatcaaactggaactcaggattaagaaactcactcagaacagctcaactacatggaaactgaacaacctgctcctgaatgactactgggtacgtaacgaaatgaaggcagaaataaagatgctctttgaaaccagtgagaacaaagacacaatataccagaatttctgggacacatttaaagcagtgtgtaaagggaaatttatagcactaaatgcccacaggagaaagcaggaaagatctaaaattgacaccctaacatcacagttaaaagaagtagaaaagcaagagtaaacacattcaaaagctagcagaaggcaagaaataactaagaacagagcagaaatgaaggaggtacagacacaaaaacccttaaaaaaaattggtgaatccaggagctggttttttgaaaagatcaacaaaatagatacaccactagcaagactaataaagaagaaaagagagaagaatcaaatagatgcaataaaaaatgataaaggggatatcaacaccgatcccacagaaatacaaactactatcagacaatactataaactcctctatgcaaataaactagaaaatctagaagaaatggataaatttctggacacatacaccctccgaagactaaaccaggaagaagttcaatttctgaatagatcaataacaggctctgaaattgaggcaataattattagcctaccaaccaaaaaaagtccaggaccagatggattcacagctgaattctaccagaggtacgaagaggagctagtaccattccttctgaaactattccagtcaatagaaaaagagggaatcctccctaactcattttatgaggccagcatcatcctgataccaaagcctggcagagagacaacaaaaaaagagaattttagaccatatccctgatgaacatcagtgcaaaaatcctcaataaaatactggcaaactgaatccagcagcacatgaaaaagcttatccaccatgatcaagtgggcttcatccctgggatgcaaggctggttcaacatgcacagatcaataaacgtaacccatcatataaacagaaccaaagacaaaaaccacatgattatctcaatagatgcagaaaaggccattgacaaaattcaacagcccttcatgctaaaaactctcagtaaattaggtattgatgggacgtatctcgcaataataagagctatttatgacagacccacagccaatatcatactgaatgggcaaaaactggaagcattccctttgaaaactggcacaagacagggatgccctctctcaccactcctattcaacagtgttggaagttctggccagggtaatcaggcaggagaaagaaagaaagggtattcagttaggaaaagaggaagtcaaattgtccctgtttgcagatgacatgattgtatatttagaaaaccccatcgtctcagcccaaaatctccttaagctgataagcaacttcagcaaagtcgcaggatacaaaaaatcaatgtgcagaagtcacaagcattcctatacaccaataacagacaaacagctaaatcatgagtgaactcccattcacaattgcttcaaagagaataaaatacctaggaatccaacttacaagggatgtgaaggacgtcttcaaggagaactgcaaaccactgctcaaggaaataaaagaggacacaaacaaatggaagaacattccatgcttgtggataggaagaatcaatatcatgaaaatggccatactggccaaggtaatttatagattcaatgccaccttcatcaagctaccaatgactttcttcacagaattggaaaaaactactttaaagttcaaatggaaataaaaaagagcctgcattgccaagacaatcctaagccaaagaacaaagctggaggcatcacgctacctgacttcaaactgtactacaaggctacagtaaccaaaacagcatggtactggtaccaaaacagagatatagaccaatggaacagaacagagccctcagaaataataccacacatctacaaccatctgatctttgacaaacctgacaaaaagaagaaatggggaaagcattccgtatttagtaaatggtactgggaaaactggctagccatatgtagaaagctgaaactggatcccttccttacaccttacacaaaaattaattcaagatggattaaagacttaaatgttagacctaaaaccataaaaacccaagaagaaaacctaggcaataccattcaggacataggcatgggcaaggacttcatgactaaaataccaaaagcaatggcaacaaaagccaaaatagacaaatgggatctaattaaactaaagagcttctgcatagcaaaagaaactaccatcagagtgaacaggcaacctacagaatgggagaaaatttttgcaatctacgcatctgacaaagggctaatatccagaatctataaagaacttaaagaaattttgcaagaaaaaaacaactccatcaaaaagtgggcgaaggatatgagcagacacttctcaaaagaagacatttatgcagccaacagacacatgaaagaatgctcatcatcggagaaatgcaaatcaaaacgacaatgagaaaccatctcacaccagtcagaatggcaacattaaaatgtcaggaaacaacaggtgctggagaggatgtggagaaataggaacatttttacactgttggtggaactgtaaactagttcaaccattgtggcagacagtgtggtgattccttaaggatctagaactagaaataccattttacccagccattccattactgggtatatacccaaaggattataaatcatgctgctatattcatggaactagcccaaatgtccatcagcaatagactgggtgaagaaaatttggcacatatacaccatgtaatactatgcagccataaaataggatgagttcatgtcctttgtagggacatggatgaagctggaaaccatcgttctcagcaaactatcgcaaggacagataaccgaacactgcatgttcgtgctcataagtgggaattgaacaatgaaaaacttggaaacagggtagggaacatcacacaccagggcctgtcatggggtaggaggagggtggagggatagcatcaggagatatacctaatataaatgacaagttaacaggtgcagcacaccaacatggcacatgtatacatatgtaacaaacctgtacgttgtgcacatgtactctagaactttaagtatattaaaaaaataaaataaacttcattttttaattataaatattaaaaaaggttcaactgtcagtatactaattagttattttctgctgtctattagaaatgtatgaattttaaaaaacaggtatattaaagagttaatgataatatttcttagaaagtcagctcctctagtgcatttaaaatataattcagttagtctagctagtggcctatctatctcattaagtttttcaaaaaaacaactcctggatctagtgacctttcgaatggtttttcatatcttgatttccttcagttcagctctgattttggttatttcttgtcttctgctagtttggggttgatttgttattgctgctctaattctttcagttgtgatgttaagttgttaatttgagatctttctaactttttgatggaggcatttagtgctacgaatttccctcttaacactgccttagctgtgtcccagagattctgatgtgttgtaactttgttctcatgagtttacttgtgtaacaaacattcacgttacccgtgaacctaaaagtttaaaaattaaaaaaaatatataattgaacctataagtacctagtttatagcattttttgtcatgtgatttataaatactctatttatcaaccttttacagagtcagtctcctctagaaaatgagttttactctttgaaatcaggaataggtgaggacctgccacagcggtaactaaagaagaagtgaagtgttgcctcatttatgtttagaaactatcagaagtgcttttgttttaaaattacgtgcaaagactttagatcacacctacgtttcaaataccagaaattgaaatgaactgttaatgtattggagaacaaaagggcttagttttaggtaagaagtgtaggcaaaaaggcagtagtccattctgtgttcagttgtctttgaggtaataaaatttagtaacagtttgttagctaaaggatacataaaaagcacagtccctgttatgtaatgtttcgcagttataaaaaatttgattagccaatcttgctttggtttaaaaaggaggtcgttttgtgcttcataaaacatctcgagcagaaaatctttatgactttatgttaaatggcaggcaaatattaggaaagaatccgtcacttttgttaaaaattgtagcagggtaacatttaatcttgggactatctgcttagtttattaattacataaacaggtatccctgttgtactactaatgactaaattcatcttttaaagaataaagtaaggcttatgtgagagaacattgaaacaaagtcattgttggtccaaatgatttgcttcatagtttcttagtaattaaagctgtttcctttttggaagggagccatatttctaataaaagattagcttgtttctgcacagtgaaatttgaatatgagtatttgctttttgtagctgtgaaatgagactttttaactaagcatgattaattatgataggtgaataaactatgataattaaatctttaaatcagatacatgatgtataattccagaggtctgacaaaaatatcaagttgaaagaaaatactggcaaaggtcttggcttgtcatttataagctagaattaaaaatcattacacagatcacagatgttagatatctccaaagatgacttagaggaagataataaggatctgatcatttagatattttatttttcaagtagtcacttaaaattttaaatttttgaccttggggaaggggcagctgtgggcacagcttcagcaaacttaaatattcttgcctgccggctctgaagagagcagtggatctcccagcacagcactcaagctctgctaagggacagactacctccttaagttggtccctgaaccccgtgcctcctgactgggagacacctcccagcaggggttgacagacacctcatataggagagctctgctggcatctggcaatgcccctctgggacgaagcttccagagtaaggaacaggcagcaatctttgctgttctgcagcctccgctggtgatacccaggcaaacagggtctggagtggacctccagccaactccagcagaccagcagcagaggggcctgactgttagaaggaaaactaacaaacaggaatagcatcaacaccaacaaaaaggacttccactcagagaccccatccaaaggtcaccaacatcaaagaccaaaggtagataaatccatgaagatgaggaaaacccagtgcaaaaatgcggaaagttccaaaaaccagaatgcctcttttcctccaaaggatcacaactccttgacagcaagggaacaaaactggatagagaatgagtttggtgaattgacagaagtaggcttcagaaggtaggtaataacaaactcctccaagctaaaggagcatgttctaactcaatgcaaggaagctaataaccttggataaagggtagaggaattgctaactacaataaccagtttagagaagaacataaatgacctgatggagctgaaaaaaacagcaccagaacttcgtgacacatacatgagtatcaatagccgaatcgatgaatcagaagaaaggatatcagagattgaagatcaacttaatgaaataaagcaagaagacaagattagagaaaaaaaaaaaacaaaagggaatgagcaaagcctccaagaaatatgggactatgtgaaaagagtgaacctacgtttgattgatgtacctgaaagtgacagggagaatggaccaaattggaaaaaactcttcaggatattacctaggagaacttccccaacctatcaagacaggccagcattccaattcaggaaatacagagatcaccacaaacatgctccccgagaagagcaaccccaagacatgtaatcgtcagatttaccaaggctgaaatgaaggaaaatatattaagggcagccagagaggtcgggttacccacaaagggaagcccatccctgttagtcttaccagcggatctctctcagacaccctgcaagccagaagagagtgggggcctatattcattaataaagaaaataattttcaacccagaatttcatatctagccaaactaagcttcaaaagcgaaggagaaaatcctttacagacaagcaaatgctgagagattttgtcaccaccaggcctgccttacaagagctcctgaagaaagcactaaatatggaaaggaacaaccagtaccaaccactacaaaagcataccaaattataaagaccattgatgctatgaagaaactgcgtcaactaatgggcaaaataaccagctaacatcgtaatgacaggatcaattcacacataacaatattaatcttaaatgtaaacaggctaaatgccccaattaaaagacacagactggcaaattggataaagaggcaagacctatcagtgtgctgtattcaggagacccatctcacatgcaagacacacataagtttgaaataaagggatggaggatgatttaccaagcaaatggaaagaaaaaaaaaagcaggagttgcaattttcatcactgataaaacagattttaaaccaacaaagataaaaaaaaaaacaaggcattacataatgataaagggatcaatgcagcaagaagagctaactgtcctaaatatatatgcacccaatacaggagcacccagattcgtaaagcaagttcttagagacctacaaagagacttagatttccacacaataacagtgggagactttaacacctcactgtcaatattagatcaacgagactgaaaattaaaaaggatattcagaaaaaaaaaaagggatattcaagagttgaactcagctctggaccaagcggacctaatagacatctacagaactctccaccccaaatcaacagaatatacattcttctcagcaccacatcgcacttattctaaaattgaccacataattggaagtaaaacactcctcagcaaactcaaaagaatggaaatcataacaaacagcccctcagaccacagtggaatcaaattagaagtcagcattgagaaactaactacaaaccgcacaactacatggaaactgaacaacctgctcctgaatgactactgggtaaataacacaattaaggcagaaataaattagttctttgaaaccaaagagaacaaagacacaatataccagaatctctgggacacagctaaagcagtgtttcaccaaatgcccacaggaggaagggggaaagatctaaaatcgacaccctaacatcacaattagaagaactagagaagcaatggcaaacaaattcaaaagctagcagaagacaagaaataactaagatcagagcagaactgaaggcgacaagagacacaaaaaacccttcaaaaaaaatcaatgaatccaggagctggtgttttggaaaagatcaacaaaatagatagaccactagcctgactaataaagaagaaaagagagaagaatcaaatagacacaataaaaaatgataaaagggagatcagcactgatcccacagaaatccaaactaccgtcagagagtgttataaacacctctacgcaaataaactagaaaatctagaagaaatggataaattcctggacacatacaccctcccaagactaaaccaggaagaagttgaattcctgaatagaccaataacaggctctgaaattgaggcaataattaatagcctagcaaccaagaaaaggaccagagggattcatagccgaattctactagaggtacaaagaggatctggtaccattccttctgaaactattccaaatgatagaaaagagggaatcctccgtaactcattttatgaggccagcatcatcctgataccaaaatctggcagagacacaacaaaaaaagaaaatttcaggtcattatcactgaggaacatcaatgcaaaatcctcaataaaagactggcaaaccgaatccagcagcacatcaaaaagcttatccaccatgatcaagttggcttcatccctgggatgcaaggcccgttcaacatatgcaaatcaataaatgtaatccatcacataaacagaaccagtgagaaaaaccacatgattatctcaatagatgcagaaaagtctttcgataaaattcaacatctcttcatgctaaaaattctcaataaactaggtattgatgagacatatctcaaaataataagacctatttgtgacaaacccacagccaatatcatactgaatgagcaaaagctggaagcattccccttgaaaaccagcacaaattattcataaactctttaaaaggatgctataacatttttaaaaatattataagcatattctaagttacaactgtgtactaggagggcaccacacatctttttttttttttttacagactttaaaaggaaaaatattgaaactaagaatttttgtttttgttttgaaaaattacaggatctcactctgtaacttaggccaagtgcagtggtgcaatcatagctcaccgcaagctccagctcccaggctcaagggatcctccctcctcagcttccccggtagctgggactacaggtgtccactgccatgcctggctaatttttttcttttttaaagtagactgggtcttgctatgttatgtaggctgaagaatattttcttttaacaatggtaaaatacccataacataaaatttaccatcttattcatttttaagtatataaactaaaaatattacaactttataaggtaaggattcaattcatacaagtcagtagacagttatatatttatctttatataccattgagaataaagccaccatgaaattgtttacatttgtttttcaggtcattacttctttttatgtggagcgtggaggaaatgctatgtccttcatgggaaaaggtgttacaaagagcacaattctttgcttgcttcacttatcccatgagatgatggcccaggctgggagcttggtgagcgcgttaaagctgtctatcttctgaacatttgcttgaaagggaatgtgctgtgtccaacacatttcaagcatataaacttgccacatgaaaatgtctcttttgacttttctttttaggtaacgtgaatgatttttgactagaatatttcttagaagttgtatattaacaaatctgaatcttatttgaaattgattcaaatgtgcatacactggaaaactacattttgtctacattatgggaaaaatagcttctgtcaaaaaattgttatgtttaactttttaaagagaaacaaatttttttgtttgccttttttggctgaataatggattaaaaccaagtctaaaatacattttcacgttgttttcattaaaaattcttgttttaaccttcctgcattttatttttagaaacttacctcaaatatttctgtttcccttttttccctctaggagtggatgtcactttggttcttgcctttgggtagtcatagtgaagaacatattcctactcaacaaggattggcttggttgattccattatgggttgatcgggacccagaggtgagtgtgaaggagaatcaagtgtattgtgtttagattaaaaaacaaatgacacggggccaggtgcggtggctcatgcctgtaatcccagcttgttgggaggctgaggtgggcagatcacgaggtcaggagattgagaccatcctggctaacacagtgaaaccccatctctactaaaaatataaaaaaattagctgggtgtggtggcaggcacctgtagtcccagctacttgggaggctgcagcaggagaatgctgtgaacttgggaggtgaagcttgcagtgagctgagattgtgccactgcactccagcctgggcaacagagcaagactccatctcaaaaaaaaaaaaaagacacaaaacatatatacatatacatagttatattatgggattattgtagtgactctaccttatgttttatttaagccctgttttagcttaggctgccataacaaaataccacagactgggtggcttagacaacagacacttcttttctcatagaagttttggaagctgaaagtccaagatcagagtgccggcatagtcaagttctggtgagggctcttcttctggcttgtagacggctgccttcttgctgtgtattcacgtggcctttccttggtccatgcatgtggggcaggggagggaggggtggtatagagacagatttgtctttttttttttattataatgttaccagtcttattgagataggaccactcccttatgatctctttaaaccttaattatctcctagaaaccctgtcttcaaatgtagtcacttgagcataaagacttcaacatatgagttttggagggacgcaattcagttcatagttttccatccctgagcccctgaacttcatgttcttcttccatgcaaaatgcttttattctccctcaacaacctcaaaagtcttaacttattcccaaatcaactgtaaagtctaaagtccaaaatctcatctaaatgtcatttaaaccacatctgggtaagtctccagatataaaccctcctgaaacagaattcttctgcaggtgtgaacctgtgaacccatacaagttatatgcttccaaaagatgatggtagaatagacattcccattccaaaagagagaaataggaaaaaaaggaagaagtgatgggtcccaagcaagtccaaagcctagcaaagcaaatttcattagatgttaatgctcaaggataatgttctttggcttgatggtgtgccttacaggcccaccagagtgacagcatctgtctagatggctctgtgggatgaccccacccctttggctgtcttcaagagccccgcccataaagctgtcttcaagggcagccatgttcctgaagcactgggcagggtcatcattctggcccacagaaatcagaggtctttgaaaccaaggaggaaaagccacccttgagtcctgtggtgggattagcagcctggggatctctgaatcattttttgggtcattcttttcattgaagaatacagtagtcctcccttatcagaggtttcattttccaaaagcaccctgaagatcagtagtagccaaaccctccctcacaatgcctacatcattcacctcacctcatctctttatgtaatcattgtatcatctcacatcaatacaagaaggctgagtgcaatacaataagatattttgagagagagaccacatttatgtattttgtattataacatattgttgtaattgttctagtttatttttagttattgttaatctcttactgtgcctaatttgtaaactttaccatagatatgtatgtgtaggagaaaacatagtagttatagggctcagcactatctgtggtttcaggcatctactgggggtcttggaatgtattccccatggataagggagggaccactgtagcacatatttgcttacagaatccaggaagtccaacagctttccttcattctctgcatctttctctgtcctctttagttcaaactggcaatgtctttgctgatataatcccatctctattcctggcttctgctgagatgtctgattaagtccatgaattgcacccgtgatctttttcttaaatgggtattcagccacaccctccatgttctctttagaacaagctttctcattttttttgcacagataggctgagaatttttcaaatcttgttcttgtttctttttgcttacccattcttaattccttctttaattcatctctctccctttgcattttgctataagcaatcaggaggaaccaagccaatttttcaacactttgcttagaaatcttctcagctaaatatccaatttcattgctcacaagttctgcctttcacaaaacactagaacatgaccacagcttaaccagttttcttgctactttataacaaggattgcctttcctcaaataaccttttttaaataacactttcctcatttttgtctgagatctcatgagaattacccatgtctacgtttctggcatccacctcaaaactcttctagcctgtaacccattacccagtgccaaagtcactttcatgtgtttaggcatttgtttcagcagcatccccactccttggtacaaaaatctgtattagtgtgctcaggcttccataacaaaataccattgtctgggtggcttaaaaacagaaatttatttcttacagttatagaggctgcaagtccaagatcagagtgtcaacatggttggtttctggtagggcactcttcctgatttacagagggccaccttctcactgtgtgctcatatgacctctccttggagcacgcacatggagaaagatttctctccttcctgaggccaccattcctagtgcagtagggtcccacccttataacctcatttaactgtaatcacctaatagctctgtctccaaatacaggttggggattagggcttcaacatacgagtcttgaggagacacagttcagtacacagcaccctcattttcaatcaaatttgttcgagtatagattgaaaatataaaagagaaaaggttatagtatctattaccttcagaagagtggaaaattattggagaagcttagcaattttgaaaaaaataaaaaggatctggaaattatagacatgcaacacttaagtgtcatataatgaaattaaattaaatgcaaaaaattgcatttgcattacaatacaaaattttgtattatttctttccagttttagccagtttacttttttcaagtaaaatatgctattacaataaaatcttatttatagaaatatttgaaatacattttttagtcacattgaacttggacttactacttgacaattttatgactgcatttttaaaaaattctatagctgtcattgaaactatatttttggattcgaattcagaaatttaccaaaacgtgtggcttgaacagcagtggttctacagcaagcatattataccacatcaatcttatttgggaacgtttttctcttgaataacttttgaggaaaatacgaaatgccttgtaaaatgataattgcctctttgtttagaagttttaagaaagttaaaatcatttatttggaagaaacaataaaaaattaagaaaggtagaacaaagaatagctaccttttttaagaatgaagaattgaaattgtgttcataaaatgtaagtgccctatgctttccttagaaaaaggcttgcaaactataatttttatgcatctttttatacccagttttactttgctttgaaatttgcttatatttaatttttcctatattactgctttcttgaatcatggaatggaggacactgtcttctataggtgtctcttataatttaggatcataaaaccaatggatttttttaaagtgtgatatttatgtaccagaaaaactaagaattcatgttaggaaaaaggcttatttgattcaacaactttctctttaatttgaacaggtgagattcacttcactgggattaggatcagcactgaccacccttgaaacgggctgtgtggccttagcaaacagttgtcagaacatttccggtgggctctggggaactgtggtgaacattcttctggaccagtcagaatgtagtatggtgcgccgggaggtatgtctgtcttttctcctttttttccttagaaattctttgtgatggtatccgtaagcgatacttgactgccgctcaacatggtggactgaccactgaccatgatctcttctgtctgtgaacacccaaacaaaatgacagtagaggatttaaaaggtattcatgcacaggaaaaactggagtccttccttccgataagataaaatcggaatatactatattttaatgtgaactttttttattatgcattgaaaggtagttcacaggaaaaattacttttatattatctcagcatttatgggtctctgatatttatgaagctttagtatagataagaggctgtcaaaataactctttgtagtatttatcatataacatgagagggaaaaataaaccctattttaattctttctgaatagcttgtggtttttttttattgctgcttttgttaaagtaatgattcatgtaaatggttttaaaacaataatcaaattgtacttagaggcttatgaaaaaaaacagcagctcctgggtccaccattagcagtcgccagttccaagctcaaaaggctagttttgttgctgtttgccttcatgtttttaagtagtgatgtttatatttatggctgcttcttgatttatcaactttaaagcttttccatcacttctagttatcatggttggaaatgtcagtttcttagaatcctcttgttaatcctgtcattctcccattatggttatttcatctttcattaagcagacaatcaatgctcctatttgtatgattatttaatttgatcatcttcaggatctagtcaagttggacatttgtggtttgtatttctagttagcaagtttttattgaaaggagtctgtataagagaagggagaaagcggggcagaggggtgcgtgtgtttgtgtgtgtgtgtgtgtgtaatctgaaaggggatagtagaaacctaaaattatatttcttaaatgctaccagaagaatttatgttatacaaatcattttttaataaagctgaattctgaaataggaaaagatatatttcctgatgaaataatttcatatgctgttaggtcattacctaacaaggtcattacctaagaaggtcatcacctaacaagaaatacagtttgacaattctcataatgacctctcagcatgtgcagttgaccagagatgtcttttgctattaattacaatatattggttatttcagagatgaccacaagatggcagtattgacctttttttttttttttttttttttttttttttttttttttacattttcaggcggcatttattcttcagaatctccttgtaattccaatgcctacagaaattataaaggattatacttggcaggtgggtgattttaaacaattatcaacctagtagatgtttcaaattaattggtgataaattttcagtataagtagtatatttcattattgatgaaactatatacaagacagcaagggcctcttaaaatagaacgtagaatttgttcttatgccgaccagacttaaaaattcttctctatagtgttcacaataatttaaagcaaataataatagttaacatatgtttactatgttttaggcacccttctagaaatgtaagacatagtaacttgtataattgtttgagttgtgaactgttactatccttattttctaagcttaggaacttttgcatagagagtttaaatagtttgtcctaaatcacacagctagtcagtggtacgcctttgctttgagtctaggcagtctcttacccactttgctgtattacttctctaatttagtaataataaacaaatttgtagatagttaaatatgtgttgatgttaacatctttttttccttttctaggttagtgcacagtgcgggttatagtgtatcttgctttgttttctgttgggttaactttctttttcatgttctgaatatcacatcagtaaatggttacctaacatttttatagcttacattaaaaaaattctagcttcatgggatatatgtacatgtttgttacataagtatattgcgtaatggtggtggggattggggttctcgtgtactcattacccaaatattgaacattgtacccagttaggtaatttataacctcagccgcctcccccactccctccttgggagtctcagtgtctgttatgtctgtctttatgtccatgtgtattcattggttagctcccacttatacgtgagaacacgcaatatttgattttctatttttgagttagttcacttagataatggcctccacctccatccatgttgctgcagttttaggtaatttggaagatacaaaagtacacttattggggatataagatgtgctgtttctgtccttttacctatccatatattttcaccttatagggatatatttatcatattgctacacctcactcctcaaaatcctgtataaatctaaggtttatttttaagttttaattagactatactcttagaggagttagtgaaacaagctgaaccgtagcaagggcaagtttccgcacatgacccgaagcatgaatccaggtggttgtcaaggcccaggtagcatttaactcttggaaggcttacctctccaaactttacaaacccagggtaaccctaccagtcattgtaaatcccaggcttgtaatttgctcgtaatttctttaacattgccttctgataatggctgcttatctactttccatgttgtaataaaaccaggagacaaaactggagggaatatgcaggattaatagttatattaatagtgtagtagttttggtacctgttatccggagactacattttaaaacatgttgtttttggctcaaatacaaataatctctactcccattgttaaactagtgacccatgtacatggatatacttggtgatgtactaccaatgaatttttaattattgaaataagtataaaggcagagtatattaaagttcctgggacattatgttgtaatacagaaccgtatgtagctgttcatatttttctcttagaaattaaatagtaaagttcctgtttgttgctggtggcatgcttactgcagtttattggttttgttattctccagtcttcatcatggaaatccttttctactaaaaagtggaaaatagtgatttaagttagcttttggagttttggccttgctaagttggccaaaataaaaaaagttggagagccactgctgtcccaaacaatagttgattacaacttttgctagtcttaggaaaaattagataaataaggacaatcttgtatgctttttaataaactcagattttcttcctctcttttcagtctttttttttttttggttatttttgtttgtgtaagtgtccttccttggcagtgaaaatagttaactcagtatatctgtcatccaattttaagaaagtttagtggggtctgaaattccaaagtagaaacagcttctgcaagaaggaaacaagatggttgtctctgggtgcagctagtggggcacatggtcctttgcaaccatgaaaaaggggccacatagccagtattttaaaattcaaacagtctttggtagaattatgaataataatcttattcaacaaaatgtttcatttacttattttagtgtccctttcatagtgttgtggaggatatagcatgaaacagcatgtttaggagctttgttaaaattttattttggttgaggtaaatatttgattttttttttttaacaaagagaattgcttctattgctttgcactttgttttcctgcctgcagtctaaattaatgcccgctagtgctcttgtttcataggctttctgaagcattctctttataattactactccttttcctctccttcctctgcacagtagcataaattcctacttcatgtcatgacatagaattgttgtacttgtgaatagtaataatatgcatatatgaattatgaataatattatagctgagtttcccttttattgttagatgccagaaagtagagcccttttatcaattgtgactttttctgtatgtacttaaaaaaaaaaaaagatggggtctcactgtgttgtccaggctggccttgagttcctgggctcaagtgatacgcttgcctcagcctcctgagtagctgggaccccaggcacatgctgccacacccagcttaccttctaagctttattcatggttgcactttttccatatctctggcttttttctttcttttattcctgatatgcatttactatcatgttacaatttacctttccttgtaatgggccttaaatcttttctcggacaagataggaagtaaataatttaaaacaatttatttttttaaagtattaaataattttaccaaccactgcaattcccattttaatcttccttttaaagacactaacatttaatgtcttaccactaaattaggttattttccatatttgcattatttcttaccatttaacttaatcttcctgtgtagaatgtttgtttctgacaggactacattttttatattttaaaaaatgtttctcccaacccctaccacagagaaagtaagtgctccatctgtcttgactgattcattaaaatgtgcaaaacatttgagttatccttttggtcttaatatcataagtaaatacagttagaaataaagccttaattttcatagcataagtccccttttatttttctgtggatgcagaagcatactggaagtggggtggtcaccaagaggaggagcagatgaagtatctcggcctgtcttcccttgacatctagcactcctaccaggggccttgataccaggcccctgctggatatgagaacccagttcctgctgtgtcagtctttggtgtgtcacagctcttttatattcaggacactaacttttcagagggatatttacaaacattggtcttgttcttgagtcaaactcagcctcattcaaagctacatcccagctgggtgtggtggctcatgcctgtaatcccaacacttggggaggctgaggtgagaggatcacttgagcccaggagtttgagactagcctgggcaacatagtgagaccccatctctaaaaaaaattttaaaaattggcctggaatggtggcatgcacctgtagtccctagctactcaggagactgaggcaggaggattgcttgagcccaggagtttgaggccacagtaagctatgattgtgtcactgtgctgcagcctgggtgacagaacaaaaccctgtctctaaaaacaaaaaccctgcatactacattctctgccaagaagagaaaacagagccaatattcagttgacacgaaactgtattgtggctcccaactgtccagtgtttttcagaccagtttcccacagtctgactaggagttaagactcctgaatgtggatggtttcataactgggtttagtttgaagactagtgtcagaaatccgtatccctgaaactttaacaaccaattttagagttgattataacaagaaatctattgattagagatggattattgatgtaattttctcagttcatttctgtaaacatttgttgagtgtctaaatattggagattcacagataatccaatttagtattcttgggcttatggcctacaggggatgacatgtacccaggaaacattgttataatcatgttatgtatgatgatggtagcttatgcataattttaataatatttcagttctttccacttgaaaatgatctcacatttaaatgtaaagggtaatttcatgcacttaaataacataatgggttgtcagtttgtgatttaaataaacttgttcatgctctagttgctttccatgtttgtgacaggactttgaattggtacacagactttttaaactttattttgaaaaaacttagatttataggaaatttgtagaaacaatacaatttttatgtactcttcacccagattccccaaatgttattttacacatttacttcagctctgtctagtgtcttctttctaaactattggagagttgtagacataatgcttcttttcctctgaacacttaagtgtggatttcctaaaaataaggatatcctcttacataatcacaataataattatcataattaggagattactcaaggattttcagttgtcccactgctgtttttaatagaaaaaaaagaaaaaaaaatccaatcctggatccaagatccagctcaggaatacacattgcatatacttgtcttacatatttgctttcgttcatctgaaatagtttcaaaattttaaatatttatgatcttaacatttttgaagaatgcaggctacttatttgttgtaatatacttcaattagatttgtccttttccccaggtttagatttgagttacgcatttttggcagaaaaaccatagaagtgatgggttctcagtgcaacatgtcaagagatattatatctctctttcccattgttggtgatactaactttgattacttagtaaagatagaatctgcctgttttgtcctttgtaaagttacagttttttcttttggaaggaggtgctctgagactgtaaatatctgtttctcatcaaactttctttcactagttttttgttttgttttgttttacttttttttcccccataggttattggggaacaggtggtgtttgattacatgagtaagttctttagtggtgatttgtgagattttggtgtacccatcacctcagcagtatacactgcacacagtttgtatcttttatccctcaccccttcccacccttttccctcaagtccccaaagtccgttgtgtcattcttaagcccttgcatcctcatagcatagctcccgcttatgagtgagaacatttgatgtttggttttccattcctgacttacttcacttagaataatagtctccaatctcatccagatcactgcgaataccattaattcattcctttttatggctgagtagtattccatagtgtgtgtgtgtgtgtgtgtgtgtgtgtgtgtgtgtgtgtgtgtgataccacacacaccagtttatccactcattggtggatgggcatttgaattggttctacatttttgcaattgcaaattgtgctgctataaacatgtgtgtgcaagtatcttttttgtataatgacttcttttcctctgggtagatacccagtagtgggattgctgaatcccactggtagttctacttttagttctttaagaaatctccacactgttttcctagttttaaattccattcatgattcttacctgaaacagttattacagaattgttgccaaatgatttcctaactccatcatttctttctatgtttattacatgctactgtaaggaagaacttttcattcttccttgcttatttagtgattcacttatttacaccagcatggattgaagattcttaagtttgtttaatgggctataatctgtttctatcattatttgtttcaatgttcaaatcattcttgctttggccaggggaaatttcttcataatggttcttgtgtctttatcaatatttgagccatttccttacttctggtacagcaaagtgttctagactgtccagctccatcctggaatcagatatttgctccaagggctctgatttcttttcatggagaatggtatttagaaaccaagatctgcgttctagatgtattcattgttcctggggtgtcattgcttctatgtcctgtgagtgaacaaagctagtaattgtctgtgtatatgttttaaatagtcagctcatttatagttatatattattttgatatttgatatgattaatatgtattatttttatcttttgtttgttatgaagcatcatgagtatttccagaagacaatgagtacttggtaaactgatatcattgtaatgatattcatattttacatgtagttttggatttctaatgtatttagggtcatttttacagtctttggattatagcatttttgttatatatgacaataattcatttttctccttgaaaatattatatcttcttaaatgttattcttactttgcttctagtaccttttcaattatagctaatgggtatattagcactgacactaggagtataatatgcattttaaaattagtattctgatttattgcattcttgataaagatgttttcaaattaattggagcttgatatgacataattaatttgcagttttctttgtaaatgtatttgtaatggcattctggtgatttgaagagctttcttactttccttctcagctctctctggcaattcagcagacgatctggcagccccagaactcacctgagggcaaggctagtcatgatacagaagtcttgagacagagcaattagacctgattgctctaatttccccactatgctagaagataaccccatcaattactgatggatgtatggagcagagcctagtgtgtgcatgaaagacttcattgttctggcccttgaaccattagttatctgtgaaagcctgagcctggccatcctttgtgcatatcctgggcttggctccattataaagctctcttaataagtgtagagaatggggattcaggcttaatgcttagttaaataaaaaataaaataatttttatgtaatatgtgcctatttcagattactcggttttcttttgagcagttcaagaatattttgaatgcactaattgaactttttagaagaaatttttttttcaagtaataaatacatatggttaaaaaaaagctaatagagcttatagtgaaattcactgtccctctccattcactgagacagttttacctctgattttaattcttcagggagttaccactgtatatctaaatagcatgtttgcaataatatatttattcatacactactttagtacctaaggatttagctcatgtacacaatttcctgcagataccacagtatctcatagtaccatagtggtattactgctcttatttctccactggtcacacttgctcttcctggttttgtcacccatgcatcatatcttttgaccccaacccattttgagatgagtaagacatggctgagattgtacctgtcctttcttcagtctttcctctgccgtttctaatacccatctttaatagttttatttttactttttgctttgtgagcgttgattatgtttacattctcatctgcagtctcaattttatctgtaggttgcttctaaaagttgaaaaccgtaactcactacagagacacttagtgggctgtgattacactttcttatctcggcttccaggaccaactcatctaatactcagaggaaaagttttctggtatttgtatgtatgtatacatgtatatgtgtgtgtgtatatatgtatatataaaaatataatttaaaaattgatttgggtgatttattttcccttgaggttcctgtttgttttttcttacattgtgggtccatatcatgtctcatgtctaaagtttttctaagctcttaatcatcctttctcttctgttagaatttcttttcctagtcataattctcaaaatgattgtagtggtaactagtgacaagtgcatgagagataaatatcacaagttcttgcatatttgaaaatgtctttaaattgcactggattgatagtgtggttagttaccatatgtttggtgaagattgttcctcccaagaattttgcttcactgtattctagcatccagtgctactgatgagaagttgaattttcatctgactctttttacttctttatggctgatgttttctttcattatcatctctttgtcctcaatgtttagaatttttttattatgtaccttttttccatttttcttgcttgacatttattaagctccttaatttgaagatttggatcttctatatatttttttggctctgacaaatcttttcatatttatttcttttaagatgaatttcctttttttgtgtgttatattttatctttccagaaattgtaagtcccttattaggcctcttgaatttattttctctgatttccttttgtatttctatatcttaaacctttttgcactattttctatgatattaaattttttgttcataagctaaattagcttcttcaatcttggtaggctaaataatttttaccatgatttataaacagaggaaaaatagaacagattctaaactttatttgatagatttagttataaatttgtgtctcttattatgactttcttacctatattttctaagtctgtgtttatattaataggaactagaaaagaatttttaatttattgaagggaaaatgtgattaaactaggttctttatcactgtgacaattttacatatttagagaataattgcaagagttctaataccatatttacatgtgtaacttctcacttctaaaatacttaaaaactaaagaaatgttagattttagaagacagtgggtttgtaactcttgtcttcctaacagttggtatggccatcagcctcagtaggccttgaacagaataaagaatcagcagatttaagatctctcaaagagctgtagatgtcatttttttctgtttttaagatttatacagtttacattctcttctctattttcattaaaggtttgtgaattttgggttgtggtaactgatagaggaagcattcatgtagacataattttgcaaaaatatgaaaaattgcataattttatataatctgtatggcaaaatatttttaagtggttctttgtatcattataaaatatattttgaaaactagtttttgtacaactttgattaatcacttttgatttattgaattttttagatggagtgaagctagtaaaccctctacaattcttgtcttatttgttaattccttccctatattattataatgaggactctaatttgtgatgttaagcagtttattgcaaatctcttgggtgtttggcgtgttttgtacgtttaagtatgttataacttgcttaaaagatagaatttcttgaagctgtgaatgttaagattgactgtgattttgggtgaatacttcattctatataataaaataaggtaatgtattaaagggcgccagtacctgtaacatataccttggttaataaacaggagccacataaccccattcactttgtattactctctattttacctgattcttctagacctctgcatttaaaataacgacagtgaccaccatgtgctggctgttcattacagtagtcttatttcttatataaattgctctgtttaggacgagtaagctcacagtgttggtagatttattacaacacagcagtaacaacttcatagtcataaaagacattgaatattgaagaggtttaattataatgatgtatataaatgtccttaaaaagaagtgttaatagaaataaccttgttagtgtaatcgtgcctttaacttgtgaattcctttgtcttcctgaagagtaagttaaaatatccatcttcttttggtgatggggagggtgagagaacagacacacatacaaatcttatggttaaaggtcaacttgcaatatgttttgaacgtatctttcctgttggctcttagatttctgtttgctatcttttatttttctctctcttatggcctgttttgaaatcttaactttattatcatttcccagaaaatagaaatatttataaactaatggtaggattatttgcaaacttcaaaccaatcctcattgcttgctttttgctattagatactccaggaaaagtagtaagtcacaatgcaaaaaattgtttgggaaaaatgcaaagagaaaaattgtgtaatagcagattcttttcagcctcctggtggcagttcatgtgtgtgtatgtatacatgtgtgtgttttttttccttgtcaggattaattcagtgggaagtaatgtgacagattttgccatatggatattgatggaccttttcattttacctggcttagtgataggtataaaaaataattctgaacataatatatggaccaccttatttcatatattttaacacctattattttactattatatgtaggttgaaaaatactgcttttattgtgtttttggtgcaagtatatgatttcttggttaaagctgatcattccatagaaacattttaaatgaaatggcccctcaagagaaagatcagctttgtcccttcacgggggtgtttaggcagcaaagacctagagtattatggaataatttgtcctaggtcaggctgctataactgtgtaaggacaaaagcagagtggaaggagatgggagcatctgggacccatttgtttcctcgagaggagacaatggatctttttaaggaaattgttggataaatcagtgtctcctccttctttccctctcttcctacagggtccctgtgttcatgatgaggactctggcctatcgctcattggaaaacctgcccttcaggctcttttatatcactgccatttttatgaacatttgaatcagatggtaaagcattgttacctaggacggtgtatgtttgatttgaatttttctgcttttgatagaaattcagaaagcaatgatttaaatggtaagtacgatatctttgtatttttatttttgtaatatgtaacttgtaaaaactgttaaaaatacatatatttgttttaaaaatttgaaaaatgaaagtatacagggaaaacattcatttccagttctaccacccagagagatgtattttcttcccgtcttctttctctgtatagcctttgtttgttttatgtaattatgttcatatcttgtgtacatttttgtatttccttctttcactaaatattctgcaagcatttttctatgttataaattcttcatggaaattatttttgacatcttattaatactttataagttatgcccatcagtacagttttatagtttctttctctgttaacgtctcaaacttttttggaactttcacttctaggcaatgtacagtttttttatccttcttgtgaatgagactttttcccactatattttctaattcattttgctcatgtatcaaaaagttatttattttagtatgttacttatttgtcacaatattttcctgaaacctttttattccttttgtttgtaggttcttgtagatttgctaagtataagatctgagcacataaaaataattatatcttgtaataaatagtaatttaataatataaatagcttttatttttaaattcatttttataataattttttagaatcttgccatagtttcaaacttacagaaaagcttcaggaatagtacaaaagaattctcaaatgttaacattttacagtatttacatcttgccacatgtgtgtgtatgtgtgtataaataaacggatatgtatgatctatatatactctttttgagccatttaagagtaagttgaagacatgaagttcctttatccccgaattattaagtgtgaatgtgtgattcacttttctgtttacttcttggaagaatcaagaaaatgagatttgatgaagttttgaacattttaaatatccctcttagaaaagtgactcacttaattgtttagatttctctggatcagttacttagagcatggcccttaaactaacagcattggcatcttctgtgaacttgttagaagtgaacactcagggcttccactctgacctggggtattggagcctctggggctggggctgaagcagctgctttagcaagctctcagtgattcttatgcacattaaaaaaaaactctccttagatttttttttttttaaatagtggtctatctcagaagccagatccatataagttttttcctttctttagttttgaattggtttcctgtaatgcgtacccttttaattaattgttacagttcctaggagggtgtccatgttaacaattttctcgttgttgcaggtttagatgactcattcaagttttggagggctccatctaggacaagtcaggatcgagatccaagttctctctccacctcagaaacaacggtacttgcaaagaatgcataagtcctttattttgaatctctgaaaaaatttgagtttgcctagtgggagagttaagaatacaaagtgtaaggttataacagctatgatttattcgaagtgctttctgcagaattttgctaaattattgtattcaagctgcacatcagtcatacattatagatacttatcttgcttttctgtgtgcgcaagccactctgaagtaaagtaactttgtgatcattagtgctataggtagcagaactggagtttgaaccagggtgtgtcttgctacggtatagctacactgaatatccctttagttgagaattttcaacctctctttcctaccttttttgatagtacgaaagtgtgaaaatatgtttttcgttagtattagaagagaacaaatcctacatgttaaaaatggttgattaccctgaaattgtgcttaagggcagggcaatatgaagaacattcaaatgattctagtgtggtgctgacagctttaaacacacttctaaatacttgcatcacatagaagtttatctggaatacctgaaatttatatatgcctgtttgcatgccttctttccttcccctttcattcatgcattagttgctttttttgcagaaaagtttgaaacactgagtatttataaggaatgattgatactaggtttcagttatttacaaacatacagaatcatttattctcaactgggaaatgttacttttaattttaaagtgtttttgaaataattagtgtattatacaacatatcaggaagggaaagatttgatacacctgtttccaggaacaaaaataatatgagaataataattatacagacattataatgtaaagattatgtttaatctatctcctagtttctcaaaagactgatactttttgctacagttttaagtctttttttccctagattcaagagaagtatttgtgtttagtgctacattggacctttgtatggaaaagtaagataattacccgagttccactagatgtcatgctttcctttccaaggtggagatagtgtgtacctttgtctcaacaagagcagtaatatgataaatgccaaactgaattgtcttaattggttatttagttcacagaaggacagcatgaaagtgtgcttaaaagtaaattttgtttgttagcctatttgtcaaaagggctatagactagccttgaaatctttgtacatatttcagtttttttgcttttagtaggtactcagtaaataataattgctctaattaactttgagttatcttagctattttgtggtgagcactgaagtcatatttatcctatacaagaaaacctaaatacaaaaagcaaaagcatatcaaccttttgaatttctctattttgtaataacatttaatcttacaggttagaatactagattttctgagaaaatttggaaatatgttattaattgtagtcattattaaagaaagaagcaccccaattaaagtgaaggtctttaacttgtttgtgtttgaatgtaacacagacttttagaaatatataccaatggaatcttttcagtttttttaaaagaattttgtaatatgtgtaaaatttatttcttattattttctctaaaggctagtgtattctgttagaatttttacagaatttactttttactttctttttcgggaggtttccaaacaacttttagaatgggtgacttttagttacaaaaatagtcttcgtaccctaattctactagttatattttctttaccatacccaagatgatgtgtatctttgtcccaacaggagaaaaatctggagagtgttttcattctgccagtgttactttaaaccaaagctgtcagtacttcgaccaaggcatactttcttatgtataaaaaaatgttgaagttacaaattgaggtataagttgagtggatgtaaatcttattaatcagcttatctgcttatttatatctttgttttgtttatctcagaattgagaaaaaatgcaatcctttattggttagttggctggtttttccattttatctttccaaggaaagcatcatcttttgatttgggtcatgtcatccagcatgctctcctgggttactatccattttgtgctgttaatgccaagttagggactttcatgctgttacctaatgtgtattagttccgttgtttggcaagcttcgtaaggattgttgggtcctgtatgtttgataaactgcagatagagtaagcagagtgtcattgttagctttggggcatcgcccttgtaaatgcttcctcaggagtggcctctatcgaactcaatattctcctcctctggggtaggaggatgcagccattaggtggtgtttttcttctcgaaatcacgtttatatccaagatggatagctgtttgtgcctcttacacacctgtgtgcagcaacagctttatgaccaaaatttggtctcttctgttgttcctgagcagaactatgtctgtatttttttaaatttatcaattgtcaaaataaaatatgtgggaaatataattcctttctttttgagcctttctttgtgaaatatgtgatctttcaaacttttttctggaacacagatttaaagaaaactgattttagtttttctaaacatttaaagagaatttttacacttcatagtcttaaaacaactgaaaagcattgttactattttgcaaaagaggaaattagggcatggagtgaggtcccactccatggagtgcatgcttgttcaagttcctagcatggtaactggtagaccattcttttgagtccagaagtatgtttgcttcctccttcactctaaggccagatgtgattgatcccataaaagatggtgtagtcaagggacagtgaggtttctttagagggaaagatgaaatgaaaagtggttttgtgtaggaagtggccactgaaatgggctttacaatattatccccttctcttttatatgcatacaaacatttgcaagggactgaaaagattcaaatattccttaggattcagtgaccacttaacaaatgacaaaagtctacttgagaacataaagcatacttagactttctaactaaatatgaagttgtgttgtactgaaggcattaacattcagaaaatgcaagaggttgtttggagtagaatgtgggacggaaagctaaagtttgatgacctgactaatcagataggagttagttaagaaagctgaatcagcttttggatttgaagaggtaagatataagagctataaagataaagatgtaaggatatttcagcagcatggaatggcatgaaacattacaactgatatgagagaaataacgtattgacactcatttgatggtagttaaaattgttttatagaaggaagagtagacagaggatagtttaagcagggatggatccaagaggctttctaaaagaaaaatagttttgacataggcatcactgataggacatacaaatacctccagcatggtgaccccaggaaaacttgaggaggtggtagtttgtgtgatgatggagagagaaagaaaatgttatactctgtttaaataaatttcagctacctgtggattatccagagtctaacaacctcttatatttagttaggaggaaaatacaagtgagacaagctcttggaaatttgtgctcttagattacacacaggatggcacaggaactgtgactgtgttgtggtgatgatctgtctctttaagtggtcctttggttagacatgcaagaatcgtctatcatcttctgctcattccttcagaggacttttctgagctttcttttttttacatatattgtacataatccatttgaattatgaatctattagttgaaataatttaaacttcttgttataatttggttagaattaatgattacaaattgagaagcatgccaaagctttcctgctcctgggcatatagagaaaggtattatttattaaaatgaacacatgaagcttagaatctcttagaaacccttcatatcttatatttttccatgttttcaaaatgtggctagacttgtactttatttttttcacactacaatccttattttctccctttgtacctttttaaaaacaattaaataaacttttttggcaccagtactgcttttgagggaagttgatggaactattacaagatcattttggcaaatacaatattcaagttctgaattaactttcaaaaaaagttaaagtgtctagtgaaatcacttgcttctgtaaggcagatacaaagaaaatcatttttgtacattgatgcatttttgcttatatgacagaaattgttttttacattccagttctacttggatatggcaaatgactctgctattttcagtgatttcaaagggactttcttaattttagctgcttattttacactgaagcataatttagaaaccttctttagttaccaaatctgcttacaaacacactgaagaacaatttttttcagtttttataagcaagatttgagtccattttatttttttattttcccctagttttgagctaaaatgacaaataaaattgtatatatttgagatatacagtgagattacttgacatatgtatatgtgatgaaatgattaccacagtcaaattagttaacacatctgtcacctaagagtcaaccttttttttttgtggtgagaacacttaagaactactctctttcaagtagactgtgcagtgttattaaccatattaaccatattcaccatgctacacattagaccatattaaccatattcaccatgctacacattagatccccagaacatactcatcttatctgaaagtttgcactctttgaccaaacatctccccttttccccagctcctatcccctagcaacatccattacactaatctgagtctgttttaggacagtacctttaagtagcatcagcctgctctaaaaagcttgtattgtcttttgtaatatctgtaaagtaataaggctagaaatatattcaaattcagatttttttgtcttaccgagggattataaattgaagatctcaggatatgtcatgtggcagatgtgaaagcgagggaaaagtctagattgtgattttgcacttagaccattctaatgaattgagcaagtgatagatacaagaattagactctcgctgttgtaagaggacaaccctagttatcctacttactgtgaggtacagagcagagcagcgagaagcttgacaggaacggatgacttcagcagactaagtttgctcttaaactaagccaattcctcctccttcacctgggatggggcagctgaagttagtctagctgaagttccgcggggacacagggggatcagggagaaagaagcaagcctctcctcgcaaacaaggccagccagctttctcaagaggtacgtctgaggacttcctctgattctaacgaatttatgctgtcatgaatgcagttctggactgagaatcctagtctcaactcagacaaatcccttaacttgtggtccttttctctaaatgaggacgtggactaggtcaggctttttgtacctatagcttcgtaggctcatactgcaccttccagtagctaatacttaatgccaaaattgtctagttattacttggattttaaggtgaaaagtaacatgtttacatatcgatgtactttatcaaatgtaaccaaatactatcgattggagattatatctaaacaagcaaagatttgagcatagaactgggacaatttgctttaatacttttttgcttttagttattaaaatagcaatatattagtttagcacacttaaaaaatagaggctagtagaaatataaatcatccataatcaattttaaagcaccatataaagcaatcattgtgtttccccaaccacatggggtaagttataatacaataaggtactttctaaaagcatcttttctaaacttgtgtatcccttctgtggactatactaaggaaaatcacatctttattaatgcctgacctttgtcatgaatcacaactttgctttcttctaatgagccaggtatttagtgggcccttataagctttcttttcccacaccgatcgttgaaaccgcaaaccaggtacctattctatttatatcagtaataaggccttcttgagtctttatcagttgaaagaatgttcagtgaaatgataaaggatttcagcatcattatccccttaacttttcttatacaaccaaaagagttgtggcaggagccagatatattagcttgtgcatagtttgtgatatcagtcttggcataggattattttcttcacagaactataaatgttgtcttgatatctgttgacaggaacattttttcacatatctctcattgccaaattgtaggcaaatatatttttaaaaataaacaagcttgctgggcgcggtggctcacgcctgtaatcccagcactttgggaggcagaggcgggcggatcacgaggtcaggagatcgagaccatcctggctaacacagtgaaaccctgcctctactaaaaatacaaaaaattagccgggcgtggtggcgggcgcctgtagtcccagctactcgggaggctgaggcaggagaatggcgtgaacccgggaggcggagcttgcagtgagccgagatcgtgccactgcactccagcctgggcaacagagtgagactccgtctcaaaaaaaaaaaaaataaacaagctttaggttatttttacttagtatctggatctaatactatataaaataaggcatttgatgtttgtttatgattgacttatttagactgaacttttttccagatttactttttagattatgtgcttagcctacattttttagctgcagctttctcacttatttcttggcatcatgactgttatacttacttaatgtggtgaaagatggttaagggctcaagttaaaagggggatttaaaaaactgtatattccatttttagtaatttcttcaaatttatattctctttactattagaaactgcaaatgaaaataaccttagtttttgctttcatttcatcatggtaattctaaggtactctaagtgttaagatatatacacaatcaatgtacaaatactgtgagctatataggatctgagtctggaatgatggtttataacttctatggatagctaatgttgtgttgcatgtactgatatggaggctacccaggtatgggcacttcatgttacttcacagaagagaaattgatggtaaggaaaagagttatctgacctcaccacataagtgtttttcaactaagaggtgcttagttgaacacctcttagcgcaaacacatcactttgcgctttttcagtcttagaaggtcggtctgctcattataaacctgtaggtgaaattgtacttgctttccacggattttgttatatttaatgttgtattctgaagcaatctcagcaaactggcacaattttttagtgttcttccttgataggaggtgaggtagagaaaaatcttttaatacttctaattttttaggcactattaaaatttatatgtgccatttggaacattaaaaatatctttattgtcaatcaagaaatgcaaaatatcacaataaattatagttaaggtggtatattttagcctttctaacatttgggcaatgagggaattggccttatgggaaccttaaactcctaaatgggcctgaagtcaatactgctcctttgagttactgatttatgtaaatgataacaattcctttaagaagtggaaatgccatttaaaaaaactgctgtaactcccaagatatggaatcttttctagttatcctaactagtataattttgtcttaaacctccttgtttaaggatatcttgtgtgtatgttgcctgtgtttcattttccgtactgtaacattaataagtaaaataatttactgattcataggtggcaccttcattggggagtactgaatttcagccacttgtgcagtcaacaacacttctacctgaagcctcccatgaccagtttgtggctcaaggtatccttttagtgaagacattctaccttcaaaaagaaaaatgacaagttggtccagacagatattttgaaagtaaatgtctaaagaacaaaattttaatgaaataagttgtagaccattatgaaatacatttagaaccaatatatcagaaattaataaaataaatgctcttaactaataaatggaatttggctcttaaataaatagtccaattcctgtgtggctccttattaggcgctcgtaggtatttgacatttgaatttgggaactgatgggtataacttaactttattttttcccttcttttgagaaaacactttgctacaagtaatccacttgaaagtaaagcgattctggttttaagtattttctaaggctatgcttccatttaaaggcacataaaatgtattgagtctttattttattagaaatgcacaatatacaacttgggacttatttttattaatggcaatatataaattttgctccttgtgctgggaactgcttccaaccctgctgtgcttcaaatttgcaactttgctttttttttttttttttaaattctagagagtatataagccttattcagtagcattaaatttttgacttgaaaggactatactatctaaaaagaaagtaattttaaacactggcatacatataagtatatgcagaaaaaatactttctgaaacatttagaaaaacttgctgaattaaaactttgaactttcattacaatatttgttccaataatttcctaaacagtgttccatattggtttttagtaattcatgttcactatatataaaattatttaactgtagaaaatactcatttgatcttcttaagaacaaaaggagcaaactcagattatttaaatggctcaggacatagggcatgaaatgaaattcgatcatgaatttcatgaacatttatctctaaaagcatgttgccttactctgatttttaacatctttattgagatataattcacataccatataattcacttgtttaaagtgtatactttattggttttaagtatattcagagttgtgcaaccgtcaccacgatcaattttaggatatttccatcatcttgcaaaaaaaccctatacccattagcagtcactccctgtctcccccattcttggcactctacggaatcactaatctactttccttctttatagatttgcccgttttggacattttgtatgaatggaatcatataacatggtcttgtgtgactggcttctttcacttagtgtgctgttttcaaggttcatccatgttctagcatgtatcagaacttcatttatttattgacaaataatattccactgtatgaatatattacagttacccattcatcacgtgatataggcatttgtgtggatatacaggctttctgttttttgtttggattacctttgattttaaatttattttattttcaagtattaacgctttttttttttttttttttttttggaggcagtctcactctgttgcccaggctggagtgcagtggcgcaatcttggctcagtgcagcctctgcctcctgggttcaggagattcttctgcctcagcctcctgagtagctgggattacagaggtgtgccggtacacctgcctaatttttgtatttttagtagagcttgggtttcatcatgttgcccaggctggtctctaacccctgacctcagatgatccacctgccttggcctcccaaagtgctgggattacagacatgagccaccatgcccgtccacaaatagtatgctttcaatgtatatttatgcaattttactctttgccaatcatttcagcacatatatatgaccaaaaaaaaaaaaaaaagcatataaaagaaagaatacccacagaaaggggaggcatgaacagaggatgaatcctcacaattttttggtgatatatgacactatcaggtatattccttttttttcaaaacttggaaataagagatcagggtgtcaaatgtcctccttagttttacaaaataaattagcaagaaaattgaaaaaatatgtatcaatttatattctgaactagctctctttacagaaaaattcaaaaaaggtttctatatatgcttgctctagaagtgctgaagatatgtaatacatattttatgaatactgaaagatttcccttgaaattgtttggacaattttcattagaattatctcaatttaattttttccatttttatttccaaagatttatcattattttttaagagacagggtctagctctgtcacccaggctggagtgcagtggcatggtcatagctcattgtagtctcgaacacctggactcaagtaatcctcctgtctcagtttcccaagtggctgggattacaggcgtaatatttgaggggaaaagaacacaaactctcatgtaaaaatgagcagaaaacatgaaaagataattcacaaaggacctaaaagtagcctttatctttggaaaaatattatacaaattaatactacccgaagatacttttttatttattaaattgccaacaattaagtattggcagtacattcttttggcgaggctgtggaaaataagcactttcatacattgttagagaaaatgcaaattagtataattttggaagggaatttggcaatagataacaaaactatgtatttacctttgattaaacaattccacttctaggaattctcttttatttatctccagcaatataaaaatacatatgtacttgataatttagcaagcattgtttgtaattataaaacatggaaacaacacaaatgcctgtaagtagaaggatagtttttgatagatatataacaatatatagataatgataaacatataacaaaattacttataaataaaatttatttttaaaataacaatggagaactacagctattagaaagagggggctgggcacagcagctcacaccaataatcctagaacttttggaggctgaggtgggagatacttttcacgatagtgagactgtatctctacaaaatataaaataaattagccaggcatggtggcacacacctgtggtctcagctactcaggaggctgaggtgggaggagcacttgagcccaggctttgaggcttcagtgagccatgattgcaccagactccagcctgggcaacagtgagaccatttctccaaaaacgaaaaaaaaaaaaaaaaaaagaggggaggatatcttcaaacagatatggaccaaattttaggaaatattgtcaagtgaagaaagaagcacaatgataaagagtatttatagtttatgatatttacagttttctacttttgcatatgaaagaaggggaaatttaaaatacgtgtatctatttgtgtagaaagaaaacaggaaggaacagctggaaatgaatgagattaattatgagaatgggtgggagttagttaggaaataagagaggatgggaacagtgtagaagagattgaggggtgggatagtgacccttctctgcatgtatcttcttgtataggttgacttttataaccatgtatgttttacttgctgaaaaaaataaaatcaacaaaaatgggaaacaataacatggaatacaaaccaattaatccagctacatttcacatgaatagcattgaagtgagagaggaagtaaccccagtaactctcagacatatttttaggactttagtcctcagactattggcaaaatgaactgtaaccaagcattgaactctagttactagttttattttttgcagtattattagttagaaattctgaaactacttattgtgttcataaggcaaggcaaataagtaaatatattgtagacaatgaaagccagaatttttactttcacataacggaaattacaaatatggaagggaaggaagatgtttaatgttggattatatttggagtgttggattatatttggagctttcagtatgaatcaattattttgttttttaagagatgaggtctcattctgtcatccaggctggaggacagtgctgtgatcatagttcactgcagttgccacctcctgggctcaagcgatcctcccacctcatcccgagtagccaggattaaaggaatgtgccgccatgcctggttcatttttaaatctttttgtagagataggtttctgtatgttgctcaggctgatcttgaactccttgcctaaagtgatcctcctaccccagcctcacaaaattctggaattacaggcaaattaatgatttttaattcgtagataaaatatgtttatgtgcccaggggtatgtatgtgcatgcatacgtatatacacacacgttttctagcttagaaacaatgacactctaaatagcaatgtatacatttagtgcccaaatcttgctttccaaactccattctccactttagggaatcgacactttggaacaaatatccaattttagagcttggacgaggaaagaacaagatgaacctggaacatcttgctgtgccagaaagtaagggaatgctcaaaggttaatggaggtgttcactaatgtagggtgcaggtaccttattactgttctaaagtctaaaagtattttggagaaaagggagctctcatacagtgttgttgggaaccactgtggagaacagtatgcaggttcctcaaaaactaaaaatagaacctaccctctgatccagcaatccagctgctgagtatatatctaaaagaaaaaaaaagtatatcgacgagatagctgcactcccatgttgattgcaacgccattcgtgatagccaagatagggaatcagtctaagttccgtcagcaaatgaatggataaagaaaatgaaccatatatgtacacaatgaaatattactcagagaaaagaatgaagtcctgtcatttgcagcaacatggatggaactggaggccattgtgttaaatgaaataagccaggcacagaaagacaaatattgcaactcatatttgggaactaaaaaaaaaaaaagttgaactcatgaaaatagagagtagaatgagggttaccagaggctaaagagtggagagccagagataaagaagggatggttagtgggtacaaaatacagttaggaggaataagatctagtgttcagtagcacaacagggtaactatagttaacaataatttattgtatagttcaaaataactaaaagaatggagttggaatgttcccaacacaaagaaatggtaaatgtttgaggtgatggatgtcccagttaccttgatttgagcattgcacatagtatgcctgtatcaaaatatcatgtgtaccccataaatatgtacaatgattatatatccataattaaaaatttaaaaataataaaaatagtaagattttactctgaagaaaacctaaagattatttgaatttggacacacctttggcccctcgagtttcagaaaaaggattgtaaatcatctttttgttctcagtgtctgaatacgtggggcatgaagtcatgttctgccctttctgacctgtctcttctgcatacgacaatgtccgtgtgtacacatctacacatctacatccacacatggtggaaggtggaggtcaggagtagtaggggtagcctgacccctaacctcaaggttaagatgagccaagaagctaaggcaattccccaactatacattatcattttcaggaactttcctatgattataagaacttttgagtattgtacatagctgtaaggtaaataataattcttatgtttattttcaataataggtcaccaggaaagtacatcaccacggccacctcatgattcatctctttctgctcccctgcccaaactgtgtgtttttgttactccatctcttctttcagcaatgtgcagcctcttggacaacctcttgacgattgctcccagagacactgcaaaggcttttcgacaagctcatctcatagaacttctctgtaggtaagagataaatactcctagagaggcatgttagttgagataaatttacacaaactgtattcatgacttgatacaagatttcttgtgacctggaaatacagctttattcttttttaggctcattgaactctaggattttgcttttgccagaattgtcttggtggtttttattttacatctattaaagcacttgtattagtttgttatcttgactattaaggccaaagaaaaactcctgctttctaaaattcatggattctaaaccttatttatcctccagcacacttaaggaatatggtgctatcccctgttcttaatggatgtgagggactttgggaattcatctttttagtggtcatatcagaataatgtccctgggttgaaaaattattggttaaattcatttggagttattttgttaagggaaattaaacttttcatcaaaaagtattctgataaaatttagggaaattaaattcaaagaaaaattatttgaatttttattacttatttgatattaatcagtctgtaacataatttttctgaatttctaggaaggtatagtagaaaaggactagatattgaattcaggttgacctaaggtctaattatagttcattcactcagtagcttgcagccttgggaaattactccctactgtgtcattaacacctatttaatggggttagtgtgagaattaaaagtgatggtatctaggatacccccttaagtattacttctcttttcttctggtgttcagtttattctagccaaccatacccacctccttttgaccacatgtttatttgcatttctctgtctctctgtccctttacctttgaacatacaccatctgaaatgtcttgcatcttcttgccaaatcatagtgtcttctctttctttctgggatattaagaaaactctagaaaatataaactctaaaagaagtattccttgtttcacctcattcaattgtaattattcctttaacatgtatgatacgcaatggagtatgagtttgttctggctttaatatttattgatcatttttttactgtacctactcggattggaaaagtaactgctagtcagttggctttccttcctggatgctcctgcctgaagatgaccaaaatagagctctagggataggatcttctttgcttcttacgagtcagctaagagtctgatgtggcattgaggccacaggggcattaaaagaccttttatggcaaaggcttatcatatttccgtacctgtttttcatttttgactttaaaaaaatcctacttgttttactttatttttatttttttatttttatttattttgagacggagtttcactcttattgcccaggctggaatgcagtggcgcgatctcggctcactgcaacctccgcctcctgggttcaagcgattctcctgtctcaacctcctgagtagctgggattacaggcatctgccactacacccagctaatttttggtacctttagtagagacggggtttcaccatgttcaccaggctggtcttgaactcctgaccccaggtgatccacccaccttggcctcccaaagtgctgggattacaggcgtgagccaccgcacccggcctgttttactttattttgttttttactttctaaatatgaacagtgttcttgctattttagccagtatttttgctattttattaggaaaataaccaccaagtttcctgttactcatgggctgtattatattttattctgcttttaattaggtttccttagatattttcttcacagctctttgcttctcacttttctctgacaagatattttcctgtttgaaggtaacccaggatacaatttgaaattctttgagatatctttttataaacattttctttgcttataaagatcctttctcttgaattgtattcgagttacctttaaacttcaaattctgatttcttaatctttaataaaaagtatactaatcttctgaaggattttctttttctgatcgtcacagcattgcagatgctaccctcatacagacatgtgtccaggaactcagagccctgctgccttcatcacctccagctgaacacactcaggctcaggtaagcatctcaagtctgtttgtgggtttgtttacgttaggtgtcaaaaataaaaatcttgctgaggagatactagtcataggaaaaggatgaaaacctctcaaaatatacatggtatgatgagattattcgaaatacgttacttgaaattttaatatgggacatgtctggatgttagaaaagagaggtggggtttgaagacctagattctattcttgactccatcattaaccagctttaaatgtatgatcaagtgtctggatatcttggagcaccactttaataataaagagggacattggtatagttcacttcctgcttctgtgattttaggctatctctgttatttacaccaaagttaaagttgttaaaatatttggtggctaagttatgtgtattttcaaaacccaatttgataaaaatgatttattcttgttccttcacagatatttagttttaaattcttgcctatagctagaatctatttataaaacatgcttaacaattattcatgtagctgttgctaacagaaattttatttcaaaatcaaattttaagaagggctacaagatttatttaggaggtgatgaattaaaggtgaagtagaccaatatctcttgctttgagatgtgttctttgagctgaataagacagaccccattacaaagtttgggaatgctacacgcatggtctttgaagctgttgtcctggtgcagtgttttcacctgagcatgcctattgcataatgactgtctcctccatttttctgctctccatccagcaaatctttgttgagtacttgctgtgtgcctgaatcttctccaagtgaataaaacaaagacccttccctcaagttgggagaatagataattagaaaatccatatatgcctgaagatgatagacatctcagaagaaaaactaaagcaggggacaggaagtgatgtcagagttggaagggtagggctattccacttaggatgattaggcagtgtcgtgggacccaaagttagtgaagaagctagtcctatggtcattgcaagacccctgaggttggggtatgcttggcctatccaagaaacagcaaggagggtggagtcgctggagcagaatctatgagggcaagatgaggccagaggggcacagtcagctccatgaagtcaggaccttgctggctgttatgttccattgtgttctgagtgtctggcatagggcttgtctcatgacaggtgctcacttgatacttgtgggatgaatgaataatagcagtagcaaacatttatgggcatttgtttttgttaattcatgtaatcttcacaagaatcatgaagttatcattaatgtcattttataaaggaaatgcctgaggcccagagagatgagtgacttgtccaaggtctctgacatagattccaacctatgcaggtcagttccagggcccacattcttaaccactgcaccagctggccttatgtagattaaatgcttctgggctcttggtatttatataagatcattcactcatttcagaaaattcttgagcctctgctttaccagattctgttctaggtgctagtgatatatccttgaacaaagcagatgagcatctctcctcacgtagagtctgtgccataaatgcaggagacagacagtgaacaagtaaataaaatgcattgtatcagatagtcacaaatggtatggaaaaaagcaattgaggatgggtaaaagggtgtgtcagaaaggggaggggcctcctgaaggtgacacttaagcagaaagctggggaggtgagggagcaggctgcgagtgcctgcggcagatggggtggccagagccctgctggtggggtgatactctgctaaaggtatgatggattaaagtctgtggtcagttggttggtatttttttttaagagggccatacatagaaaaagagttactttatcaactactcttaagatatgaatattttatttaatcttgaatgtgatcatatacaaaagaatctttagcaattcagcgttttctctataacacttcttcttgcctcacctggcatggtttatctatttatggtaatatttcatacatccagaggtcagacttgctataatttcagtagtgtagagtatgaatgtaatatgaagtctcaagacttcacggcagtaaacaaattaaatttcacaaactgaagagtttgtgaagcctggagccacctacacttttatataaagtaagttggcagattagataaagggaggacgtattcatcaggagaagtagggcagaactatttgtaaatagtctgagaccattgacctcagagacacatactccacaaatttacaacaggctctcgactcttcattacactcttacaaccccagaataaggtgagaggaaaaaaagtgtgtgtgtgtgtgtgtatgtgtgtgtgtgtacagagagagagaatgactgatttcagaatatctttataaaattcacttatatgtaactggctcattgcttgagggtagtggacaaatgagacatcacagctcattctttaattgttacatattcagaggattatttttctgaaaagtacttttgccagttaatacttaacaatattagcatcaggcaaattccagagatggttttgttggtaatattgaagatgatttaattttttcttttataattaataatagtaattttatgctgagggcaaaaatagaacatatttgcattttatttgtagcaataactaggctagcttccccccacccctgcttatgcactttgaagggtgtttttgtaatctttctttctttacaaaattatagactttatggctttgttatacacttttccacttcttccataatattgatttcataatttgactacttgaaaaatatgggacttttttttttcttttgaaacagggttttactctgtcacccaggctggagttcagtggtgtgatcacagctcactatagcctctaccttctgggcttaagtggtcctcccatctcagcctcccaagtagctgggactgcaggcccggctaatttttatattttttgtggaaacaggatctcaccgtattgcccaggctggtctcaaactcctgggctcaagccatctgcccaccttggcctctcaaaggactggcattacaggtgtgttagctaccacacctggccaagactttacttctttaaatggaattcaaaacttgactttgaaaacattgctttgtttggtgtatagttgacagtattaatatggctgttaatgacatgcttatgagaaaaataatgctttgtctgctatgtgttaatttcagatcttgaaaaattatggttaatattttattttttattgtgttacaaaagtaaaatgctgtatcactgagatgggctttttatatggcatgtttgatttgaccctgtctccttttcaaacaggtttcctttctcctggaatacctatcctctttgtccaggcttctgcagtcatgtttattggtggagcctgaccttgtgattcaggatgagcttgtgaaacctcttatcaccaatatcattggaattctcaccatatgtaccaaagatgtattaggtaagcttaattgttttagtttagaatgtaagtgaataatactgaggaaaaaaaacttactctgtttcagatattcacttgaaggttactttttgagtttctttttgctagtattttggaaggctttgataatgtgttttatagtttggatgccttttaatggtaccaattaagacaagtgtgtagtataataaaggactacccttgagttttcagtttaaatgagggcaaagctctctgtgtgatgttagaaagtacagtgagttctgggtattaactattcttataaactatggctaaggccaaaagcttaataaaacattcccaataacaagtataagccaatctagaatatatcacaaatttcctaaggtcctaaattattgaaatgtatatatattttgtgatctaatgttatctccaggggaaaatattctatgatgaaaagttgaatgtaatgcttagtggagaaaattaaagcaaagtaggatctttgtcaaaatctaatataattgttttgaaaatgaaaacaatcatttataatgaagtaattgaccatttggtaattctctttgcctttcagttttatttgaactatggatttacttggttttaggtctggaaaatgaagtgtgttatgatacccagcaaagccagttctcagcatctcatcagtgttaaaatgatctcgatgttaaaggaatagtaattccttagaaattcaacaagtggcagtgataccctaactaagcttattaggttagactggacaagctcaacaaggtgatatcacccccagtctctaaggagtgaacattgattctggggagaagagggtgaggcaaaaacatcttagaaattaaaatagtttgtaggcttccaaagctcaactctacctgagacaatcttattactatttctcttcctggtttttcttgagaattccttgagaagcattgacgttgagttcatggaagatacacaagatgtatgcaagactagtgccacaaaactgtggtgaatagatgacagcagctggaggacctttggttgattgtttgatcccaaggtcatatagcaaaaggtggtctgtgtatcttggctgctattggctgccttgtgaatgctttttattgatcctcttgcttttctgtatgatttgagctttgaaaattaattgaaagtagtatatatttaattacataaaagttgtttaacccatcattaattatatcaagcgctgaaaggaaaaaatgtcaatatctgaatgtatatctattagctggttaaattaaaaattgttttctcatatctagcaaaaagttttaaaagttcactaagaatatttttaaagaagtttttaaaatttttttctgaaaaaaataagttttaaatgattttataagaatttattatattgctgttgtttttatatgaattgctaatttatgtatgtaaattgacacattgtgatgatatatatatataagtaaataaattacatgaaaagttattcagcaagtataggtgcaaagctaaatttggtattaataggtctttaatttttaatttaattttcagcttaaatgttttattcggctcttcttaagcctgtattgaataaaaacagtaagctctatacttagcctttttatgtacaaagtacagatatacatatagtacataaagagatatacagtatatgtgtggaattaaaatcttgtggggatggcaatgaggaaacattttctgaaataaactctttagagagccactaatgacaaaagggttgagaaacaccaaggattgccctggggaaggtgcagttttcaagtatctcataggtgctgaagtacacctagatggatctcctcggggttaacgtcctataaagtttacattatagtggaattagataaaagatgacagatccccctgaaggcatggtcagagagagtcctcagcgactgctctccagcttccatttacctgagtggagagaagggaaaatgggtcctcatcctagaattgctacatccttagccataggaaaagctgcagaatcttcttttgcgtcatacttttctttgtgggatgatacttttcttggttcttcaaagaaattctttcttttctaccttgaccttggcacactgtgctttcctttcacccctgcccaaagctgctggaggggataaaggaaataggggaaaacttactctgacaaaagtagcacaaacaatgacatatttttataatgtgccaatatgtagttctgcagtcatggcttaatatttagtttgtcacaccttctgattgttcttgagtatgctttaataagaggagagtttgtgagtgtggctttatatgcaggagggtggaggggagatatcttaagaagcaatggaaaagaagttaattgaaataaattttggataatgctgaattagatttgtcttcatttgataagtgcacacccctcattttaagtgtaatgaagcgtctgtggtaagttttatatcttgaaaggttcttttccttctttgtgttaataacttgaagtgttttgattaattttatagataaagagttaatatcagctttttatcacacatggacacatttatttaatcttctggccatgctcctgaggaaagctggtgccatcacactcccgtttgttaccgtggccctggccaagcactggacagcggcgattggtaagaagatacttgcataatcttgggggctttctgctaataaaacgagataatgattctgcctgtttaggtatgtaaattcactaaagttaagtaattatagcatggcatataaaagaggtatcagggtgcttgctttgaaaaatttgcagtgttcttgagccccccaaaaatgcatttttgaaaaattgaaacacattttgagataacataaaagcgagttaggaaagcctgtggttttattattttttaagctttttaaagatgtcatccctgaagctctgttttattgagaacattatattggccactgttggtttttttaaattttactttaagttctgggatacatgtgcagaacgtgcaggttttttacataggaatacatgtgccatggtggtttgctgcacctatcaaccgatcatctaggttttaagccccacatgcattaggtatttgtcctaatgctctccctccccttgcttctcatcccccgacacggtgtgtgatgttccctaccctgtgtccatgtgttctcattgttcatctctcacttgtgaatgagaacacacagtgtttggttttctgttcctgtgttagtttgctgagaatgatggcttccagcttcatccgtgtacctgaaaggacatgaactcattctttttttatggctgcataatgttccatggtgtatatgtgctgcattttctttatccactgtgtcattgatgggcattgggttggttccaagtctttgctattgtgaacagtgccacagtaaacatatgtgtgcatttgtctttacagtaggatgatttataaaactttaggtatatacccagtaatgggattgttgggtcaaatggtatttctggttctagatgcttgaggaattgccacactgtcttccacaatggttaaactaacttatactcccaccagcagtgtaaaagtgttcccattttctccacatcctcgccagcatctgttgtttcctgacttttgaataatcaccattctaactggcctgagatggtatctcattgtggttttgatttgcatttctctaatgaccagtgatgatgggttttttttcatgtttgtcggccgcataaatgtcatcttttgagaagtgtctgttcgtatccttcgcccactttttgatgcggttgtttgtttttttcttgtaaatttgtttaagttccttgtagattctggatgttagacctttgtcagatggatagattacaaaaattttctcccattgtgtaggttgcctgttcactctgatgatagtttgttttgctatgcagacgctctttagtttagatcccatttgtcagttgtaagcctgtggttttataaaggtacatatgatatgattataaaacaatgagataaattttactgtgttggtatagaaaccagtatcctttctgacatatgtacattgtatgtggatacatcttcatatataaaatctggtatacatgataacatggaaagttaggatacaaataactttctcatcacatcagaattttcttatagtacagaaatgccaagagtatagtataattatttttatgtttttcatgatagttgcccactaaaataaacatgattattttaaaataactaatctttaatttttcatgaagcctcctaaattttagcatagaaaaaagctgttttttaacataaatattcataactgacatttatgtaacctttttaaacaacctacttaaatgtactcaaaattgagttattttaagcttccaaagtacctgctaattcaactgaccgattttttttaacatttattttatcatttgatcattcagtaaacttaaatgcatgatacaatttttaaccaaagcgatagtaagaattatggcaaatgcatgtttaacaaggaacagaattgttaattttctggatgtaggagttctgagtctaccatggagtacagtgtccacgtaggatatcattattttgtttaaaatataataattgaaagagattgactgattaagacattgggattttcttcttgtatttattgggggaaaattagtttatcacctgaatcaccaataatatcaatagaaagcatgatgctacccacattagataaatctggcctgcagcttgttttggtaaataaagttttattggaacatagccacactcacttacatattgcatatggctgctttcatgctacaaaagttgaggtgaatagttgtgaaaaagccagttacctgcagagtataaaatacttactacttggacctttacagaaaaagtttgctgacctctgacttaaacttatttatctaacactatttctttagtgataaaataaatacatattaaattcaaaaccttccttcaaaatatgtgtacagttttatgtaataatagtactaatcaaaagtaacttactgcataaatggttttcataatagtaatgttaatgaaaacattaataacaattatcattttttttgccatggttttatttttgtttatttttatttttttaaatcaattgccatctcatatgcccatatacatttaaaacatgtcgtggtcactccgtaacttgtgttatctataagagtcttttctcgaacttgactaatatttggacatcatttaaatgaacataattctcatgaaaccctactgctgactactttatttttcttatgtaactttaatttgtacaagccaaaatctaagtaaaaatttttatggttataattatcacacaagcataaatctaaaatataaaatcaaacaaaattataaatccaatttttcaagtttataaaatgtaaaacaacacatgtaattttgattaaacaaaatcagttctcacaacaggaaattaataatgactgtttcagtgtaaattcctttcagtttggtctgttctttccactctgtattaagtttgtgaatcagttcatgaccactcatgtgctgtctgaactgctatgaaatatttgtttgtacattgtgccaacactgcatactaagtcttgcttttaagttctggttggcaccagctcctttaacagttgcaacacaatcacacaagttggtaatctagatgatccagagtatagttactttaaaatcaacttgatttcctttttgttgaattttgaagaaattttcaaacattcacatctgaaattattcctttagatatgttctgcacatgtgcaggcttgtctgccacgtgtcctgccctgtatactgccagcttgcaattcctttctgttctcttgaccgaagaagcaaaagggcatctccaggctaagagcaaaacacatttatgctgtagtccaacagtggcttcacttcttgatgactctcaggaaaatcagaaatctctagaacaacttagtgatgtaatccttcaggtacgtcatttcttggtttttcaaaaactttatttagcgtttaaataaattgactttcagtcatggtcttgttaaaaactgtctcagtcatttaaattaagaaatagtaatgcttattatgactgtttaaatgatacaaaagtttataaagttaaattaactatctcctccttagccccacccgcttatgttgaccagtttcttcagtgaatatgatgtaaagatttgaagtgaaatattactaatctaaatctaacagttgatcaaaacagtgtttcatatcatgaccaaaatggatatatttcagaaatgcagttatggttcaaaatttattgtaattttaaagatatatctacgtctctgaaaatatattctaagtgacatttgatttctagaaatggaccacagatttttggggttggttacatgtataggtaagtggacttgtctggcacatttggaagaaaatgccccctttccaagccctgttgcctgttttatcttataaaattatgtttacagtctaaaatgtgaatcaagaattttgttaatcagaaaacattctaaaatcactaaagtattattttataagtagatgagtaattttttaaaaactgtgtgtttactaagttaaagttgtacattgttttttacaaataggaatatttttagatttttcagtatttagaattattctttttaatcatgtggttttatgatttttgtcttctcactgaaaggcagaaaagtagtagaattgttgattgaagaatttgcttcagcttcccaatcagccagccacgtttggcaaagatagaagattgtctgtgtgctggtttgttataattcctttgttgcttagaagattgttcctgtgctgatttgttatagtccctttgttgcttagaatttggagatttttacccacttctttgcctgtgagagtcatgatcatgcagatatttctggtatgactgcttgtgcattttgggcacaaggcttgatgatgttgagatgcagaaaggattgccagtaagaagaaaatgcttcctggttcacccaggagctgtcctgtggagagtgtcacagggtcctcaggggactttgtctcccttgtgctacaaaatctggttacctttccagcatagataagaagcctgttaaggcatcccccattttctcatccatctccagcagcgccttcagaagcctggatagagctctaggggagaagcgttcctcaaagcatttctctaaaagcctcttattcttgggaggccatagctttcctgtacctactacctcactgtcagttcactcaaattttcttagttgaaaacaaaaactggacgttgtcccagttttctcattccccatcagaacaacagactttatttcccaatgattaactgagtctccagttttgcactttaaagaatgttgtaaggaggaaaattcaaaccttttcaaaagtctcccaaccacaacccctatgtaatttaattataaatttcccaactttggctttggttggagcacggtactgcttggggaaaggcttttgctcttgctgacacacttggctcgtcagagaatttcagtgacttcactcagaggactgagtgcagtgagggcagtgtgctgggccctgccctccctgctgaggccaaaatggcaataggtgtgggagcctggctctgcatggatgactgtgggtgtcctgcaaccaatcctcctggacctgggaaatttaaagacttccagccaggcaaagccagggctattttatttcccaactctttaatgttgtttgtggtgctgtgtttgaagggtctctgatgagactcatgatgcatatggatccatgtagggtaatgaatcagtttataatagtatacgcaggaaaaaaaaaatctgtgctagaggaatttgtgaaatttaccttgcccttatttttacctaatactttgtaatattattcattataaaagcttttgtttataatttttttgttacctttttggacaaagaaaatgagatagcctacagtcacagaatatctcaatgattttcctaatgactagctaattttcctctttatttctctaaattacaaatcacgtattttgtgagggtatggatacattaaccaattatttaaaccatgtttcctaataaatcatactctttgtgttcgtgtaagcagtagaatttggatacatgacatctgttagaaaggcacaggcaagtttaagacaaagaaagtgaagagaggaagtatactcctggcacactcatgacaaaatgtgtacctaatgtaagttgggacagttaatgggcctattaaattacaaacactgttttctttgccttatagaaataggatatgtgaattaaaatattattagaatacattcaacagcaacacgttttgataagtaataaatgtagcttactatatgtccatggaggctgtggtttgggccaggtgctgtatgaagcaaagtaaattacagtctttaaattatctgaagaaattatattctaaaattgatgtctttcaaaggtctaagttttctgtaaaatcatactcaaaaaacatttgatatgggaccttaggcaaatcacttaacttcttgggattcagttcttcaagtgcaaaatgataggcttttattacattattactaagtttcagctgcctctaaaatctccatcctcctaacaaatcactgtattggaacttcagttaaatgtctggtcagagttatcttttaaatggtgctttatagcagtatcccataggggatacatgttgaaagtattcatacttacatcttaagtcatgtgtaagtgtttttttctaagtccattttgaggtggtttcagactttgagcattttctaagaaatattcagctgtcttttgtccataaaatactgaacacatttgacttagcagagattttaccttccctagtttatgaagatacagtagtctcctcttatctgtagttttgccttttatagcttcagttactcatggttgactgtagtccagaaatattaaatggaaaattccagaaatacacaatacttaacgtcttaaattgcatgccattctgagtagtatgatgaaatatgctctgtctcccctcaggacgtgaatcatgctatgtctagcttacccatgctgcatatgatacgtgcccattcatcacttagtatagcaatcttggttatcagactgatgaatcacaagacgaagaaggatgagtgcattgtagtaagatattttagagagagagacagagaggccacaatcacataatttttattatactattctgttattattattgttagtctcctacctgcctaatttataattaaactttattgtagttacatatttataggaataaaacttagaatatatggagttgggtactattcatggttttaggtatccactgggggtgttggaatggatccctcaaggataaaggggcctactgtgctcaatatgttttatttgcaaatacatatagataacaagatcaataaaaatctctctatatgtagtagattttgtctataattgatatattaatcagttgagataatgaattaattttgctccttatatttgatctgatatctaaaagtagtaatgcaaatgaggaactcttgtgccttattttagatgtattttgtgctcacatttagtgaatggtaaaattcaagggtaaatctgttgaaaggaaggcttatatatttaagatcccattgtgttgatgaatgttcactgtaattaaaaagcctattttttacattaagtaccttttggaaagaaagcaagaaagtcttgacctagaataccctacatcacttaaatgtacagaagggattaatctagaaagagcatgacatttaaatgaattttggttgatgaaaagacattatgtcttgctctgtatatcgtcttgatttctttttctctttttgtgtatttgctagttatctgttgcttgagtttattctcagccttgctgcctccaggctcctcacacttccagtcgtgtccacttgctctttgcagtgatgctcagactgcttttcagtctgcagtaagtactgtatggaaactgatagaaagtcagttcttcactccagcctttccttcagtatatgttggaaagtatatgaatttaccatagattaattctgtttgtttcctttttgtctgtttggttttggtttggggctttgatttcagttttaccatgtacacattttagagaaccaaacagttgtatctgtaagtttttactaaaagtaggagatttctgccttcattcctcatattctcagaggtgaccacttatacctcatttagctactttttatagcttctctttcatgtctctaaataacatgcttatatttttttgtcttgattattcagttttaaatattatctgttgaattcctactatggaaaatgagactttagcttttttttcatgcctcacccacctaccctgccaaaatgggttcccttctcattctcctaatattgatataccataatgccaattagagaataggcagcgtgaatggtattaaatttatgacagtgttatacacagttgaaccgtgttgcagagtgtttaactttcttttcttgcacagcttttgtttgccttagaggtaattattgtattattttaaaacgtgctgactttcctgttatcacttacaagctccatgctctttgccagaattaaacatcctctcagtgtgttcagaattgtcagaacttcatcgcttcatcttttggaagaaatctcttcccaattccttctaacctacttggtgcctgttttcatcctgggatatccattcaccagtttctgggaattcctttacctctgtgctaggtgcagtttcctgtcatcctgggatatccattcacctggttccaggaattcctttacctctgtgctatgtgcagtctcctgcatcctgcatgctgtctcccatctcctgtggccttctctcctggttaatgctcttcatttttgcgtagcgtctcttctcccttagctttcagagaaaaggtactgaggaggtcttttgagatctaaatgactgaaagtcttttatcgcccttacatataatttatagttaggctagtgagaattctggattggaaatcatttacttcagaatttagaagccatagtctgttctttttaattccaaatgttactatagagaattctgaagccttggctgggcgcggtgctcatgcctgtaatcccagcacgttgggaggctgaggcgggcggatcacgaggtcaggagatcgacaccatcctggctaacacagtgaaaccccatctctactaaaaacacaaaaaaattagccagacatggcggcgggcacctgtagtcccagctactcgggaggctgaggcaggagaatggtgtgaacccgggacggggagcttgcagtgagcagagatcacgccactgcactctatcctgggcgacagagcgagactccgtctcaaaaaaaaaaaaaaaaaaaaaaaaaaagaaaattccaaagcccttagaattcctggtttttctcttcctggaagtttttagaatctttattttttctcgtattctaaaatgtttagatgaagcatccaggtgtggatctgttttagccattgtactgggctctcttggggattctttccatctataaactcatgctttctaaattacttcagagacattccctgtactttgtatgctctgtacatttggaactcctgtgaagtttttttttttcgctatgtaatctctctttgctgtcttttcctctatttattttagtctctcttttctatttggcagcttttcttggtgtctggtaatcttgattatgtgctgtatttaagactgggaaactcaaagcagattgacatccctgagcatatgagtgcaacttgtcaattgctgtccaaggggaccaatgggggttattttgtaggcttgtcttctggggcttatcagattccctggagaatggtcttctgatctctttcctggaggtgaaaacccaactgccaaatgttatgtagccaagtaggagacgacagctgaggtctcagaatttagtttgcacaatttcacttaatccttcaaaggttttagtagaatacccttgcccacaaattttcctgtctctgccagttcagaatcctaatttatcctctccagagactaagcatccgggattttgcaagggctgggaggaagagtggcttagttacatagaaactggtggctggcgggcaggatctgggcatgtaactgcattttagagacttgaagcaatccttcatcctcacgtccagggatgcctggtgctaaatttcttcagccttgggcacttcagtggatagattggggtagttttcagctttccccactcaccacttagaattcaagtttcccaagcctaatacacttgcctctcatccatctgctttctcgttttcaggcttgtgtgtgtgtgtgtgtgtgtgcaatcccatttttgtcattttaatgggatttcaggagggaataaaagacatatctgtgcacacaactatttccttaggagtcttaactccgacccaaccctgctcccaattgctagtgagcaattttttatttttattttattttttatttttatttatttatttatttttgagacagagtctcactctgtcacccaggctggagtgcagcgtggcccgatctcagctcactgcaacctctgcctcccaagttcaagtgattctcctgcctcaagcctcccaagaagctgggattacaggcgcttgccaccgtgcccagctaatttttatatttttcgcatgtttgttggccaaactggtctcgaactcctgacctcaggtgttccgtccaccttggcctcccgaagggctgggattacaaggcgtgagccaccacacctggccccattatcatttgtttcaagaaatttttcaattttcttcttaattttttcattaacccactggacattcaggagcatattgtttaattttcatatgtttgtatagtttccaaaattcctcttgttattgatttccagttttattctactctggtcatagaagatgcttgatattatttcaatttcttgaatgttttaagacttgttttgtgaacctaacatatggaatatcctacagaatgatccatatgctgaggagaagaatgtgtattctgcagccattagatgaaatgttcggtaaatatctattaggtccgtttggtctttagtgcagattaaatccagtgtttctttggtgattttctttctggaagatctgtctgttcaatgctgaaagtagggtgttgaagtctccagccattatcgtcttgagatctcgctctctctttagttctaatatttgctttatgtatctcagtgctccagtgatgggtacatatatactcacaatcattgtatcctcttgctgcattgactgcattatcattatataatgatcttctttgtctgtccttacagtttttgttttgacatctattttgtctaagtatagctactcccaattttttttttgttttcattggcatggaatgtctttttccatccctttattttcagtctgtatatatttttattggtgaaatatgtttcttgtaggcaacagataagtgggcattgttttttcatcccttcagccactgtgtgtgtttttattgtagagtttagtccatagtccatttacattgaatgttgttattgacaagtagggactgccttctgccgttttgttatttgttttctaattgttttgtgatctcattctttaattccttctgtctttcttttagtgaagatgattttctttggtggtatgttaatttcttcttagtttttgtgtctccatttgtatcctttttggtaaaaggttaccatgatgaggcttgcaaataccttcttatagcccattattttaaactaatgacagcttagtactgatggcatgaacaagcacacatgcaaaagaaaactaataaaaactctacactttaactttatctcccctgctttttaacttttagttgtttctctttatgtcttattgtactgtctttgtcttaaaaagttgctgtagttattattttcgattggttcataatttagactctctacttaagataagagtagtttacacaacaccattacagtgttacaatagtctctgtttttctgcgtgcttactattaccagtgagttttgtaacatcagatgatttcttcttgctcacgaacatccttttatttcagattgaagaactcactttactatttcttgtaggacaggtctagtgttgttgaaatccttcagcttttgtttgtctaaggtttttatttctcttcatacttgaaggatagtttcatcgtatgtactattctagggtaaagtttttttgttgtttttctttttttttttccctgcagcacttgaaatatgtcatgccactctctcgtgacctgtaacatttccagatatattggaggtccattgtatgttgtttcttttctcttgctgcttttaggatcttttctttatccttgacctttaggagtttgattatgaaatatcttaaatgtcttctttgggttaaatctgcttggtggtctctaaccttcttgtacttgaatattgatctttctctaagttttgtaagttctctgatattatccctttgaataaactttctaccactatctctttgtcttaaatttgccctttcgaggctattttttaggttttataggcatgcttcattcttctttattctcatttttcttttatctccttcccctgactctgtgttttcaaatagcttgccttcaagtttactaattctttcttttacttggtcagctctactaatatgagactgatgtatttgtcagtatgccaattgaatttttaaactccagaatttctgtttcattcttcttaattatttaaatctctctgttaaatttatctgataaaattctgaattccttctcttattttgaatttcttttgagctcccctaccacagcaattttgaattctctgtttgaaagttcacatatctcttgtttctccacgcttggtctctgatgccttattttagttcatttggtggggtcattttttcctggatgatcttgatgcttttagatgttcgtcaatatctggacattgaagagttaggtatttgttttagtctttgcagtctgggcttgtttgtgtgtgtcctccttgaggaggcttcccaggcattccaagggaattggaccttaagcccaataacacttcgtttcttgcagacttgtagaggtactgccttggtggtcttggataagatctggaagaattctccagattaccaggcaaagactcttgttcttttaccttactttctcccaaacaaacagagtctctctctatatactgagcagcctggaactggggatgtggtgatattagcatccctgtggctaccaccactggaactgcactggattagtcctgatgtcaacacaacactgggtttctctcaagcccactgcagtcgctacctgcttacctgtgttcactcaaggccctaggacttcataatcagtaggtgacaaagccagccaggtttctgtccttcccttcagagcagtaagttcccccagaccctgagcaggtccagagatgctatctgtgagccagggattagagtcaaaaaccttagaattttacctgatgttctattctaatgtgactaacctggcactcaaaccacaatactgggtcctttctgctcttctctcccctttccacaggaaaaggagactctccttttggccaccaataccacggtcccatgggagttctaccacgctgctgccaatgttcacttagagcccaagggcacttctgtcattctgtgacgaatgttgccagacctggggctcacccttcaggacaatcagttcccctctggcccagagatggtccagaaatactgtccaagaggctcggcctggattcagggagcccaagagcctacttgttgctctacccactgtggctgagctgatacctaagatgcaagacaaagtcccctttactttcccctctgcttttctcaaacaaaaggagtcttttgttgtagccaccacagctgcgaatgtgctgggtcatacctaaagtcagcacgtcccagagcccaaggcctgtggtgtactatctggatattgctgctggttattcagggcctgagggctctttagtcagcaagtaatgaatcctgccaggactggtttcttcccttcaaggcagtgggttcccttggcccacattttgtctattttgtcatccaggaatgggcctggaatggaggtctcacaactctgcccagtgccctgttctattgtgactgagctggtatctaagatgcaagacaaagtcttgtttactctcttcctcaagtagaaggaaggagtcacttttgttgctgcgagccgcactgcctgggattgagggagaaatggtgtaaggcctcccttagctgccctggctgttgtctccctgtgtcacatgccaccatagtccagtggctctaagcccagcctaatactaggagttgcctaggaattgcaggccttgtgtccaagactgcctttcaagtttacctaggaccccagagcactggctttacggtggcaaggcttgccaagaaactccacttctgactgctggtttgggcagttgatctaaatgatctctccatgcatgggtgttggctgagcccagcacagctttgctctccactgtgacagagcagcactgaattcagtgtgaagtcccccagtcgctgctctctccctcctccaagtgtgcaagttagctcgccataccaggcagctgctgctgatagataggggaggggtggtgattcaagactatatctccgacacttttcagttcctcttttagccgtacacattaaaaccaggtactgtgattgctcacctgatttttggttctcgtgacggtgcttttctgtgtgcatatagttgttaaaatttggtgttcctgttgggggaggacagacagtataggcttctattctgccaccttgctgcactcacccagccgattcttttttaactgttaggttcggggtacatgtgtaggtttgttatataggtaaacttgtatcatgggggtttggtgtatagattatttcatcacccaggtactaagcctggtacccaatagttattttttctgatcctctccctcctgctacccttcacccactggtaggccccattgtctattgttcccctctttgtgtcccggtgctctcatcatttagctcctacttataagtgagaacaagcagtatttggttttctgttcctgcattgtttcctaaggatcatggcctcgagctccaaccatgttcatgcagaggacatgatctcactcttttttatggctgcatagtattccatggtgtatatgtgccacattttctttatccagttttccattgatgggcatttaagttgattccatgtctttaccattgcagatagtgctgcagtgaacatttgtattcatgtgtctttatgatagaatgatttatattcctttgggtgtataccctgtaatgagattatagggttgaattgcagtcctttttttagcttgttgaggaatcaccacactgccttcccaatggttgaactaatttgcactcccactgtgtataagcattcccttttctccacaacctcatcagcgtgtgttattttttgacttcttagtagccattctgactggtgtgagatggtatcttactgtggctttgatttgcatttctctaatgatcagtgatgttgagctttttttcatgtgcttgttggcaatgtgtatgtcttcttttgagaagtgtctgtttgtgtcctttgcccacttcttaatggggttgtttttttcttgtaaatttaagttccttgtagttgctggatattagacctttgtctgatgcatagtttgcagatattttctcccattctgtaggttgtctgtttactctgttgatagtttcttttgctgtgcagacacgctttagtttaattagatttcatttgtcaatttttgcttttgttgcagttgcttttcacattttcatcatgaaatctctgccactttctgtgtccagaatggtattgcctaggttgtcttccagcgttttaatagttttggggtttatatttaagtctttaatccatcttcagtttatttctgtatatatgtaaggaaggggtccagtttcaatgtatgtatataattagtcagttatcccagcaccatttatcgaacagggagttctttccccattgtttgtttttgtcaggtttgtctaaggtcagatggttctaggtgtacacccttatttctaggctctgtattctgttccatcggtctatgtgtttattttttataccattaccatgctttggttactgtagccctgtagtatagtttgaagtcaagtagcttgatgcctccagcttttttctttttgcttagaattgccttggcgatttgggctcttttttggttccatatgaattttaaaagttttttctagttctatgaagaatgtgattggtggttcgatagggatagtattgaatctacaaattgctttgggcagtatggccattttagcaatgttgattcttcctagccatgttcatggaatgtttttccattcattcgtgtcaccactgatttctttcagcagtgttttgtatttctccttgtagagatctttcacctccctggttagctgtattcctaggtattgcattttgttttattttattttgttttgttttggtggcagttgtgaatgggattgcattcctgatttgcctctcggcttgattgttggtatataggaatgttagtgacttttgcacattgattttgtatcctgagactttgctaaaattgtttatcagcttaaggagcttttgggctgagacgatggggttttctagatataggatcatgtcatctgcaaacagggataatttgacttcctctcttcctatttggatgccctttatttccttctcttgcctgattgccctggccagaacttccagtaccgtgttgaataggaatggtgaaagagggcatccttgtcttgtgccagttttcaaggggattgcttctagcttttgcccattcagtatgatgtagacagcaggtttgtcatagatggctctcgttattttaatatatgttacttcaatacctaatttgttaggagtttttaatatgaaaagatgttgaattttactgaaagcctctgttgagataatcgtgttatttttgtttctagttctgtttatgtgatgaatcatgtttatttgtttgcacgtatgttgaaccaaccttgcatcctagggataaagccttcttgttcgtagtggattagctttttgatgtgctgctggattcagtttgctagtatgttgttgagggtttttgcattgctgttcatcaaggatattgacccttttttttgttgttgtgtctctgccagttttgggtcaggatgatgctagcctcatagaatgaattgaggaggagttcctacttctcatttttttggggaacagtgtctgtaagaatggtatcagctcttctttatagatctggtagaatttggctgtcaatccatctgatccatggcttttatggtgtgcaggctatttatttctgattccattttagagctcattgttggtctgttcagggattcagtttcttcctggttcagtcttgggaggatatatgtggccaggaattcatccacttctagatttttagtttgtgtgcatagaagtgtttataatcgtctctgatgtttatttctctggggtcagtggtaatatcccctttgtcatttctcattatgtttatttggatcttttctcgtttcttcattaatctagcctagtggtccatatattttattatttttttcaaaaaactggctcctcacttcattggtcttttgaatggtttttcatgtctcagtctcctttagctctgattctgattatttcttgtgttctactagctttggggttggtttgctctttcttctctagttcttttagttgtgatgttaggtgcaaacttgagatcttcctaacttttcaatatgggcatttagcgctcaaaattttcctgttaacactgccttagctgtgtcccagagattctggtatgttatcattgttctcattagtttcaaagaacttactgatttctgccttaatttcattatttgcccaaaagttattcaggagcaggatgcttaatttcaatgtaaatgaatggttttgtgcaattttctttgtattgaattctgtttttattgtgctgtggtctgagagtgtggatggtatatgtattagaccattcttacattgctgtaaagaaatacctgacacggagtaatttataaagaaaagaggtttaattggctcatggttccacaggctgtaaggaagcatagtgctggcatctactcagcttctgggaaggcctcaggaaactttcaattatggcagaagggggagcgaggcatctcacatggtgggagcaggaggaagagagaggggcaagatgccacacacttttaaacaaccagatctcacgagaactctgttacaggaacagaaccaaagggacggtgctaaaccattcatgaaggatctaccccaatgatccagttcccaacattggggactacagttgaacatgagatttgggtggggacacagatccaaaccatatcagtacaattttgatttttttgaatttgcggaaatttgttttgtgtctgattgtgtggttgattttagagtatgtgccatgtggcaatgagaagaatgtatactctgttgtattctggtggggagttctgtagatgtctatcagatccatttggtccagtgttgagttcaggtcttgaatatctttgttaattttttgcctggattatctgtctaatactgtcaatggggtgttgaagtctcccacgttaccctatgggagtctaaatctctttgaagatctcttaagaacttgctttatgaatctggatgtttctgtgtttagtgcatatatatttaggatagctaggttgccttgttgaattgagtcctttactatttgtaatgcccttctttgtcttttttatctttgttggtttaaagtctattttgtctgaaattagaattgcaatccctgcttttttctgtttttcattgcttggtagcctttttccatccctttattttgagcctatgtgtgtcattgcatgagatgggtgagtgcctgcaggcaaggcggcatgaaggaggctgcagtgggggaagaatgctggtgcgtgtccactggggtcactctgctagagcactctgctagtcaggcagtctgccagtgcaggagctaccgtatgggcccgtacctgggagcttcactccaagcaggtgtggctaggctcgggctctgggagaagccagcagaccaaagggtggaccagattggccccatctcatgggcaagaccaccctgcagagttgaggtcccacagttcccctagggataaagtctcctatgggagcaagtctagcctaaggggatgggcatccttggccatgctccgctatagacactcccataccaaactctctgggctctgccccagctggagttctgcttccactgcttccctaagcagctttccctgacaactcaaatgtccatggtggtccaggggttccttcctaccaggattccagcggcctgtggggagagcgaattttgttccttgccttttcaacttccccctctgcaggagttgttgggggccaggaacaagttgtggtgcttggtagccccgagcagggtccccagcttcctcccccttcagccccagctctgtgttttccctccatctgctctcgatgccctccctctgaagatctgctaggagtgtgccagtcttcctggtgtcccagtccctcagtgggagatgttcctcctggctgtatctagttggccatcttggagcagaaatttctagttttgatttttaataaaaatgtatggaatctgttattgtgtctgcttttgtacatattagaaatttttaagtgaaaatttttctagctcataaatttaaatgtataaaggaaatatacagaaatagtagtttcggaattacaaatgattttccatttctctgaaagtcaaaaaagttacacactattttttgagaaaatgttatatgacaggtgcatgttaccatagaaacgaaagatggaaagaaccaaatcacctgagatataggggtagtttagatagaaatggagagaggggaatgtgtccccagaaggagaaaggaggaaattgatgacagttctcctgttcagcagttttacaaggacccattttaataaggtacacacatatatatacaatatgcgctggtgaatttgagtaagtatatgagcttgctacgtgaaagctaaataaagcttttttctgtagatgatgagtctttaagaatgattgttgttcttttccatattataagcaacttatacagtcttatccacgcagaacattctcaaatattaatgatttatcaaaatccagtgaatttcacatgatagttgaaacctagcaatatcttttaagtagaaaatgttctttattcacaacagttttgctccagattaaatatttcttcaaggcagtttgatttatattctctgcagtgctatgaagggaaatcctccaaagatatcctgaaaagagtagctgcaaatgcattgatgtcactgctggctgtcagtagaagagcacagaaacatgctttgaaaggtgagccacatgacacatcagctgttttgatggcattatcaattcatatgttttgttgcttgttcaagttaattttctttggactcaaaatgtaaaaaacgtatagtataatctcagtgtcactaaaaataattttttttcccatacagaagcagtaaatatgcattacttttcaaataaaaagattagacatagtttgtttttgtttgtttaatatgtgatggttcttgctctaaagaacctatatgtaaatattagggaagctaaaaggtaacacattgagtttcattataattaaatattactatccagaagcactcactgcatacctgaacaaaacccacatagttttgatggtaaaaacagcaacagatgattccatattttcgtataaatttccctcttgagtgttgtaatttctcatttgggaatcggagaatgtagatctgagaattaaaagagaataatggcaacatcaagtccattaatatcaattgtgatttgcgactacaacaaatgatgtattcctcaagttgtaaattggatttgggtagtatcttactaaaaactgaaaacaagtggacttcagcattttagttctcttacttatcccccctctgattcattaatctctgactgaaaattctaaaatgaagtgggtcagaaatagaaaatgttacctttttgagaatctgattggtatatgtggttataacttacttggaaatagaatatccttttgactactgcagattttgtctttcagccaatcttatagacaattgcatggagcagatgaaacacataaatgcacaactgaacctagattctctgaggcctgggaaagcagcattgaaaaaaaaggtaacattctgggataaatgaatggctatatatagagaccattctccagtcctcttgtgcctagaaatgagcacgagcttgaaatgagtgtctcatttagaagaaaggtacagatggataaattaatgagacttctacattagcagattgttggctttttttggtcttaattcttacttgaagatctttagacaacatctgtctattatgtactgttgttattataaacattggaaatatccacatatacatgatactatgccagataaattttttatactacaaaaagaaaatctttatctcaaaacaagcataggttaactaggaatgagatctgtaacaactataatttattaagagttttctatatgtcagccactattgaaacatttcatatttattatctcatgaacaaacactcattacagcatagtcacacaactggtaattgatggagctaatatttgccccaaatctgggtggttgcagagctggtattcctcatctctgtttatctcctcctgtgccttctgaatatctcctctagcattgaatctgctggactcatgtttaaactgcatgctcaggtaaactgaaaataacatagttatataataactactgtggttaacaagatctgccacccacttattcaacaaatgaaagtgtgtgaatagtataaatatataaatatacatatatgtgtgtaggtaaggccgttatagcagcactctatgtaataactagtttctactgcatttaagaaaccaagacaaagtcttatttaataatgtaattgatgcaggagattgattgtatgtttatcagttctttttttttttttttttgcctcttttcctccctagccaaaggcccttcatcattgagaaagtcagccaacacctgatattattgaaaatctctcagtatctgcctcactttattgagatgaaacatggaggctatcatatatccgagttcctccatgcttgatagaacagaaatagctttttcatggtgaatgtgcttcttgagatatggtcatctttcagagatcgttagcctgtcagttccctcaaagttacagtggttgggcatgattagagcacacctgcattgtcccgtgacccaaaggggagggaattactatacacaaaaagtgaagtatgctgttgcattcacagttttcaactgctttttgtttaaataggaggatggtgttattaaagagttaagcattgccatgcagctcctaagaaactgtctttatcaaaatgaggaatgtaaagtaagtagaactacttttcaaaattttaataggagtactggtattaagcagtttaatttttatgtgagataatgtagtaggaaaaatggaaagctctgacttttaaatttttagacacacagttgattggtccttaaactcagtgttaattgtcagaaatgtgtgtatctaatcattattcatcgacactgattacatttcttcgcaaacttcagcctcattctgtactcttaggtattttaaatgttttacatatggaatgaatggctggatgtgttttataaggtagattctttcaaaacgggttgtcaaaacaactcttcaaggaaataagtgaagctatctgtatctataaggaaagaaaatgaagagtttcctgcttcaaaggagaagatagttagagctgctacctagtgtggccacatccaccgagaggaagtttcttctagctctgctgactccctgtgaccatttacatggcccttctgtctaaaaatcactgagatgttttgcttcgtctgtaagcactgatgatgttttaaaccattgtatcagtactactatagaggatataatcttgtgaacactctgatttgctttgtctatagttttacaacacttttgaaatactagattgatgctttaatgcagaaatactagattattctttataaaagctggccacgaaaataaaaattttaaaaaatactaaattaaagctttaatatagaaagcaaagataaattatggaagcttttattgccttataaatttttacctgttttgctcttacttgtggtaagagcacaactggaaaaaccataccacatctggaaaatggacatgttgaacacacttactccttaagcgatgttaaaaagccagatacatgactcacaatttatatttcaaagtagtttgatggaaattaagtatttatttatacaatttattaaaattccctatatatgaatttatatgaactttttctcaagacaaaagtgccattaataaacttaatgattccttcatgcttatgatattatgcttgtgactggatgtacagtcagtatttgtgtgtaaatttaaatatataaatttcatgtgtatgtgcagttaatattcattcatgacaccttattcagggaaatactctggaatactttacatgtgggatctacctataaagatttatgaagtgctaacctggctactagttataaatattgtgctcaatttgtatcacattagccatttacaaaagtgtgatatctcaataagtcaaagcatttctgtatttctaagttgtttaataagaagtaaatccaaagaatattaagattatccttgagtataaatataatattatggaggtagggattgttaatttcaatttcagcttttatcaggtgtatggcatgttctcattattaatagttggccactattgggtaattcaccaggtcacccactgccaccccaccctgctgtttgcatatgcataacattaggggttttcatactggaaggagcatggtggctgtgaggtaaatgaattaaacagtggacaaggttagacggaggggactgtcatagtccagacaagagatgatgacaccttaacttgagcaggtagaaaggagaaggagggtagggagtaaatttgaggcattgagaagaggaggaatgtagaatgacttccaaactccagtttaagccactgcattatcatgcattaagagtgcatgatagagcagagcacaggtgtgagagacccgatattcatgcttgcacgtgctagcctcaagagtctttggggcatccaggtgaaaaatggcttgtggcctgtagattttatgggtctgggactctaaggagtgatacaagctggggatattaggagttatcaatgtgtagatggtgtttgtggtcctcactattgttgaaatttcccaagaaagtatgtaatgaaaaccaaggtcatatctttggaaaacaggaacatttaagagggggcagaaaacaactgagaagggaatactggagaaggaatttggagattgcattaggccgttcttgccttgctatgaagaaatatctgagactaggtaatttattaaagaaaagaggtttaattggctcacagttctgcagggtatagaggaagcacagtggcgtctgcttctggggaggcctcaggaaacttccaatcatgacaagaaggcaaaaggggaacaggcacatcacattactagaactggagcaagagtgagagagctggcgaggaggtaccacacacttttaaatgaccagatctcatgagatcactcactgtcttgaggaaagcaccaagccatgaggaatccgcccccaagatataaacacctcccaccaggcctcacctctagcactggggattacaattcaacatgagatttgggcagggacaaatatccagactcttatcagaaatgatccaggatagagcagcagcggggaaattaagagacatatagcaaatgccaccgtgcttaagcgttgttggcaaccacaaaagtagaagcggcctcaatagaatcatcagggcagaaaataaacggtaatgagctaaagattaaatgtgaggcagggaaattacagcaataataatgtagaagtttggtcatgaatagtggcattaataatttaggacatataagatgaaaggaaatgagtatgtttgtttctcttaacacgtaaactacttgaatacaggcacagaaatgagcaaattggggacgagttgtttaagagatagcaagaggagaactaactggtggattaagatccctgaggaggcaggaagagctgtgtttcagaacacagatggatgtatcaatctctggcaggcaagaagtggaacacctctttgtcactaccgggcagacaggaaggatgaatggatgaaaatacagataaactatgtggacagaatggcagagtagataaaggagtttgtacttaatcgtttctgtcttctctgtgaaatagtaaacaaggtcatctgctgcagatggagggccgtgtgccacagagagtggtgaacaagggaagaactttagggagagcactgggaatgacttcagtgcttacggagagtgttgaacattgggaatcacttctcttctgccacttgatgctatgtgaaatcgtatagggtgtgtgtatttatgtgcatgctcacgtgcataatcatgggtctacaaattacctcggaattcttgttcatttaaaatagatattgctgcacttaaacagctatattttatctgcaatattgtcccagggtaactgatctttgtaataaagactctgagttacttcagaatttttcaatttatcataatatttagactgaattttatatattcaaattactcaaaaactgtaatttactttgagtatatacacacatacacagagagagagaaggagagggagagagggtgggcaaagaggactcagagttgatcagaatgtttacttaaccagaaattctcacttcttggccagttcatagcatttacaggaatttattcagtgttgtgagatatcactttgctgtttaatttacatgttacacaggctattttctatgcttcctaacttagtggtacatcttaaccaccctggtgttgaagcgacgtcctgagattggtcaggctcgtggtcagggcagccatgtgtggagcccaatggggctggggcaggatgctgaagccatccacagggttctccttgggtcttatgttgatggctttctgttgttgttttgattttaatgttatattttcatatattcagactaatgctgtctttttcccttccttcaacaggaagcagctcttgaagctcaccttgtccctgtcttgcactctctctggccttggattttgatggatgattcattgatgcaaatttctctgcagctcctttgtgtctatactgcaaattttccaaatggtaataggatccaatactgcctttcaataatataccaaaatactagttttataaatgttgttaaggtggactggaaaaactaatacatattttgaagtatttctctgatttattgaggatatgatgggcaaaggcaagctttctcgtaggtattatgagagcagacagatattttagtgtgtttgttgacatgagagagtcattggcagcgcagggaatagagagggaggactggtctgattatctggcaatgggaaattgagtttagtaggaaaattgagaggataaaaattatgatgtaagacctcaaaagccacgtgaaggttagaacttctcatagattctagagcaggagactggcatgttgaaagttctcataacagttggtctggtgatacttgatatcactagggctcctctttcgctcatgcacttgatagacactttatcaagagcctgtggtgggccatgcattgtgagttctggtgagagtgatctgaaatgagataggaggacaggtcatgtagggcctcagaggccagagtagggagtttggatttttatgtgagtgtaacaggatgacattggcagttgtaagctggtgagtggcatgatttaatttgtgtttaagaaggattaggctgggtgcagtggctcatgcctgtaatgccagcactttgggagacccaggcaggcggatcacttgaagtctggagtttgagactagcctggcaaacatgaggaaaccctgtctctactaaaaacacaaaaattagccaggcatgatggtgcatgcctgtagttccagctactcaggaggctgaagcaggagaatcacttgaacccaggaagcggaggttacagtgagccgagatcacgccactatactccagcctgggcaacagagtgagactctgtctcacaaagaaaagaaaagaaaaattgccctgggtggtatgtggagaatgaatgattgggagcaagtctagaagcagggagacttgtcatggagatataatggtggcttgggcttgagtggtagctggagagattgagagaagtagacagattcagtatatagctcaaaggtagagtcaaggatacctgttgtgggaggtaggaaggaaaaaaaggtgtccggggtgaacttcatttggagaaatgagcctgagtgcacagtagtgccatttactaaaatggggaagatttaaaagaagcagacttgaagtgagaaagtagtaggaatcaagagttctgtttggtcttgttaagtctaaggtgttgatgttcactcaagtgaaaatagtaagctggagttgaattcaatggagtgtagagataagtttgaagatttcaaatgttgggaatattattagttatttattgctacaaaagaaattactctaaaatttagcatctgcaaacattaatcatttcattatgccacggcttctgtggctcaggaatctgggcgtggctaatctgggtggtcctcgctcagagtctctgcaatcatctgaagtcttgactgggatagaggatccagtgtgactatgggagcctcaattccttgctacttagggctgtctcaaacgacccagaatgagtgggctgagggcagaagttatagtctcttataatccagtctcagaagtaactgaacagcactcctagctcttgtgggtcacacataccaaccctggtacagaggcaggcgccactgggaccatcttggaggctggctaccacaggagtcattgtcatgtagattgtacttaaagccacgtggctgtttgcgattacccagggagaatgtgtagatggagaagcagaaacccatgaccaagttctgaggcacatcaacatttggagttaatcaaaagatgagaaaccagcagaaaaaaaagagaaggagcagccaatgagataacagtgcacagtcacagaaagtcagagaagggcatgctcagttgtgtggaatgctattgaaaattctgctaaagtgaggatagaaaaaatggctgttggacttagcagtattgatgttcttttggaccttgagggtaattttagtgcagtgccagaacagaaacctacttagtgtgagctgaggagagaagatgaagaagtagaggagacagcttttccaaaatgtactactcttaagaggacaaagaaatggagcaacagcaagagacagatgtggagtcaaaggaggagtttttgctcgtttttaaagatgtatgtttttaaggcatgtttattaacttaagggattgggagaatgaggtgcaggaaagagtgcaggtaagagcccagcctgagagggtaagagaggtgagagctagagcacagctgacaacagaagcggagggaaggctgagaggaaggatgtggatttaggagggctggtagacttgatgggaatgatgagaaaattcccattttgaatacttctgctttcttcatttaggagagaacactgaccactaagaatgagcaaagacaaggagtagaggtgatgtgagaagaggagaaagtgtgaagtagctgtttttagaggaaggaaagtaaacacaccagagaagcaaagtaggattgctggcagtgttaagtaccacttatggtcataaatttaagaaaataaattagaatttatggtcataatttatggtcataaatttaagatttaaattttattaaatttatggtcataaatttaagatttgactagcaagtttttgtactttcttctaacaacactcagtagcccagcaactggggtctctgaatatcaaaggttatacagagaagggactggaactcacaacagttaaggagcccatctagttactgccagatgctgttgatggcttattcctttgaataatctgccagatgctgatgatggcttattcctttgaataatctgacacctctggagctgtccatttcgatacccaactcaggttgtctccagtcagcacaaagagatataaacagaccttcaagctcttgaacttgaactgtcattgaagcatatgtgtacaggattgtccttgccttcattctgtgctgttaactttctccattccttaggtctggtgggaatgtctcctttcagtgcattttccagctccactagtatatcttttgtttgtttactcatcttttatgagtttcttttacagaatgtatttgattctgatcagtttatacttaagttggcctcctcgtatgaactttcacaagtcaattataccttaggtttatgtataatacagtcttattgatttaacattaaaatatatttctaatttttttttctccctcaataagtctcattcagttacttaatttcctgagaaacactgaaccctggaaagcctgtagatgccacttttggctcctgctatgctaagctgtatgaccttgaacaacaaactggcttttctgagctccatatctttgttgaccaaatatagaaaatagtatttgttttgtccgctttcccagggatattatgttccttatttgtatgttatgtaaaatgaaggcattagacaagttatctcccatttctaaaattctgttcctttacacaggcctttatttagatgttttctttagcaactattaaaaaccctagtatgtttattttattctttttttaaaaataaacctggtgtcttaaagtgctttagtgagataattaggccctcagtgaggacagtatatctattaggttgactgtagacaccaacattagcctccattgctaatttgcagttcacaggttaatggcctagtcattttgttagacagatatgctttgccacttagtgtcttcaaaaactaaacagggaaactgagaagacattgtgataggctgttatttttgaaggttgcagttctctttgttggtcaagttgtggacaacaccctgttcaagctacacatagaggagccgtgagcaactctctgatgctgtgtatcctaaagttggcttcccagatgccactggagaacaccacggttcagcagatggtttttatgcttctttcaaacctggccttgtcgcatgactgtaaaggagtaattcagaaggtacgcacttaaactccccacatatcttaaaagggtactcagtgaaataatctttccaatcaaaagtttacaactcaatttctaagattattatgattttgaggcattttattttaaaggattataaaagggttaagaggttcactttgtttaaagccagttgatagatgacacgtgcagaaggacaggagctagagtagagtcataccatttccttctcatttatcttcttagctttcggattgtattttatcattctcaaagatgagggttttagaaagatagccgtcttacatttattggaaataataaaagtaatatattggtctttaaacagaccaaattgggcagtaacaatttcagtttaatttcattgacaaaatggtttatgaaatcacagcccacttcccccagttagacttaacttccttatggcatgttaagcaattttatgagttctctaggattccagttcccaatctagacttctcatcactgattttaacttaaggtaatttaaaagggatgtaatgagttaaataaattctagtacacatgtgcacttatattctgtatttagatgtgtataaacagaatccctaattgggaaaatcccttcaaatttgaatgtaatcagattatatactacttactagtattgtaatttgagtgtttccatttcttttacttgaaggccaagataaattgcagaagttgagagcatttataagaattgagtctccttttcctctactgtttcttctccctgaactcctcagaagatactttgttatcaccacataaatagaaagttcggtctttctaaggaaatggaaagatcaatcttaccaaggaaagatgttttcagtggcacgttggagccagcctcctactgactcatgagtgtcatcttaaatttgcaggaattttataaaaattccagttgatgttacattgttattttgaaatcagccacagtgggcatatcacaccacgtaattcagcgaactgtacaaatcttggatcttttctaccctcaccacaatcagttgtttatttaccagcacatggctggatattttcttcatgtatatgttcatgtatgtcatatatgtatatatatttgaatatattttcttcatatatgtattcatatacatgcatcacttccaaaatgagacattctcttgaactggatatatgtgattagcatccataagaatgagagattctgcatatgtgagagcagagcgggggcagtgctttccaccacttccttatagagcatgttggtgggaagctaagtgggagcacccagaaggaatgtaagtgccaatctcgagtctggtctgtgactttgagctggagacctattctctttcagcttcatttgggtttaacaaaataatctctaagatatgttcaactcttaatctgttattctggtgctatacttaagaatattttgatgaagtgtgatcagactctctttccagggacggattaatcaagtctttttcctctgctctaattaggaaatgcctgagacttcctctgctgcattaagtaataatgagcccagacacttaacacttctacttcttcattactcatctgtaggacatagaaaatgcagcaggtggtattgtacaactcaggctccgaaatatcctgcttgtttgtttttttttctaccatggtatacatctctacatattctacctggtgtaggaaattgtctgaaaacatctttagaagcagcaaaaaaaaaaaaaaaaaaaaaaaaaaggagtgcccacagcacatttatatttgagagcactgacatctgctttatcacccttgtcagtcccaaatccagcaagggttgaatctaaaaactgtcagtttggctgacagtaggtgtgagtgacagcacatgcagctgaaagtgggcatgtaattttacagtttacttattgtgtgggtaatgttgataatatttctgtagctcatttcattcttaacactcagagtccttttgtataaaaacgttaagtttattttatagattaaagccaacatcttgattttggtctaggaaaacctaagagataaactggagtagatttaaacagagagagagaagagttattctgtgcaatcataaaagttaagtgattgcatttcatttctaaaatgtccacctaactgtggtttccatgctgccatgggctgcagcttgatgcagcacttttatactttgcatatagattagtctaagcaataatttattatctttcttatagtgaagggtttggtggggttttttggaaggggctttatttggaggttgaaaagactcttacagttcaaataatagagctttctcatctgtaagcataatagaatgacgtgtagccatcagaaattcttacttgtaatgataagtacctgggataaagtgaatgtaagatgtatctatagatttgataaaaacaacaacaacacctgtagctataatgattcaaaataccctcactacttccagagttgttaactagtattcaagactgatttggatttttgccttttttccttccatagggtagcttttaatagcaaaatcaccagaaggcagagagaagagaaaactcaagagccctgaaataatctccaaacttaattaccaattctaaataattaagagttaactatagtatacttcatccatcatgaggaaataattagcaggaattaaaacttgagcactattttgttcttcttacctttttcacttatgcttggaaataatatagatggaatattcagaagctattagaaaggagaaattaatgtagagggagagtatatcagaatgttagttaattggtcaccaagggactaggaaaataatgaaaaagatgagaagaaaataatattctctctatttatccacagagtaacttcttacagaacttcctctctctagcattgccaaaaggaggaaataaacatctaagtaatctgactattctttggttgaagttactcctgaatatatcatctggagaagatgggcaacaaatgattctgaggcttgatggctgtctagacttactaacagagatgagcaaatacaagcacaagagcagccctttattgcctcttcttatctttcataatgtttgcttcagtcctgcaaataaacccaagatcctggctaatggtaagttttcacacacacatacatttatatatgtagttattcatagactgttcaggtcaacaccaaataattttataaataattttctaggcatttattaagcacccactgtgttcaaagcactgtggaaggcatgggaatgaatcaggcatggcttcagccttccgtgggcttccaggagtctcctgaggttagcaaatcatgtcattccagtgcacatactggacacctggaggaaggggagccgtggacgagggctccctggccttaccttctgctccctctcctctctccttgctcttcctctaactccagctcccctcttctgcatcttcaagcaaatgctactatgtcaatgaagcctctcgggaaccatgtgttaatataatagccccgcacccagggggccttctctttcctcctcctcactatttcctttcctggttttgtttccctccgtagtattatcgccatctgatagattatgtgtttcatgtatctgtctattcctagtcttcccacactagaaggtaagctcttatggggtcaggaggcttttgtctgctttgtttatgtgtagcacctagaattgtgcctgcaactagcgagcactcaataaatatttgatgattgagagagatcccaagcagaccggagagagttcagggcttgagatcagatggtgcagtgagcctcgcagagacttcattctctgagatgtaggacagatggaggcgaggattggtaaggattcagaaaaaaattgaagcaaaaagaatcggaaagatctttttctgcaaccatgtgttatctctgtgaggagtatgtgaatttcgtggggagtgagttttataaaagacatgtgttctagtgaaaaacagaaggtgggctccagacccctacacacctggtcttgaatgccagcactagggcatcactccagcgtcgcctggtgcagcctcgctgggcccagcttcttcatctataaaagaagcccactcttcttggtttggtaagaatcagtttataaacacacataaagtgcctagcgctatttctggtacatgataaatgtttaagatagattcattctcttgtttttttcatgtttttcacttaaacttttctcagaagcatttttctgtgaaatcaagggttttctaagtgtacgaaaatgattcttcttatattttgtggtgtatatagttgtgattctatttttctgataagcattctgataatcaactgctagatatgatatagaaggatgtttaaagttcagttagcttgtagcagacctaaccttactgtggattttgcactctgccttccggtggctgctgtgctgatgctgcgttctctgttgctgcgtgatgtacatcactggttttatttccatcctctcccactgtagctgcttcagccctcacatttgtaaaatgagggtgatgataatccctcctcagggcaatgagagagcctgtgaagtgtttgtgaccattcttggtatatagcagctactcagtaacatctgttattgtttattcacctttcttagaatgattttttttttctttgagggctacttactccagtttattattgagagttggaaaaaggtcaagctttttgagaagtgaaggagagaagtctgcattttccacttctagacccctctagaattatttttagcatttctttgtagtcagcaatgctttttctccttcattagcttaaagcagatggataaactttggtgagaagcttcccctagcccacagactagagatcagtgggcttttcaggcaggggtaagataagagacatcagctgtgcagtttctgtgtggaactataaagggatgtcacagcctatgcctcgctttccacttggggatttatggaggaggccttagcagagtcagccagcttaaaagtctcccaggaaaggctgcctctgatcggtagcacccacacatctggtttaaatggtcaggagtggagtgtgcagtggagcttgaccttgctggtaaaaatagatctggggcttggcatggtggctcacaactgtaatcccagtactttgggagaccgtggtgggtggatcatttgaggtcaagagtttgagatcagtctggccaacatggtgaaaccccgcctctactaaaaatacaaaaattagccaggcatggtggcgggcaccttgtagtccccagtagtagaattgcttgaactggggagacggaggttgcagtgagccaagatcgcgccactgcactccagcctgggcaacagagtgagacttcatctccaaaaaaaaaaaaagatctggaacattccttgtttctggcaatgccagactaagtctcttctgaaaacgacaataacatgctagacaggctgtattaaaatgcacctcaaaataatcacaaaaactgaaaagatagaaactcccagtccagttttgattgaaagtcttgcccagacaagtaagaagtatatagaaaattattttgccccaagtgcatttgccaaggttgtatgcttggcttttgttgaggagtatcgaggggtgagaggacagaagccgcgattccccaaagtggggattcttactggctatcctgcttgtattaagctggacctccaaagaaccattctcttaatagatggatgggtcaaaaataagttggtttcccaaacttcatgaaggagactgtaaagaaaaggaaaaaaaaaatgtgagaatgggtactacagactgcttctgatagggctctgcacccaaagttggccgtgaacttggcttgaggtgtcttcgattgatggtgcctgtgggtacttagcagaaagcaaactgccttggtgatggatgaaagacaagttcatactgggcctcagggaacctctacaaataatttttcaaaagcattaaccagtacaaagttagagataatcaagcacattaggagacatggcaacatgtagtaagaaacagcagaagaataaaaataccagcttatctgcccagactttgaatatgggaattacaaagcatgggtttaaaaataactttaattataccatatttagataaataaatgacaagcttgaaaattttaggaaatgggaaactgacaagttgaaatatttgaaaagaaccaaacagaacttcaagaactttactgtgcagtatgataatcagccacatgtagctatttaaatttaaactaattaaaattattcagttgtactcactacatgtggctagtggctatcttattaaatagcaagatataaatatttccattattgtaggaagttctgttttacaacagtaatctagaacttcagtggccaaaattgaaaacttaatatacatgtctgacagcaagttaggtatagcagagaacttaggaattagaagatagattagaaaaatattatccagaatgcagcagagaaagctaaaaagatgagaaaggatcaaaagaatcaaaggtaagtgacacagcagatatatcaagacagtctttgtgtttaatgaagtgtcctaggagaatgggagaggaaatatttgaagaaatgatgggtaaaaactttaagaacttttctaagacattaatgtcaccataactgacaactcactgtaattaccaaactgacatccctaaacttatacttaaaccaattgtattaagaaggtaatattcaattattatattaaggtaacattcaattattatattaaggtaatattcagttcaaatattcaaaaatactgtctcattatttacattttactactgtatattcactttaggttatttaaatgtttatatgagagttcagacctacttgttgaactcaaaattgttttattgctttgttatatgcatgtttcacaataacatttgttttgttaaaaaagtcgatccacttgcattatcagaggggcccaccacattaattcacacacacacacacacacacagacacacacacacacacacatatgtatatatacatacacacacagtactttattaaaaatgctttaagggatagctggttgaaggagttataaacttacttagatcagaggagttatatattctgagtgtttgagacaacatttaaaaacatcacttgatgctactcagatggaacataaggaagtcaccctcccatttaataaggggacatttgatgtgccctaatgagtagcacttgcagccataacctcacgtgataaattgcatctgcaagctatgtacatggcttggttctgggtaggttatgatacacgacaaccaaagggcatcagatagtgcagatgaggtgttcagggagtcggctgcagcgtgcccgaaacatcactgcacctgcctttcacattgtcctgatgcacatttccagttcactttagggagcagctttttttgttttgtttttgttaaatatttaaaatcccttaaaataaaaaaattgaattatgtagacaaaatttttgtttattctattctggaatctttcacacaacgaatatttattgagctcctaaaatacactagcattgtggttggtctaataccagtgagtagacactgccatctaactaataccagtgagcagacgttgccctgtaactaataccagtgagcagacactgccttctaaccagtaccagtgagcagacgctgccctgtaactaataccagtgagcagacgctgccctctaaccagtaccagtgagcagacactgtgctgtaactaataccagtgagcagatgctgccctctaaccaataccagtgagcagacgctgccctctaaccaataccagtgagcagacgctgccctctatctaacaccagtgagcagacgctgccctgtaaccaataccagtgagcagacactgccctgtaaccaataccagtgagcagatgctgccctgtaaccaataccagtgagcagacgctgccctctaaccaataccaggagcagacgctgccctctatctaacaccagtgagcagacgctgccctctaaccaataccagtgagcagacactgccttctaaccagtaccagtgagcagacgctgccctgtaactaataccagtgagcagatgctgccctctaaccagtaccagtgaacagacactgtgctgtaactaataccagtgagcagatgctgccctctaaccaataccagtgagcagaccctgccctctaaccaataccagtgagcagacgctgccctctgtctaacaccagtgagcagacgctgccctgtaaccaataccagtgagcagatgctgccctgtaaccaataccagtgagcagacgctgccctgtaaccaataccagtgagcagacgctgccctgtaaccaataccagtgagcagacgctgccctctaaccaataccagtgagcagacgctgccctgtaaccaataccagtgagcagacgctgccttctaaccaataccaggagcagacgctaccctctatctaacaccagtgagcagacgctgccctctaaccaataccagtgagcagacactgccctctaaccagtaccagtgagcagatgctacactcacagaccctgccttgaaccttttcctattttagtacccttatttatttatcttgcctgattgccctggccagaagttccaatactgtgttgaacaggagtggtaagaaatggcatccttgtcttgtgccagttttcaaagggaatgtttccagcttttgcccattcagtgtgatattggctgtgggtttgtcataaatagctcttattattttgagatatgttgcatcaatacctagtttattgagagtttttagcatgaaagggtgttgaatttttttgaaggcctttctgcatctgttgagataatcatgtggtttttgtcgttggctctgtttatgtgatagattacttttattgatttgtgtatgttgaaccagccttgcatcccagggatgaaacggacttgatcttggtgaataagctttttgacgtgctgctggattcagtttgccagtattttattgaggatttttgcatcgatgttcatcggggatattggcctgaaatttcctttttttgtgtgtgtctctgccaggtttttgtatcaggatgatgctggcctcataaaatgagttagagaggattccctctttttctattgattggaatagtttcagaaggaatggtaccagctccactttgtatgcctggtagaattcggctgtgaattcatctggtcccgggctttttttggttggtaggctattaattactgcctcaatttcagaacttgttattgatctattcagggattcgacttcttcctagtttagtcttgggagggtgtatgtgtccaggaattcatccatttcttctagattttctagtttatttgcatagaggtgtttataatattctctgatggtagtttggatttctgtgggatcagtgctgatctcccctttatcattttttattgtgtctatttgattcttctctcttttcttctttattagtcaggctagtggtctatctattttgttaatcttttccaaaaaccagctccgggattcattgattttttgaagggtttttcgtgtctctctctccttcagttctgctctgatcttagttatttcttgtcttctgtaagcttttgaatttgtttgctgttgcttctctagttcttttaattgtgatgttagggtgttgattttagatctttccccctttcacctgtgagcattttgtgctataaatttccctctaaacactgctttagctgtgtcccagagattctggtatattgtgtctttgctctctttggtttcaaagaactaatttatttctgccttaattgtgttatttactcagtagtcattcaggagcaagttgttcagtttccatgtagttgtgtggttttgagtgagtttcttaatcctgagttctaatttgattgcattgtgctgtgagagactgtttgttatgatttcaggtctttggcatttgctgaggagtgttttacttccaagtatgtggtcagttttagaataagtgcgatgtggtgctgagaagaatgtatactctgttgatttggggtggagtgttctgtagatgtctgttaggtccacttggctcagagttgagttcaagtcctgaatatccttgttaattttctgtcttgttgatgtgtctaatattgacagtggggtgttgaagtctcccatgattattgtgtgcgagtctaagtctctttgtaggtctctaagaacttgctttatgaatctgggtgctcctgtattgggtgcatatatatttaggatagttagttctatttgttgcattgatccctttatcattatgtaatgcccttctttttcttttttgatctttgttggtttaaagtcttttttatcagaggctaagattgccacctctgctttttttttctcccctgcttgccatttgcttagtaaatcttcctccatccctttattttgagcctatgtgtgtctttgcacgagatgggtctcctgaatacagcacaccgatgggtcttgacgcttcatccaatttgccagtctgtgtcttttaattgtggcatttagcccgtttacatttaaggttaatattgttacatgtgaatttgatcctgtcattatgatgctagctggttgttttgcccattagttgatgcagtttcttcatagtgtcaatgttctttacaatttgatatgtttttgcagtggctggtacaggtttttcctttccatatttagtgcttccttcaggagctcttgtaaggtagggctgctggtgacaaaatctctcagcatttgcttttctgtaaaggattttatttatttttcacttatgaagcttagtatggctggatatgaatttctgggttgaaaattattttcttgggccatacgcagtggctctcacctgtaatcccagccttttgggaggccaaggtgggcggaccatgagatccagagtctgagaccagcctggcccatatggtaaaaccccgtctctaataaaaatacaaaaaaattagccaggtgtggtggtgcccacctgtcgtcccagctactcaggaggccgagacagaagaattgcttaaacctggtaggcggaggttgcagtgagccgagatctcaccactgcactccaaacctgggagacagagcaagactgcatccccctccccaacaaaaaaagaaaagataaattctttaagaatgttgaatattggcccccagtctcttttggcttataggatttctgcagagagatctgctgttagcctgatgggcttcccttggtgggtaacccgacctttctctctggctgcccttaacattttttccttcatttcaaccttggtgaatctgatgattatgtgtcttggggttgctcttctcgaggagtatctttgtggtgttctctgtatttcctgaatttgaatgttggcctgtcttgctaggttggggaagttctcttgcatttaatatcctgaagagtattttccaacttggttccatttttccccatcactctcaggtacaccagtcaaacataggttgcttcttttcacacagtcccatatttcttggatgctttgttcattccttttcttttttttttttctctaatcttgtcttcacgctttatttcgttaagttgatcttcaatctctgacatcctttcttctgcttgatcgatttcgctattgatacttgtgtatgcttcacgaagttctcatgctatgtttttcagctcccatcaggtcatttatgttcttctttaaactggttattctagttagcatttcctgtaaccttttatcaaggttcttagcttccttgcattgggttagaacatgcttctttagcttggaggagtttgttattacccaccttctgaagcctgcttctgtcacttcgtcaaactcattctccatccaattttgttcccttgctggtgaggagttgtgatcctttggaagagaagagttattctggttttgggaattttcatcctttttgcactgggttttcctcattttcgtggatttatctacctttggtttttgatgttggtgaccattggatggggtttttgtgtggatgtccttttggttgatgttgatgctattcctttctgtttgttagttttcttcctaacgggcctctctgctgcaggtctttgggagttggctggaggtccactcctgcccctgtttgcctgggtatcaccagcagaggctacagaagagcaaagattgctgcctgctccttcctctggaagcttcatcccagagggcaccccccagatgccagctagagctctcctgtatgatgtgtctgtcaacacctgttgggaggtgtctcccagtcaggaggcacgagcgtcagggacccacttgaggaggcagtctgtccgttagcagagctcgagcactgtgctgggaggtccactgctctcttcagagacagcaggcaggaacatttaagtctgctgaagctgcacccacagccgccctttcccccaggtgctctgtcccagggagatgggagttttatctataagcccctgactgggcctgctgcctttctttcagagatggcctgcccagagaggaggaatctagagaggcagtttgggtacaacgtctttgctgagctgtggtgggctctgcccagtttgaacttcccagtgccttcgtttgcactgtgaagggaaacaggctacttaagcctcattaatggtggacacccctctccccaccaagctcgagcatcccaggtcgacttcagactgctgtgcaggcagtgagaattttaagccagtggatcttagtttgctgggctccatgggtatgggatctgttgagctaggccacttggcaccctggcttcagccccctttccaggggactgaacaactctgtctcactggcattccaggcactactgaggtatgaaaaatctcctgcagctggctcggtgactgcccaaatggctgcccagctttgtgcttgaaaccctgggccctggtggtgtaggcacccaagggaatctcctggtctgtgggttgcaaagaccatgggaaaagcgtagtatctgggccggaatgcaccgttcctcagggcacagtttctcagagcttcccttggctaagggagggagctcccccaccccttgtgattcctgggtgaggcgacaccccaccctgctttggctcgccctccatgggctgcacccgttgtctaaccagctccagtgagatgagctgggtacctcagttggaaatgcagaaatcacccgccttctgcattgatctcactggaagctgcagaccggagcttcctattgagccatcttgccagccaccctagtcatttttaaaaaacatcaagcagtgtgatatttgatgatcgtttttgtatagtagctcatgctactgatgtgtttgtatgatagtctttataatttatcatgaaagcagatctgtttttctgcctgccagaatgttagctgtaattgagtaactcattaatgtacctaattgtatacttatttttacacacttgtggtctttaaatgaatgtgccttttcttgaattctggccaaaaaatgaagcagcttcagtgtctttgacccttctatgcctgacatgaaaacaatgttttgaggttgtcctcccatataccacatggcataaaagattggttttgccatagtctagtgataccaactttatgtatgcattctaatgggaaaagaggggggtgtctgactagtccaagataagaatacaatgcagtgtctgggactgaacttttaaaaaatatatgttcatttttagaaaaagtcattactgtgcttgctgcctgtctggaaagtgagaatcaaaatgctcagaggattggagcagctgccctttgggctctgatttacaattatcagaaggtcagttttaaaaatcattgttacacctggggagcaaacaacaaggtataacccaggtataaactcttaggatacatccaaaggtgtcaagagttacagcaaaagaaaaaagacaaaatcaaagatccatgttccctttgctgattcatacaattagtaaaccatcagttgaaatctttttatttaatcatttcaacagaatgtctcagtttagaagagaatctctgaactgactttttcctcttaatttaaattgatttactttattattgcaattttagtatagattgtttcttctaaaagacgtatcaagggaaaacacatcttaaagtaaaactgagtaacaaaagttttatccaattgtacaattcccctttatctagctcagttcttgtacgactgcagcccaaagcctgctctgagaaaagggcaggcaacgtggagatttgtgttctactctttctctggcctttggacttccactttattgcagacatgttgttcccaagagaaatacccataagtatctagtgattaagtagtagccaagtgacagtgttaggatagacagccatcctagaatggtgttctctcagctgactgtctctgccggggctagttttctccctgctggccagagtcacgtacacaaggacaagagggtgttgttttctttctcacctgggtatccccagagcttagcacaggatttggcactttgtagtcactctgtaaatatttgttgaccaactgctaatatttggtatatgtgatcagaaatctgaggtttgagggagtatgaaaaactgaaaccaaggatgactagtttaaaatagcaaattgagattaggggagaaggagtaaaagagaagggaagaaagaaaatgggaatagagaaagaatcaagttagataagaggatatgggcaagacttcagaatgtgcaaggggattggctcaataggatgtattatgctaagatggaactctctagttatattattatatttcataatattctgtttaatactgtagttagcaatgggcagaattagtgttttgctatcatgatccataacacatggcaagaaacctaattaatggattgttctaggcaaaaacagctttgaaaagcccatcagtaaaaagaagagtggatgaagcatactccttagcaaagaaaagtaagttgcaataagaaagagattatagttaaactcagaagctattaagtggattttctgattaatgagatatttggacaggccacagcaaaatggcattgtaaaatgtgccaatattcagtatgtgctttaattatatcattttttaaaataataaaatagatagatgaaggtttaagatgtgattgcttctaaaaatgcatctgtgatcttcgtcttatttttgtactaaattttctttgccaacagtgaccactgtgctgaagtatgttcttagtgataagaactggcccaattagaattaactgtgagcagaaaacctggatctaacatcagggagctggaggacagtcttccaagaattgatcctgttacccttatatccacgtttccctgtgatgtggtcacaatactagagacggttttcttttcaaagcacattattcatttttagtgacaccaaatttcagtgagcgttattctctgaacattttttatgctaaaacactgaattgtgtctttcctgtactgtaatatatctgttggttatttgtgtttttatagtctgatttttttttttaagcaggggaggttttagtttgttttagctgcgaccatgaatttctggagctagtgaagttaaagattatgctttaggaaggatggtacataaaaaaagattaatggcattcatttggaattatagttaatggtatccattatggggggtactttttaaaaaatactctgggtaagctgttaatttaaaaaaatattgattttgtaacttgtttattttttaaaaaatgcaaaatattctggaatgctattacatcaagaacttagagctttaaattatatataaatcctgttcatatgtatttgtttatgtgtgtgcctcctaagtatagtaccaagtttcataaactagtatttctgtactcttatttttctatctcagctttcccaaactcagaagcaaaccctctaaatgcctattatttgaaatgtcttgaaaacctcgtgcagctccttaattcttcctgagtgccatgggatgctacaccttgaagctgacagtcatcaacaggggagctaaagttgaagccagctgtgtgtagcagctgttacctgaagacgtgctacctctctacaaagtgttgatccccttctttcccatgagagagagaactggtgatactccaacaccgtccagttgtggcagctctccagaagtaatagcagctgacaactttctgtgccttttcctttctgttgaaaaggcatagaaagttctgggaacataaacatttttacccttttctatgccatttattttgtaaaaatcctatttaacagttatttaataaaacaatatttttagaaactaaaaattgactaataattgctgcttacagacttttatcagtctcatgaatattaattttaggagttgaaataagacactgtgtcctggttgtttctctctttttttaaattttaactgatgtaaaatttggctctgtcagtgcaaatccttattttcaaaactttctgttatccagagcatccacactggaaaagggctatgtagaagtaagtgtgcattatttgtaaagggctgtgtggaagtaaatgtacatgatttgtaagtagctttcttaggcaagttttagtgatgttatcttcttcctagatgactcttaaatcattacatgtataatcttcaccgttgtcttctgcaaggctgtgtaataaagaagaaagaaatagagttggggctgtataagcctgggttcaaatttagctcagcccaaaacatcatgaagaatagagtaagactgaaaaatgcagaagatggccgggcttggtggctcatgcttatactttcagctctttgggagaccgaggtaggtggatcacttgaggccaggagtttgagaccagcttgggcaacttggtgaaatcccatctctcctaaaaatacaaaaattagccattcctggtcttgagcgtctataatctcagctactccagtggctgaggcacgagaatctcttcaacctgggaggcagggaggttgcagtgagctgagatcatgccactgcattccagcgtgggtgacaaagcaagactctgtctcaaaaaaaaaaaaaaaaaaaaaaaa

SEQ ID NO: 15792 - DNA, 79573 bp, Homo sapiens
tattcagaggtaaataaaagaaaatctgctaataattagattgttcttaaattttaagtgtttcttctttaattgtaagtcacatttactttttattttactattagaacaacagcatttattagtgaatacactactaatgtaaatggaaaatgtttaatatttttgtggaaattgctttctaatcctgttgctgagtggaggctagagctgagaaaagctgaaacctctgattgttctttgtgccttgatgtagatgtcatctggtgctcagacagtaaactattatctataaagagagaaagttgcagctgctgttattactatcttctttccaatatctctttcgtctttcttgttttgcttatacctttggatcttggtacattttgtctgattatttcatttgacaggtgttaagagtataggctcaacctgtgtgagtagaaactagaccatcctaaatgactctgagcctaaatttattacattctataaaatgtggtttttaaaaacccattttaatttgattctaatttagtaaggtgttagatgaacacgtttcatgtagttttgtccttcctgtcttctctgtttttttttttttctcaatggagagcttggtaacattttgtactattttttttcttagagacttaggccactgctttttgatattttgcaagagtcatgtagaatcatctgaatgtgctgaagagtcacgtacaagcatctgaatgtgcttcatcttgtctattatcaggcatataggagataagtgagatttatgttcaaaatatgttattataatgtagtcattttattttagcatcttttcctcctgttggcttctgcttgccaagtgagtaagatgcagtttatttaagtagcagccctaaaaccaggtaaagctctaaacagattcagtgtgtttaggctcataacattttgagtggactataacgtttttataagattgtatagactgatcatctgaaagagcagcagttacggatttttagttttctttaatcctgttaataattgtcttcttattaacctcattcacttgaatttagttcctggtttaccttttcatttataattttcatttaaattattcaagcatggaacttattatgaacacctactggattcaaaagcacatttcaaggcaatataatctatacccttttcagtatttcagtttttctatttcattgctgtttgtggaaattactttcaatgagtttgagaatgaatatagtatcctccattaatggatttagtttcaggaaaaattttacttacttacttatttatttattgagaaagaatttcactcttatcacccaggctggagtgcagtggcacaatctcggctcagtgcaacctctgcctcctgggttcaagcatttctcctgcctcagcctcctgagtagctgggattacaggtgcctgccaccatgcctgggtaatttttgtatttttagtagaggctaggtttctccatgttggccaggctggtctcgaactcctgacctcatgtgatccacctgccttggcctcccaaagtgctgggattacagtcgtgagccactgtgcctggccgaaaaattaatttttaaccagctgcttaaccaagaaaacccatttctcagcaaacgtttattaagcacatgctttgtgctaggtgcaatgctaggcccttgggttatattggtgagcatggtaaatgaccctcatggagcttacagtagagttggagacattgacaagtaaatatacagtacaccacagtaatacttgtaattggggattcctggtgccagaggacatgctggtcagattggttggtgaaaagtatcagagattgtttctagggaatgtggcatctaagatggaatttcagaaatgagtaggagttcaaataggcaagattgacttctagatggagccgtggttgtgtgtatgagaaattgatgtgtttgagatggagctggctggatttggggagtgtggagtgaaggggaaatgatgggatgaggcagggagggcagttcgtgcagggcctgggagattttattaaacagcagtgaagagctgtttaaggttgttaaacaggggagtatgtgttttaggaagattatttctgtagcatggatagtggatcaaatgagtacaataaataacttctcagataacactgctttgaattataaactttatgttatgacagaattctatagtgtatttcagggttagaaattaacttagaaatcatttactataccatctgtgtgaggtctagagagatttagcaacttggccaaggctataaccaaaaaatggttattgggttatttactttgctactgagagagaatcgaaacttccttacctttgtttgtttctgttttaaataatcacagacctatacatccccattgtaaaaattcaggcaatatagaactatacaaattctaaaagttttcattttcttctcgttctcaatttccccaaagaagactgttctggttatcattaggaatatatttttccgaatgattttttctacatacacatgtagttttcattctgtatattacagtattgtgttgcttccttttttcaactggaaatgtaacttgaatatctttctatattatttcatgtgagtatacattctttaaaaaaccctaaaaactactgcactggtgttgcagaatttcagtttgctatgttactgggtatttgttttagatttttcaccatgacagtaatcatgttgtgtgatcatctttgtgcattcagtgttggaattcctaggtcaaagagattttataagataatggttaagttcctttccaaatcactctcaccaaaggtgtttaaaaatgcttattttcattacaactttgccaacactgaatatgtctcattaattttttttaatcttataggtaaaaatatataattgttttattttcttattttagttttagtgaagttatcttttcatatatattcaaatttcttcatctatggattacttattttcctgttgtatttactttctttttagtgacttgtagggttttttattataagataggcacaatccttatgcttgattttatgtgattaatattttctctcaacttttctatcctttaaatttatttattattatatttttaaccttaaacttaaatattttatggaaacatatagaacttttctgttatggcagttgggcaattttttatcatgctcttcaagtaggactttctctagttccagattgaaaacacttttcctgtgtttcaagtgttgtttaaaaaaattaaatttgaaatcaggcaaaggcattgctgtaattcttatttatttggaaatattatggttcattctattcatcactgatgtgaaatgtcttttattataagttaatttttacatgttctctgtttctttactttttggtttatggctatttttaatcatgccaattacataaggatgattttcttttcctgcagttaggaaaaatctcttctctcaaaacttcttattgctgcttccctgaatttgctaactgtgtattatgttgttattcctgtgagataacatcgtacttctttgtttagaatttcataggtttcaaggagattgtagcattgggatcattacagaagtgggaactgagacttaatgttaaagaatctcaccagggcatttagctaagtagtaagtggtagagctagtgttaagtctgtccattcagagcacttcccttttccatcatcttgtcataattaaaaggaaccaaaacaatgacacagcccaaggataacattttaaagtcaaatccaagttctgtgatcacatgtttgtagtaaagggcaaaagttataaaataagatctcttggtgaggaaactttagctagaattatctgactcggcataaccttcttagaggctgtatcagtttgtttctctaattacctaagactagacagtgtctagtgagtgtatctacaagtgtggctcctggactggcagcatctgcatcctctgagaacttattagaaattcacattcacaggctccaccctaaacctatccaatcagaaactgttttaaccagccttccaggtgattcttgtacatccacaagtttgagatgaaagcctgtgttttagtgtcaccttatctgggtttatgttgcatttcttttctcttcaaatcaagatattttaaatttgaagttcattctttctagacgtacaaatatttcataaagttgtgcttctttttattcagtttccttaatatttcatgaagattgtagtgtcgtgactgaagttggagcactattttgtcttctattatttgatgaagtatcgagaatggatatgtggtgagatataagaatttataagttttttactcttaactatttatctcaggtatctgatgtaatcttatagcaaggcatggaaatttctgatttacgaagcttatgctgtccatgctacacatatgtggtatgaattttgatttgaataaacagtattcaaaagcctattagctcagaaagtctatctcaaattttatttttaaacattactaaatataaactttaaaattactgcagtaatttttgtctttaatacatttttagtacataccttcaactatgtgtttttttcttaatatttcatgatttttaaaaaacctcggaagatatttaggacgatagtatatgattagcgctgatcttgagcaggatccgtgggaggagacgcacaaagtccacctgctagtcccaccactgcattgtatgaatcatttgttatgtggaatttttttttaaaacataatttactcttcataagcaaatctaggaagtagcaaacatgttgtttctatactaaatgatagactcagttgcactgcttgatttcatttgcagtcaacgaagtgaggtaagttgtatttgttagacaaaacttggtctactcagttgtttctttgtttttgtttttcttttatgaaataggtctgttaatccttccaataaaccttctttgccatcggtcttcagtttgcctgtttccgtttttagaaggtaaaggatttatttctctgattttcttgaaggacgaaatgttgttacagaaagggaaatcaaaatctataatttgtcacaattttcatttagcatttaaatcccataacttgggctttcatggttccttcacaatggtgctttgaagatttcagtaagtatatctccccaccaccaattttttattttgataccgttcaaatttacaggaaagttgaaagctatacggtgcatacttgtatgtcgttcagcctagagtcatcaattatttacatatgagtctctttgctttctctctcctaatatatatttttatttatatttaattctccctcacccaccaattggaaataagtttcagacataaattcactcctttcctatatattccagcatgcacatccttaagttaaggacattattctacataactgctacaatatgatcccatctaacaagattaaaaataattctataacatggtgtggtttctccagttatctccaagtatcttttgtgtatattttttcagaatgcaataaccagttaaggttctgcattgtatttggttttcatgtctctttagacttttgtaaaaagtaaattgtttttattgacatatatcgtacataaagcatacaagtcataagggtacagcccttgaatttttctgagtaaacgtacttatttatctcacacagattgacatagaatattactgacagaccggaaaccctttttgtgctttctcattaccttctaccaccccaaaatgtaatcctattttaatttctattgctgtacattatttttgctagtttttgaactttataaatagagtgcattattatattgctttttgctcaacttggagagatttgtccatgttgctgcatgaagcaatcaatagttggttcatttttattctatgtagtattctgtctaagaatatacaacacttttatttaccattctatttgtggatgtttaatttgttttctgttttgggctattatgaagaaatgactgctaagaacattcttgaacacgtgtcattgttggaatataggatatttatgtttagctttagtagatgttaccagacagtattacgaagttgttgtgctgatttacattcctaccatcagtggaaaagtactagctgccccacatcctcactagcctttggtatttgcattaccagtcttaatggtgtttagtttggctaaataatgaaactcacacgactgcagtagtcatgcttagaatgagatcacatttgtgggtgctgggagctgtcttggcttggaagcctcatgtcccaaatagaaaatatgttctctagtaagtgtgctgtaggcatagtttccaggttgcttataagagccacagcactcaagattgctcagagctgtgacatcccatcatgcatttatagtttattcctagatgtctcagtccagatgtggggagtcattttcatcataagcaaagcagcttagtaaattcttgacattccatatctatctgattttactgggtaaagggacagagagttacctcaatatcatgtttgtccgtaaagaggagaaagggttttattactcttttactcacagtaatgttggcatttaaaaaattgttgcccatctgatggatgtatagtgtatctcaaagtggtcctgatgtattactctttgctttttattattttcttccttctgtgtttttcaaacttaattttctgttcattttctaacttactggaggattggccattgattattagccgccctttcatttaaagctatcaatgtttctaagtatggcttttggtatattccacgaatttgatatgccatattttattatttagttcaaaatattttctaagtgttttgtgatttttttttattgatgcaagggttgtttagagttattgggggtaactagtgaagatttagtttattaggttttctagttattttattattaatatttagctaaatattgacattagaaaatattttctatgattttaattctttagagtttgttgaattttactttatggcccagcatatggtcagctttttaaaatgttccatgtgtacttgaaaataataatgtatatgtagtagttgttggatatactgttctataagtctcaaaatatatcaggtttattgatagtgttcagatcttccctgtgtctactttattatatgtgtgtgaagttctttcaggtagcagagaggcatgttaaaatctccactatgacattgtcattctggctgacaatgtattttgaggccatgtaatttagtttgtaaacatgctggtgggttgtctctatcattatgaaattatttctttatctctagcagtgcttcatcatatagaattcactcgatctcttatgactgtagcttccccagcttttatttggttagtggttagcatgatatgtatttttccatccttgtagttttagctgttctgtgtccttaaatgtactttttttttttaagaagtatatagttgagtttttttgtccaatctgacattatttacagttttaatggaatattttaatgcattttacatttactataattactaatatttttggatacagattattagcttgctattttctatttgtccaatgtggtttttttctttctttttcctctctggcttttcttgattaatttttaaaattagtccatgttttccagctgttaacttgtagttacatatacattaagtattttatttatttatttatttgtagcgattgggatcttgctttgttgcccaggctagtcttgaactcctggcttcaagcaattctcccacctcagcctcccaaaagtgttgggattacaggcatgagtcactgtgcccagctaagtattcttctatatacattatttctatatattttatacagatgattattcttttataatatagagattataatttacttccttgactgtgaactagtatttttaccacatcccagacaatgcaaggaccttagaacacattaattccatttatttgctcttcttttttttttcttttattgtcaggtatttaaattctatacatattttaaattctataagatgttattataattattttatgcagtaaatagtcatttagatttgtataccgtggtcgtttctgttactttttattgcttttttggtttttctgcctccatctgagaatttgtttttttaagagttttttattatttaatgtagtgcacttatattagcaatgatttctgtcaggttttttttttttttaatctaaaaattctttctgttttaaaaaatgttatcactaggtatagaattctaggttggcagttggagtccatttttttgtaggaacattggctgtcagttttattgttgcttctttgaaggaactgtgttccccattctcttaggagttccttcagctatatcccacagcactttgcttgcttgcttatttatttgggggagtttattttatttttatgggtatataatagtacatatttatggagtacatgtgatattttgatataagcatacaatgtataatgatcaaatcagagtaattaggatgtccattacctctaacatttattgattctctgtgttaggaacatttcagatctgctcttctagttattttgaaatatacaacaaattactgttaactatttttaccctattgtgctactgaacactagatcttattccttctatctaaatttttatgtacccattagccatcccttcttaattccccccttccccaccatcctttacagcctgtggtaatcatcattctactctttatctccatgagatcatttttttttttttttagctcccacatataaaggagaacatgtgatgtttgtttttctgtgcctggattatttcagttaacgtaatgacttccagttccatccatgttgtttcaagtgacaggatttcattcttttttacatctgaatgatactccattgtgtatttataccacattttaaaaaatccattcatctattgatggacacttaggtagattccatatcttggttattgtgaatagtgctacaataaacatgggagtgcatatatctctttgacataccaatttcctttcttttggatatatacccagcagtgggattgttggatcatatgtaggttctgtttttagttttttgaggaactccatactgtttccaataatgactctactaatttacattcccactaacagtgtgtgagcattctccttcctccacatctttgccagcatctgttatttttttttgtcttgttgataaaagcctttttaactggggtgagatatctcattgtggttttgatttgcatttctctgatgattggtaatgttgagaattttttcatatacctgttggtcatttgtatgtcttttaagaagtttctattcagatcttttgcccagcttttaattggattattattattattattttgctgttaagttgtttgagttccttatatattttgatggttaatctcttgccagttgaatagtttgcaagtgttttctctcattccataggtggtctcttcactttgttgactgtttcctttgctatgcagaagctttttagcttgatatgatcccatttacttatttttgctttgcttgcctgtgtttttgaggtcttacttaataaatctttgcccaggctaatgtcctgaagcatttctctaatgttttcttctagtagtttcatagttgcaggtcttacattaagtctttaattcattttgatttgattttcatatgtggcgagagatagagatctagtttcatttttctgcatatggatatccagttttctgagtaccattcattgaagagactgttctttccccaaattatgttctcggtgcttttgttgaaaattgaccaaatgtgtgtatttatttgtgcattctttattctgttttattggtctgtgtgtctgtttttatgctagtatcatgctgttttggttactatagctttgtagcataattcagagttaggcagtgtgatacctccctctttgttctttttgctcgggattgttttggctatttaggaccatgttttgttccatatacattttaggagttttaaaatttctttttgttccttttaggatgcaaatttacatgcatgttagattatttcaccatgttaaaggaaaaacttgagacaaaatacacatgcatgtgtctttacggtagaacaaaattaactttggtttaaaagatactgctattgaatctgtttttatttctaaacatatttcttggttcttgttgaatttattgatgatgaaaccatgttctcaagtgaaaacaataagctggaattcagtcatttagtgacctctatgatcataggcaattcatttatcagctttaagcctcatttttgatcatttgtaaaataggtatcatagtgccataccatgtaactgtgaatgaatgatacaaaataagcagtgtttggcataaagtaaatatcagtgttttagctgaacaccttttatgtttggttcactgtattcatggtccctgacttcaaggagcattagttatctccacaacaactctaatatagcatagaatgtggtaagtcctcaagaaaggatttaagtgttctggggagtttagaggagatgaaaagaataattgaaatactgtataaattatgataattgtttaaaatagggactaagagaaacctttgcattattgtgggttgggaggcattgaactagccctcatttgtggctcatctttttgagtagcatttaagaatttgaaagtttgtaattatttgtacacattttctttaggtaccatctacctgttcatgtaattggacaccatgctgtgagtccttactccatagttttgcccttatctgctgattgtttggccttgaagccggtgtcagatatgctgagaatagcttggaacctgtcatggtatcatgggagtgataatctgttgaagcaaatgaactctgaaactaaaacgcaagagtaagctcttatattagtttaaaaagcatttgcaattaattaattgtaattaattagttaagttttactttttccttaggtccagtagctttttcccttggtatcatctgattctgctttttaacagttataatttttactttcttttaaatattacatgtgtttattacttttaacaatctatcatatgggaaaactttaaatgaaaaagcattttactctgtactgttttagaggttaaagtctgatttgttcgtagatatgaatcactaggaaaagggtcctggattagaacaaaatctcagtaagtatatgcatgagtgttatcattagtgtgatggtgattacttttgaatatcttaatattctaatctgtctgtcttaagtgaataaaaatttttataaggaggaaaagtcaatataaacatttgggatgccaatgtaaaatcctaatattgacagatatgtatcagtttttcttctggctgtaagtcaaccttttgttaaaagaaaatgaagataaaacagcttttgggagagtttataatagaaataagtgtgagcttttatttaaatagctttatgttcctccttcattttttttctttttgtctagaattttagatgcattgaagttatctacagaggacatcctcactctgaagataacacacatggctagtgggctgcaggactgcctccattccattgttcaggctgcaacccacagggaagttagggctgctgtcaccaggatgagtttttatcttctgaatgacagattgtctttaaagggttgccctggtccatgtggggttaccttgaagtccttggcttggcacaccgcactaaacaggtcagtgtaaggtcaaggctgccagtttcaaagacctggattgcattgtattgtgttcatctcctaacctttgaagataagagtctatgcccttactgctgctatcatagaaagaaaaactccaggatttttatcatctgtaataatagccaaagagaaatttttaatttagttattgcattgttgaagggattattaataaacttgtaacaatttattcttagaaaattttacctcacaaaagcaaataattaggataagacatggatgaaacaaattgaatgtttatttctatccatgttataaatgagttgagacatcagtgaattgattaatagctgtgatacacctgccacaggctgttttgttttgcttttgttttgttcttaagtaaattatatcatttttctttttactctcaatttcatgaagttgattgccatgtggcggtcctttatagcagttaattgagaaggctctagcttgtcaatttaacatgcttaacttgtagcagatggttgcatttgcaacaagactgataagcaaccactgcaagcaggttttcattttattcttcatgtgactttagtataaaatgtataactttattatttaacataaaatgtgcagtttttaagctgctaggttaaatgagtttccaaaatatgaattcctttattagtttagctttaaaaattagtttatctgattaggctttccagtggtgtgctggtgcccactaatgcagccttgtgagagagctgatggttgaattttcaggatttttgtaaggtgattgttaaacacagccattcttaattatataaacttacaattaaataaattatatgaagacaaaaggtaatgaatatgcaaacatcactttctaattatgtggcaacattttactgttatctttgttcttgaggttatgcatacatatgcactacaggggtatgtattttatggaaataactacaatggagtaccactgtgcatctcttcacaacttcatgttacatggtagctccacattgtctacagtagtatatttacaccatggaaattgacaaacacaataagtcagcactctcagttacatatttatcagcacactcccgcatttaaacagtctcgccagttgaagaatgcataaatccttcactttaaataaatgtaatatgtccctatttgtcaaaagaaattttaacataaaagctgattgaattcattgcactaagttttctttctcttgtgaattaaaaccatagaaatagtatgcaataccacattacaggaaagactctcaaactgtgggtcagtggaagcctttagagtatttcaaattgcccaatagcagtaactgtatgtgagcatcacattttttatggttagtttcctcaggactagtgtaagtggagagtatagactgtgtatatgtttaatatatacacacatgcatatataatattcatcttgtatttggtttttaggcctgtgtttgatcatggcaacacagacactactgcctaatttataaatattcatgtatttctgctgtattatgtttcactaaggaatgtatcaaaaatatatatcacagaatccaccttttttcatgaaaactttttaaaaactttacttccagcaatgtatgtactaatgaggctttgggaaactttagttttgctttcattcagtttaatgatagaaaggaacattatctttttgactgattatctaagatgaaccaacagcttaaagggtgcttggagatagaagattcccataaatcatggctgtataaagtattgagatattgagaacatttttataagcttagtttaatatttttaaaatacagctatttcaaattatatcattctagacaaaacaaaatatagagaagcatgttcatacctgtgtgaatggttttttattgtattttaaaaataatgttattttttacacattttccatgtcagtaaatatactttgaggctaatttttcaaatatatgatatatccaaatgaatgttccgcaaaagaggtccttttaggagtgagtgtgtatgttagaataattctggctttgctcagatattttgaaattgtcctctcaggtcatttaaacagcagatgtaaggaagtcttattatattttgaagttatatttaattttttactaaaaaatgatattagcaaactcaactatccagagaagggtaaaaatgatttttacatgtataccgaaatgaacaccaccctaaaccatgactatttatcactattaacaaaagtatatttcagtttgacaaaaaacatggtttctaaaatctttttacttacggtactgtggcttctaaacataactttccaagatgattattttaacagcccaacattaatttatgtgtatgtttttatatgtgtatgctaacacacaagcatacaattataatctaatatcattttggaaacttattttaagaaaacagatgatagtcatggtttagtaggattacaagttgtcagaggtatctagagtcttctttcaactagtttctgttgagtttgcatgtttaatgcctctctactcctttcctactggaagtcctattgctactgtttttctccatttttcaccagactgtagactgactagcgaattggtttttctgcttttaaccttatgccactcatttatgttgcttcctgaatgatccttctgaaatacatgtcacctgtgggttctcttccatggtgtgctagatattaatagaattccaaccccttagcatgctgtagaaagttctttttgatctagctcttgcttaccttttcagctacagtttcctcctctctctctaacatatgctgtgtttctatgaagtgcaaatattggggttttatgaaactgcttgatattttagggcatacacttctgttttatacatccttgcttttacatagttaactccttggctgccttgtgaatatctactcttccttgagctccagggtcttcttactctgtgatgtatgtggaattctagttaccctgattgtcatgtggctttcctgcattacttctacagttgtttaaatatttgttttctcatgtgccttgggtttattacattcctttttatatccctcacatatcgcataagtcatagtatacagttggccatgcagcctcagcgtgaacacctcctttgaaggatattcattctgtttttgcgctgtgattattcgtaagttttttgttcttttagactgtacctgatcatttctacctgttattctgtcctttaaactcacagaataaataatgtcttcacatgtgacagctcttcatttaaacataactataatttcttctctattccccccaccctgctttaaatgatttgtttttttttttagatagactttaaaagccacagtgtccagacttctcatttgttcatgctattttacaagggtattgtgtttcttaggactctccctgagatctggacatgataccttatatgggtgtggtgctgtggcatggggtgaataggaagaaaggggctactgcctttcttttcctactgcttttccatcattcaacaaacatttattgatcacctactaggtgtcactcttgtaggaaatatagcagtgggcaaaactgatagggtcctgctctcatggaacttggaattaagacagctaaaagtataatcaaaagtagaaatgcttccaagcagactattaggaaactgcattagaggagcaccctatccctcttcagtagagagaaagtggttcagagaatgaagcttaagccaaggcataacaggtagaaggatgttaaaagtctatgggattggaagccgaaaagataccaggcacacagagaaacaaataccacatgatctgtcttatatatggaatctaaaaaagtcgaattcaaagaagtagagtagaattgttaccagaggcaagtggcaggtggatatgggtagggaaaagggagacgttgctgagaggttacaaaattccagttagacaagaggaatgagttctggtgatctcttacagcatagtgactatagttaataataatatatgtttcaaaatagctaaaagaatagatgttaaatgttctcaccacagagaaataagtatttgaggtgattggtatgttaattagcctgattggatcattccacaatgtatacatgtgtcagaacaccacattgtatcctaaagatacatacaattattatttgtcagttaaaaataaaacaaataaatggaatatagtttggtgcatgttatgtgacagaaatttgatactttgaatccgtaaatggatggtcagttgactcacaaccacttgcagaatatattatttctcctctagactaaaatgccatattcaacaaatattatacaaattaattttttttttaaatgccaggcaaagggataggccctgagttaggaaagagtgtcttgtgtcttcaagaggaattgaaaagaggatagtacacttagatttaggggatatgagggtggttataaaatggggttacagaggtgatattttaatgttacactggatatcatagaagacttcttataatctttgtgattgttaaatcataaatctcccaaagatctatggttgttagaatcacctctcaattttcataatccggcacttgccatcctactcagctgaatgtcattttggggatgtgagaattttaagtaaggaaaaataataatgagacaaacaccacattactaagaaatacagcattatatatccctggtgttggactgcttagtttagtattcctgttttaaaacttgctagccgtgtgactgtggaaaaacgacttaaccatatttttgcttgggtcttcttgtctttgaaatagaggtgcctacttcataatgttgttatgaagtttgacagaaaccctgctgttagaacataggctggcacaaggttggtgctccataaatgctgagtattaagattcgtattattgtcactcttattaacattttgatgcaatggctttagatttataaaaaataaaacattacagataaaattggatctcatatctcttgctgattgctttttaaaaaaaacgatttccaaactacttctcccttttaaataaaagttttattgtctactaatcttttagctctcttaaaccagtttttttttttaaagaaatcttagaaaattggctcatatccttttgctctgaacttaaaaagaaatttcatcctaagtctaccttcagtgttttccttgcctgttacaaactctagtagcgtccttgcaggcctttttttccccctcactttattaccttattttttcgagttggtcagaattaggtttgaagtactaattcttctcatcagtgaaacatgacattcccagtatgaaaagcaagtttcactgggcggttattagagtcagtgtttttccccttggtatttttttggtactttttctgaatttgttatttttctcttatgatatttgtcacttctagttattttagttacttgtccacatgttttttccactataagctcatgttcttgaaggcagatacccagtttgtttcaactttgcattttccaaagcatttaaaacagtgtctcataaaatagcatcctcacaagacatctgttaagtccacatatctatgatgaacagtggtattgtgtattttaaagcgccagaaaccatgattattgtcttttcattataggtttttacaggtgcttcctgcttgcactgaagatgagaaactgctaatagatatcatacattttttaaataaattaataaaggaacaaagaaaaaattcttcactagaacttctaaactggattctcgaattacttcttagacatgtaagtggtgttaaggaatttggattttaagtttgggaaataacttatttgtagaaatcattaacattatattatggaaaaggataattttatattgtctatgcttggtaaagtagtcttcatgtaatgaatggctcataacaacatggctttcctgatacgattgtgaatgtgtttattaaaattctgtacagtgaatgggacctacagtcttgtgtttaataaaacctgttctgcatgtgaactttctgctgcaactgtatttttaagtggggatttcagttcaggtggcaggggacagggtggatgtccagataggcatgttgagagttagctaacaaagccagatggaggcaggagggggtatagtgatggtgcagttataaagataaagtgtgttcaggccttaaataacggttactggaatatttacccttctagcccccactactgtcagatttttagctcttctaaaaattctaaattttttttttttattttttttgagacggcgtctcgccctgtcacccaggctggaatgcaatggtgcgatcttggctcactgcaacctctgcctcctgggttcaaatgattctcctgcctcagcctcctgagtagctgggattacaggtgcctgccaccacgcccagctaatttttgtatttttagtagagacagggtttcaccatgttggccaggctcgtcttgaactccggacctcaggtgatccgcccaccttggcctctcaaagtgctgggattacaggcgtgagccaccgtgcctggctctaaaatttttctaaatagctattctaaaaattttggctattcagatttcttattctaagaagcgtgtgaagaacccaagaagccaggtccctgttgttggtctatctgtctctttatgtatttatttgcaaataccgtatgaatttactcaacttagctaagataaagctttacacaaataagaagaaaaacaaaacaaaactagaaaagagggcctaaactgatataggacatagtggatcttataaggcaaatatgtttcattatatattaacacatttgcgaaacttagagataattttatgtaaaaatatgaattactgtgttgtcagaaatgctaactgatatgaatgtttgtgtgtatataaaacttatttagaggtttattatcgtcttaggctgttttctgttgtttttaacataatatcagaagctgggtaatttataaaaaacaaaatttatttcttacagttatggggtgcaggaagtccaggtttaagagggcatatctggtgagagccttcttgcagtggggactctctgaagagtcccgaggtgatgcagggtatatgtggtgagggggctgagcatgctgatgtgctatctcaggtttttctcttcttacaaagccatcagttccccttccatgataacccattaatccactatccatgaatggattagtctattcatgagggtagggccttcatgatccagtcacctccaaaggccccacctctcaatactgttactttggggattaaatttcaacatgaattttggagggaatgttcaaaccatagtaattatcttttcctttattgtagattggtgaaggtagggactgttttgttcattattgcatacccagcatttattatagtgccttgcacatagtgagctctcaataaacatttattaactcagtaataagctatgtagttaattacaagaagcacacaaaaccttaattttatcactagttaagatttaacaaaaatggaaaccatgtattactttcaaggttacttatatatgcaagtatatttatagactgaatttctagaattgtaattgctgagtcaaattgtagaggtgcgtgtgtgctgaggtttttgtggttttataaatagataacttattttgaattagatggagattttttcatattcggtcttttcatgaattgtatcttgatgtccttgctggttctccgccacaattgggttgttagtctcctttcatttcttctttcctgtcctttcttttcctcccttcccttctcccttccctttctcctttgctttttccttccattttcctcttccctcccctcccctttccttggagcgtgatttcattctggtacctgcaacttggacattagtgtagagatctttcaccttttgattaaatttattcctaaatatcttaattttttttggtagctattttaaatgaggtttttttttgggggggcgcggttactgtatagaaatgctactgattttttataagttgattttgtatcctgcaactttattgaattcatttttaagatcaaagttttttggtggagtctaggtttttctagatttaagattatatcatcagcatagagggacagcttaacttgccttttttctaatgtggatgccttttatttctttctatatactaattgctctggctaggatttccagtaccatattgaatagacatggtgagagtagacatccttgtcttgttcctgatcttagagaaaaagctttaaacttttcaccattgagaatgatgttagctgtgggtttttcatatatggcctttattgtgttgggattccttttctacttaatttattgagagtttttattatgaaaggatgttgaattttgtcaaatgctttttctgcatctgttggtataatcatgtggtttttgttcttaattctgttaatttggtgtatcacatttacgcatttgtgtatgttgaaccatccttgcatccctggaatgaattccacttgattatagtgagtgatctttttattgtgctcttggtttcagtttgccagtatttggtaaaggattttttatatctgtgtttatcagggatattagcctgtaattttcttttcttgtagttcccacgtctggctttggtatcagtgtaatgctgccgtcataaagtgagtttggaagtattccttcttcatttggttttaggagtacagagattagtattaattctttaaatgtttggtggaattcagcagtgaagccatcaatcaggtcttgggcttttttttggtgaaagactttgcattactgatttaatctccttattattggtctgttcagattttctgtttcttcatgattccatcttggtagctctatgtgtctagaattttttccacttggttgtccaatttgttgacatgaaattgttcataatagtctcttacgattccttgtgtttctgtggtatctgttgtaatgtcttcccttttcgtttctcattttgtcttctttttttattagtctagctaaaggtttgtcaattttgttcatcttttcaaaatctcaattcttgattctgttactgttttctattgtttttccagtttctatttcatttgtatctgcccttatcttcattgttttctttttactaagttttggcttcatttatgcttctttttctagttccttgaggttgtttacttgatatctttctttttgacatagatgtttattgttatgtatgtccttcttagacctgcttttgctgtatcccataagttttggttggtttggtgtccatttttgtttgtctcatgatattttaaaatttcccttttagctttttctttgacccactgattgttcaggagcatgttgcttaatttttatgtatatgtgaatactccagaattccttcttttggtgacttctagttttttatcactatggtcagaaatgatattagatatgatttcagtcttgttatatttgttaagacttgtaacaccatacatgtactgttaattttgtagtatgtcataaggtttatgtatattttataatttattcatagttatgaaattaaaattaaattcctacaagactctagatgattgtactataattttaatgcagtttttgaaaaggatttttggtacagttacatttacttatttggttttgtatggtattaaacctttcttcggaaagcttctactttatctcatatattatcaccacaagtgttataaataatactacttttaagagtgcacaaaagtgaacttaagtgttcactatcagttgggtttactccctaaatattatgctacaagataaattaatatatgttatataactaccaatgtttaggataaagggaacctggaaatagaaaatcaagtaccttttaaagtttatcctttgaagtgagtaaaataagtgagaaatgatttaagaagctcagtaaaataacatttccaagtaaattgctttgaatgtatggacatacatgaaaagatatacaaaagttgtggttgcaaaaacaaaattaggcagatatgaacgcctgattagtcagaagaatgctaagaggaagtgaaaagaaaaatcagctaacttcccgagggaagatttaggaactttctcttgtgaaatttttttccatgtgttttatcaagacattcacttattacaaacatattgtaattcttaggcaatttaggagtttattgcacctctaatctgtttttaatatgatattttgtttatagtaacctagaagtgctgaatttgaatacctttctttttggaatgcatttttttgatggaagttcacaaatgtggggctgttagtttttttcttcttttggtgaagctcagcagaactacacagcatatatattttccttggctggctttcccgtaacgggctcaatgtgcactcagacattattgagggtcttgcagttacttttggcatagcttgctgatggatgtaaagttggatatgatgagtggtaactgtgtgtgtaaacaaaatgagccatcattatagaaatggttgccttttagaggtcaacagtgacaaaataatggcccaagtagttggtttaaaattaggattgaatcctaacgtctaaagacaaaaacttcagatatgattaagcacttgacatctgtaggcatcagtagagacatcttattctactctattgtacttgagaaatggtaattcaccctatattttacaagtggtattgctgaggttcactgaatttcagtgttaacatgtaaatcaaaggtgaaaagagaaaaaaaaacttcagtaatcttcaagtggaagcaagttattaataggatgagattctttgggagaatcttaatttttaggtatacacatactgtttcagtatattcatgtattaatagtagcttctacttaatttttatcagcatatcagaattaataattcctaataataaaattgttttacaagatggagtttgcgtcttggtataaacagtttgttcattttgtcagtagttttgggagtcagaaggcacgtgaatgtgagtcagcttttggatatttagggctcagaacattatagaaaatttatttatttttatgatttactaaatgtgtatttcgattcttttattcatgtatgaaacataaaagttgcagttatgtcttattcaatcttaatttatccaaagacatatattgcttaagataaaagaaaaagttgggaaaaaaactatttagatgttaaaatactgtaaaataagagcaaaatgtcactactagtttccaaaagctctcagttatattatttataattgtatatatctctatatactataagcaatttagaggtttctttacatattttcatttcttttccctaaagagaatgcagttaattttgagttgagctcttttaggtgaaggattttataagaacaatagttacattttgattgtatctctttttgtatgtttttacatgcactagtgatgtgacactgtgctgaggatggaatattaactagctttggagtaagatgcttcttgctctgcccttgtctgtctaagacttagacaattatttaacctctttataaatctatgttcccatctgtaaaacaggaatgaaaatgcaaatcttctagtttattcaaaaagtcaaatgaaatcttactatcttttttttttagcacagtgcctgaggcatcatagatgattaataaatatcccatatatctattaatgcttctgattaatgtaacgttttcttttgtcaatattattagaaataatcctcttatattcctttatctattttttttttagttgggaaaagaggaaaaactttagaaagaactagtatttgtttactagcctatcaaggtggcaaagattattgcagtaataatccacatagcactggcttgggtgctgtgggtcttttcatgtcctgtgtaattgtatgtattggtacattttttacagggacaatttggcaatatatatcaaaaaattaaaactactataatattttgatttagtaattttattgcagaattcatacataagataaaatccaacttgagtacactgtgtgttgcagcttagtgaaattatgcatcattgattatccaggagttagtgtggtaaatccttattgttgaaaaacaatcagatattaaactaatgtttttgcagaaatattgttaataacgggaagtaggaaaaaatggttacagtagtgatttttttcacttgatacgggtttgtgaaaaatgtactgttttaattctgtttatattctcagaaacaaaaaggagagttatatatcaatatataatagtggcaatttctgtgtggcatgattatgtgtggttttgtttttctcgtcctttttttctattttatatgataaatatgtttttcttttgttgagaatatattaaacatcttttgaatttagaacatctctactaatgcagtaaaggcccacacctactagttaggtaatatagctcttactagaacttgcttagcaaccaaaccctttataggaaacaatatatagttcaattagtaaatacattttttacaaatttcattttttagagtgcaaacccactgttagacctcttggttctgacagagtcacaggcacgagaagaaacagatgatatccggactgctgtcaggcaacaacttcagaaagaactgattgctctttttgataccttgctgctcaatttcatggaagttactgacaggtaccatttgtaatattgcaggtttaggtgcatttatatagaacccaagttttctttgattttcaaagttttactttgtacttctttcaaattaagaaatacttctttcaaatacttaaataataatcagttatagtgttctgtttgtttttgtttcagtttaatctgttacagcctgattgtacctgcttggtctctttcactacacacatgcactcacatatgcacacacacagttttgttctctagggtttaattcctggttctctcttaattatctacaaatctacttgagcagtcatacctatgcctatgactttatgattatctttacactgatgactttcaaatacatatctctagttatgaattctgttttttaaaaataaaaatattaagatgaaagtcactattttaaccattttaaaatgtacatttgaatggttttagtatatccgcaatgtttgcaactgtcaccactacctaattccagaactttatcatcaccccaagagaagccttgtatccatgaaaaagtctctccctattcacacattcctctgggccctggcagccactagtcttctttctatgtctgtggatttgcctattctggatatatcacataaatgaaatcaaacaataatgtgacctttagcgtctagcttcttcacttagcatcatgtttccaagctccttgcatactgtagcaaatatcactacttctttctatgactgaataatattctatttatagatatgccatgttttgtttatccattcattcattggtggacatttgatctgtttctaccttttggctattatgaatagtgttgctgtaaacactcatatacagatttttgtgtggacatgtgtttcagttctcttgagtatataattaggagtggaattgttggttcatatggtaactgtaatggtaactctatgtttgacttttcaaggaaatgccaagctgttttccacagcagctataccattttacattcccaccagcaatgtatgagtgtttcattttcttcatatcctcaccaacacctgttattatagcatcctaatgggtgtagactggtatcattttggtttttatttgcatttccccaatgaaaaataattttgagcatcttctcatgttcttatggctatttgtgtatcttcttcggagaaatacctattcaacatctttgaggatttagtatcagtgtgcatcagggatattggcctgaaattttccttttttgttttgttttgttttttgctttaaatatgtcccagagattctggtacattgtgtcttcgttctcattgatttcaaagaacatctttatttctgccttcatttcgttatttgctcagtagtcatttaggagcaggttgttcggtttccatatagttgtgcggtttggagtgagtttcttaatcctgagttccagtttgattgcactgtggtttgaaagactgtttgttatgatttgcgttcttttgcatttgctgaggagtgttttacttccaattatgtggtcaattttagaataagtgcgatgaagtgctaagaagaatgtatattctgttgatttggggtgaagagttctgtagatgcctattaggtccgcttggtcaagagctgagttcaagtcctgaatatccttgttaattttctgtcttgttgatctgtctaatattggtagtggggtgttaaaatctcccactgttattgtgtggtagtctaagtctctttgtaggtctctaagaacttgctttatgaatctgggtgctcctgtattgggtgcatatatatttaggatagttagctcttcttgctgtattgatccctttatcattatgtagtgcccttctttttctcttttgatctttgttggttttaagtcttttgtatcagagataaggatggtagctcttgcttttttttttttttttttgctttccatttgcttgataaatcatcctccatccctttattttgagcccatgtgtgttttttgcatgtgagatgggtctcctgaatatagcacactgataggtcttgactctttatccaatttgccagtctgtgtcttttaattgtggcatttagcccgtttacatttaaggttaatattgttatgtgtgaatttgatcctgtcattatgatgctagctggttgttttgcccattagttgatgcagtttcttcatagcgtcgatgttctttacaatttggtatgcttttgcagtggctggtaccggtttttcctttccatatttagtgcttccttcaagagctcttgtaaggcaggcctggtggtgacaaaatctctcagcatttgcttgtctgtaaaagattttatttctcctttgcttatgaagcttagtttggctggatatgaaattctgggttgaaaattgttttctttagaaaggttgaatattggcccccactctcttctggcttgtaggtttctgctgagagatctgctgttagtctgatgggcttccctttgtgggtaacctgatctttctctctggctgcccttaacattttttccttcatttaatctttggtaaatctgatgattatgtgtcttgatgattatgcattcttgaggagtatctttgtggtggtctctgtatttcctgaattggaatgttggcctgtcttgctagattggggaagttcttctggataatatcctgcagagtgttttccaagttggttccattctctctgtcactttcaggtacaccaatcgaacatagatttggtcttttcacatagtcccatatttcttggagcctttgtttgttcctttttattcttttttctctaatcttgtcttcacattttatttcattaatttgatcttctatcactgatatcctttcttggtgaccttcggttgggatctttgagtggacgtgctgttcctttctgtttgttagttttccttctgacaggcccatgtgctgccggtctgctggagtttgctagaggtccactctcgaccctgtttgcctaggtatcgccagcggaggctgcagaacagcaaagattgctgcctgatctttcctctggaagcttcgttccagaggggcacctgccagatgccagccagagctcttctgtatcaagtgtcggttggcccctactaggaggtgtctccccgtcaggatacacgggggtcagggacccacttgaggaggcagtctgacccttagcagagcttgatcggtgtgctgggaggtccactgctctcttcagagtcgtcaggcagggatgtttaaatctgatgaagttgcgcccacagcctcccctttctccaggtgctctgtcccagggagatgggggttttatctataagtccctgtctggggttgctgccactttttcagagatgccctgcccagacaagggaaatctggcaatctggccatggcagccttgttgagctgcagtgggctctgcccagttcgaacttcccagtggcttagtttacactgtgagtgtaaaactgcctactcaagcctcggcaatggcggacgcccgtcccctcaccaagctctagcgtcccaggtcaatctcagactgctgctgtgctggcaacgagaatttcaagccagtgaatcttagtttgctgggctccgtgggagtgggacctgctgagccagaccacttggctccctggcttcagcacccctttccagcggagtgaacacttctgtctcgctgctgttccaggcgccactggggtatgggaaaaaagaactactgcagcttgtttggtgtctgcccaaatggccgcccagttttgtgcttgaaacctagggctctggtagggtaggcaaccgagggaatctcctggtttgtaggttgcgaaaaccgtgggacaagcgcagtatctgtgcaggagttcctcaggctcagtctgtcacggcttcccttgggtggtggagaaaattccccgaccccttgcgcttcccaggtgaggcgatgctccaccctgcttcagcttgccctctgtgccctgcacccactgtccaaccagtcccagtgagatgaaccgggtaccttagttggaaatgcagaaatcacccgccttctgcgtcgatcttgccgggagctgcagactggagctattcctatttgaccatcttgccagcaatccccccaacctttttttttttttttttaaaaagggatgggggtctcactatgtcaccccggctggagtgcagtgacacattcttagttcactgtaacctcaagctccagggcttaagagatcctcctgcctcagcttcctgagtagctgggactataggtgtgcaccaccacacctggctaattttttttactttaattttattttatttcatttttttagaaatgaggtctcactgtgttgtgttgctcaagctggccgcaagcaatcctcccacctcaggctcccaaggcactgggattataggggtgagccacagcccctggcccagtgtaatcgttacttgtattttatatgacattctctagttggtattttatgctttccttgaaaagtctcattttgatagagactattttctgccattttgtctggttcatttttttctattactatgagtttaagtaaccttttatagccagtaagatagcccattaagcccattatactttcttggtggttgattttccctcttttgcatacataggaaatgctcggaacttctttacgtttttcaaacgcagctggctctgaaactgctccagtgtctgaaagtgacggatgcgcctcatttctatggcctgccgtcccttgagcggaccttacgagggatggctaacctcactgcgtttccgggatggagctcacactctcctctcacaaagcctctagatatctgtgtgaagtacttgtcaggtctccttgaggtaagtaaaaatagcatatggtagttatttactattagttgcttttactttatgccaggccacaagtgcattatacgttactctattcaatgtagaatattatacattatttatataagtcataatagtgaaatgttttagtgatttttattaatagttaagtaaggaaggtcacttttataaataccctcattttcaaaagaaataaatggaaacttttgatgctcaaaggaagtgttcgctagagcatttcagattttggatttttggattaggaatgctcaaccagtaagtatatgatacaggtatttcaaaatccaaacaactccaaaattcaaacacttctggtcccaagcattttgtatacggcatactcaggctgtacaatgttaaaggatatttgttttttctttttcttccagtttgtgcagttctagatgctactgctatgaacattcttatcttttggtgaaaatgagcatcttttttgaaattttatcttctgttattgaaatatgtaaatatagccaatttttatatgttgaccatgtatcaggcaattcttatttccaatatcaaaacaaaagcctttaatttttcacccttcagtatgctgtttatagtttttttttgtcaattaagaaagatcaagttaaggaagttttcttttgtcctgttttgctaggagctttgttttttaattcataattgtatattgcttttttctgtatcttttaagataatcacatgatttttcccttatattccattactgattgattttaaaatgttaaacaaccttgcatttctcgaaacatttcagttaggttgtgatgtattactctttttatatgttagtggatttcgtttctcaattttttagaattctgaagtttttagaattattctatttcctcatgtaaaaaagtttttcgaattttgcatcttttttctcttaaagaatttgtcaggtttttaataatcaaaatcattccgttcttatgactaaaatgggagaatgtgagattgtaagaacgtgactttttcaaccattttaaatcttttcctttatataactttcttttttggaatagctgatttgcattggtgtgattttgttctctaatgttaggtagaatttgatcgtgaaacaatcttggtttgcagttttctttttgggaagattgtaaattgtgaaatgaaatgactttttttttttttgagacagagtcttgctctgttgcccaggctggagtgcaatggcatgatctcagctcactgcaacctctgcctcccgggttcaagtgattctcctgcctcagcctcccaagtagctgggattacaggcgcctgccaccacgcacagctaatttttgtctttttagtagagacagggtttcaccaggttggccaggctggtgtcgaactcctgatctcaggtgatccacacccgtcttggcctcccaaagtgctgggattacgggtgtgagccactgcgcctggcctgaaatgactttttaaatagatctaaaatcgttcagagtttctttttatgtgtgtcagccttagtaagttatgtttttgtagaacttaaaaactttttatctaatttttaaaatttgttactgtgaaggtattcatcaaatcatcttacacttttaatgtctgctgaatctgtagtgaggtcccctttcattgcagacattaattattcctttctcaatttttcttggtttatctttctaatagaatgaacctttggctttgttgagcctctctttaacttttttctcctgttttatttctgccaatatttattatctccttctacttttagtttagtttacagctcttttttctaacattttaaggtagaggcttacgtcattgatttttttaaaagtctttctcaaatgtgtgtttttagctctaatcctctaagcatggccttatgccatgtttttatcatcaatttaggtcaaaatatttctactgtgatataataaatacgacaatgatatggttgtacatagttctatgagaacagcctcatcacagtggcctgacaattttgcatatctgcccttgggcttcatagacaaggcttaactacagccaatctaaatcttggcagaatttcctgtgatccttctggaacatgagaatatgaaaggcttatgagcagctgactatgcaagattgattctcacttacttcacagtctattaggaagtcagttaggagcccgtttcttattggttcctaggttccgacgagcactgggctttctgccttgctctccttggggcatagctacagcttataaaactgctttactgcagcacggcatgggcttctccgcaacagagtgtcctacatctttgttatagtcatctggcccctttgtttcaatgtcatcctgtgcaagggatactagtagctggcacctttgtctattcttgcttttgctgtttatgtaggtaataaactgtctgaatccaaaaattactcattgttttcttactggacaaatctgtcagccttgttttgattgctaactgtgttcggacctcaagaatgattcttgtaggaagcactgtagagttagattttgaaagataagtaaattgatagtgatagcaatagacattctagacatggaattttctgataaaattgtatctataacctcctgtttttttttcatgctgtgggtgacttcttgacatcatataatctctacctattgccagattatttttcagaaacataaatttttcaatccaaacctctttttttttcaagagcataagactcaatattttgcatttagagatttgcctccattgtagttttttcccacatctctgaattttcagttatatctggctgtttttccaaaataaaaatgcactttaaaaagactgcttctttcacatagtttcctctcttttagggatggcaatatctacaaaaaatttaagatctaacttatttatttaccttcatttagtaaaccttttcttattcttccaaggttggatacttacctaatactgtttggcctttcctgtaggttatatacctgtaacaatttatatatgtggctattacttaatacattatatttttatttattttactttatttctttgagacagggtttaccgtgttgctcaggctggaatgcagtggtgcaatcacagctcactacagcctcaacctcctgagcccaagtgatcttcccacctcagcctcccaagtagctggggccacaggtgtgcaccactacacctggctggtttaatttttttgtagagatgggtctcactatgttgcccaggtttgtcttgaattctttggcgcaaatgatcttcccactttggcctaccaaagtgctgctattacaggcatgagccactgtaactggacctttattttgttttctgcattgctctagtagactatgagcttataagtatcatctttgggctatttctactatcccatggctactgcattgacctagcaccatggtttttacatagtggttagtgaatcagttaattaatatatgtgctacataatacatatatattgtgtatagtttttaaattaagatacagtttgaaaaacattttggaaatgtagcataaatgattataaaaatatgttttattgttgtatttttattactaaataatgatttaaataatgtatatatatattttatctggtcttatctagaacttttttccaaaagcacatattgtttttaaaacaagtttaaagatcataaatactctttgctgtactgtaaaatttaatatgaatttcactggagtccctttaataaaataaatttcggagaggttccaagatggccaaataggaacagctctagtctacagctcccagcatgagcgacgcagaagacgggtgatttttgcatttccagctgaggtaccgggttcatctcactggggcttgtcggacagtgggtgcagcccacggactgtgagcagaagcagggcggggcatcgcctcacccaggaagcgtaagaggtcagggaattccttttccaagccaagggaagccgtgacacatggtacctggaaaattgggacacttccaccctaatactgtgcttttccaatggtcttagcaaacaatacactaggagattatatcccacgcctggcttggagggtcccacgcctatagagcctcgctcactgctagcacagcagtctgagatcgaactgcaaggtggcagcgaggctgggggaggggtgtccgccattgctgaggcttgagtaggtaatcaaagcggccgggaagctcgaactgggtggaacccaccacagctgaaggaggcctgcctgcctctgtagactccacttctgggggcagggcatagctgaacaaaaggcagcagaaacctctgtagacttaaacgtccctgtctgacagctttgaagagagtactggttctcccgttacagagtttgagatctgagaacagacagacagcctcctcaagtgggtccccaacccccgagtagcctaactgggagacacttcccagtaggggccaactgacacctcatacagccgggtgcccctcttgagacgaagcttccagaggaaggatcaggcagcaacatttgctgttctgtaacatttgctcttctgcagcctccgctggtgatacccaggcaaacagggtctggagtggacctccagcaaactccagcagacctgcagctgagggtcctgactgttagaaggaaaactaacaaacagaaaggacatccacaccaaaaccccatctgtacgtcaccatcatcaaagaccaaagatagataaaaccacaaagatggggaaaaaacagagcagaaaagctgaaaattctaaaaatcagagcacctcttctcctgcagaggaacacagctccttgtcagcaacggaacaaagctggacggagaatgactttgacgagttgagagaagaaggcttcagaagattggtaataacaaacttctccaagctaaaggaggatgttcgaacccatcacaaagaagctaaaaaccttgaagaaagattagacgaatggctaactagaataaacagtatagagaagaccttaaatgacctgatggagctgaaaatcatggcacaagaactacatgacatatgcacaagcttcagtagctgatttgatcaagtggaagaaagggtatcagtgattgaagatcaaatgaatgaaatgaagcgagaagagaagtttagagaaaaaagaataaaaagaaacaaacaaagcctccaagaaatacgggactatgtgaaaagaccaaatctacatttgattgttgtacctgaaagtgacggggagaatggaaccaagttggaaaacgctcttcaggatattatccaggagaacttccccaacctagcaaggcaggccaacattcaaattcaggaaatacagagaacgccacaaagatactccttgagaagagcaactccaaggcacataattgtcggattcaccaaagttgaaatgacagaaaaaatattaagggcagccagagagaaaggtcccgttacacgcaaagggaagcccgtcagactaacagcggatctctcggcagaaactctataagccagaagagagtgggggccaatattcaacattcttttttttttatgatttgcttttttttttttttttgaagtatttattgatcattcttgggtgtttctcggagagggggatgtggcagggtcataggataatagtggagagaaggtcagcagataaacacttgaacaaaggtctctggttttcctaggcagaggtccctgtggccttccgcagtgtctgtgtccctgggtacttgagattagggagtggtggtgactcttgaccagcatgctgccttcaagcatctgtttaacaaagcacatcttgcaccgcccttaatccatttaaccctgagttgacacagcacatgtttcagagagcacgtggttgggggtaaggttatagattaacagcatcccaaggcagaaaaatttttcttagtacagaacaaaatggagtctgctatgtctacttctttctacacagacacagtaacaatctgatctctctttcttttccccacatttcccccttttctttttgacaaaactgccatagtcatcatggcccgttctcgatggtcgctgtctcttcagagctgttgggtacccctgcagacaggctgtcacttcatgcttggaagattgcacagcggccaggcagaggcgctcctcacttcccagacgaggcggccaggcagaggcgatcctcacttcccagacggggtggcggctgggcagaggcgctcctcacatcccagacggggcagccgggcagaggcgctcctcacttcccagacgggacagctgggcagaggcgctcctcacttcccagacggggcgcctgggcagaggcgctccccacttcccagactggacagctgggcagaggcgctcctcacttcccagacggggcgcccgggcagaggcgctcctcacttcccagacggggcagccaggctcaacattcttaaagaaaagaattttcaacccagaatttcatatcctgccaaactaagtttcataagtgaaggagaaataaaatcttttacagacaagcaaatgctgagagatttgtcaccatcaggcctgccttacaagagctcctgaaggaatcactaaacatggaaaggaacaagcggtaccagccactgcaaaaacatgccaacttgtaaagaccattgatgctaggaagaaactgtatcaactaacgagcaaaataaccagctaacatcatgatgacaggattgaattcacacataacaatattaaccttaaatgtaaatggtctaaatgctccaattaaaagatacagactgggaagttggataaagagtcaagacccatcagtgtgctatattcaggagactcatctcacgtgcagagacatacataggctcaaaataaagggatggaggaagatcaaccaagcaaatggaaaacaaaaaaaggcaggggttgcaatcctctctccgataaaacagactttaaaccaacaaagatctaaagagacaaggccattacataatggtaaagggatcagttcaagaagaagagctaactatcctaaatatatatgcacccagtacaggagcacccagattcataaagcaagtccttagagacctacaaagagacttggactccacacaataataatgggagactttaacaccccactgtcaacattagacagatcagtgagacagaaagttaacaaggatatccaggacttgaactcagctctgcaccaagtggacctaataggcatctacagaactctccaccccaaatcaacagaatgtacattcttctcagcaccacatcacacttattccaaaattgaccacatagttggaattaaagcactcctcagcaaatgaaaaagaacagaagttatgataaactgtgtctcaaaccacagtgcaatcaaactggaactcaggattaagaaactcactcagaacagctcaactacatggaaactgaacaacctgctcctgaatgactactgggtacgtaacgaaatgaaggcagaaataaagatgctctttgaaaccagtgagaacaaagacacaatataccagaatttctgggacacatttaaagcagtgtgtaaagggaaatttatagcactaaatgcccacaggagaaagcaggaaagatctaaaattgacaccctaacatcacagttaaaagaagtagaaaagcaagagtaaacacattcaaaagctagcagaaggcaagaaataactaagaacagagcagaaatgaaggaggtacagacacaaaaacccttaaaaaaaattggtgaatccaggagctggttttttgaaaagatcaacaaaatagatacaccactagcaagactaataaagaagaaaagagagaagaatcaaatagatgcaataaaaaatgataaaggggatatcaacaccgatcccacagaaatacaaactactatcagacaatactataaactcctctatgcaaataaactagaaaatctagaagaaatggataaatttctggacacatacaccctccgaagactaaaccaggaagaagttcaatttctgaatagatcaataacaggctctgaaattgaggcaataattattagcctaccaaccaaaaaaagtccaggaccagatggattcacagctgaattctaccagaggtacgaagaggagctagtaccattccttctgaaactattccagtcaatagaaaaagagggaatcctccctaactcattttatgaggccagcatcatcctgataccaaagcctggcagagagacaacaaaaaaagagaattttagaccatatccctgatgaacatcagtgcaaaaatcctcaataaaatactggcaaactgaatccagcagcacatgaaaaagcttatccaccatgatcaagtgggcttcatccctgggatgcaaggctggttcaacatgcacagatcaataaacgtaacccatcatataaacagaaccaaagacaaaaaccacatgattatctcaatagatgcagaaaaggccattgacaaaattcaacagcccttcatgctaaaaactctcagtaaattaggtattgatgggacgtatctcgcaataataagagctatttatgacagacccacagccaatatcatactgaatgggcaaaaactggaagcattccctttgaaaactggcacaagacagggatgccctctctcaccactcctattcaacagtgttggaagttctggccagggtaatcaggcaggagaaagaaagaaagggtattcagttaggaaaagaggaagtcaaattgtccctgtttgcagatgacatgattgtatatttagaaaaccccatcgtctcagcccaaaatctccttaagctgataagcaacttcagcaaagtcgcaggatacaaaaaatcaatgtgcagaagtcacaagcattcctatacaccaataacagacaaacagctaaatcatgagtgaactcccattcacaattgcttcaaagagaataaaatacctaggaatccaacttacaagggatgtgaaggacgtcttcaaggagaactgcaaaccactgctcaaggaaataaaagaggacacaaacaaatggaagaacattccatgcttgtggataggaagaatcaatatcatgaaaatggccatactggccaaggtaatttatagattcaatgccaccttcatcaagctaccaatgactttcttcacagaattggaaaaaactactttaaagttcaaatggaaataaaaaagagcctgcattgccaagacaatcctaagccaaagaacaaagctggaggcatcacgctacctgacttcaaactgtactacaaggctacagtaaccaaaacagcatggtactggtaccaaaacagagatatagaccaatggaacagaacagagccctcagaaataataccacacatctacaaccatctgatctttgacaaacctgacaaaaagaagaaatggggaaagcattccgtatttagtaaatggtactgggaaaactggctagccatatgtagaaagctgaaactggatcccttccttacaccttacacaaaaattaattcaagatggattaaagacttaaatgttagacctaaaaccataaaaacccaagaagaaaacctaggcaataccattcaggacataggcatgggcaaggacttcatgactaaaataccaaaagcaatggcaacaaaagccaaaatagacaaatgggatctaattaaactaaagagcttctgcatagcaaaagaaactaccatcagagtgaacaggcaacctacagaatgggagaaaatttttgcaatctacgcatctgacaaagggctaatatccagaatctataaagaacttaaagaaattttgcaagaaaaaaacaactccatcaaaaagtgggcgaaggatatgagcagacacttctcaaaagaagacatttatgcagccaacagacacatgaaagaatgctcatcatcggagaaatgcaaatcaaaacgacaatgagaaaccatctcacaccagtcagaatggcaacattaaaatgtcaggaaacaacaggtgctggagaggatgtggagaaataggaacatttttacactgttggtggaactgtaaactagttcaaccattgtggcagacagtgtggtgattccttaaggatctagaactagaaataccattttacccagccattccattactgggtatatacccaaaggattataaatcatgctgctatattcatggaactagcccaaatgtccatcagcaatagactgggtgaagaaaatttggcacatatacaccatgtaatactatgcagccataaaataggatgagttcatgtcctttgtagggacatggatgaagctggaaaccatcgttctcagcaaactatcgcaaggacagataaccgaacactgcatgttcgtgctcataagtgggaattgaacaatgaaaaacttggaaacagggtagggaacatcacacaccagggcctgtcatggggtaggaggagggtggagggatagcatcaggagatatacctaatataaatgacaagttaacaggtgcagcacaccaacatggcacatgtatacatatgtaacaaacctgtacgttgtgcacatgtactctagaactttaagtatattaaaaaaataaaataaacttcattttttaattataaatattaaaaaaggttcaactgtcagtatactaattagttattttctgctgtctattagaaatgtatgaattttaaaaaacaggtatattaaagagttaatgataatatttcttagaaagtcagctcctctagtgcatttaaaatataattcagttagtctagctagtggcctatctatctcattaagtttttcaaaaaaacaactcctggatctagtgacctttcgaatggtttttcatatcttgatttccttcagttcagctctgattttggttatttcttgtcttctgctagtttggggttgatttgttattgctgctctaattctttcagttgtgatgttaagttgttaatttgagatctttctaactttttgatggaggcatttagtgctacgaatttccctcttaacactgccttagctgtgtcccagagattctgatgtgttgtaactttgttctcatgagtttacttgtgtaacaaacattcacgttacccgtgaacctaaaagtttaaaaattaaaaaaaatatataattgaacctataagtacctagtttatagcattttttgtcatgtgatttataaatactctatttatcaaccttttacagagtcagtctcctctagaaaatgagttttactctttgaaatcaggaataggtgaggacctgccacagcggtaactaaagaagaagtgaagtgttgcctcatttatgtttagaaactatcagaagtgcttttgttttaaaattacgtgcaaagactttagatcacacctacgtttcaaataccagaaattgaaatgaactgttaatgtattggagaacaaaagggcttagttttaggtaagaagtgtaggcaaaaaggcagtagtccattctgtgttcagttgtctttgaggtaataaaatttagtaacagtttgttagctaaaggatacataaaaagcacagtccctgttatgtaatgtttcgcagttataaaaaatttgattagccaatcttgctttggtttaaaaaggaggtcgttttgtgcttcataaaacatctcgagcagaaaatctttatgactttatgttaaatggcaggcaaatattaggaaagaatccgtcacttttgttaaaaattgtagcagggtaacatttaatcttgggactatctgcttagtttattaattacataaacaggtatccctgttgtactactaatgactaaattcatcttttaaagaataaagtaaggcttatgtgagagaacattgaaacaaagtcattgttggtccaaatgatttgcttcatagtttcttagtaattaaagctgtttcctttttggaagggagccatatttctaataaaagattagcttgtttctgcacagtgaaatttgaatatgagtatttgctttttgtagctgtgaaatgagactttttaactaagcatgattaattatgataggtgaataaactatgataattaaatctttaaatcagatacatgatgtataattccagaggtctgacaaaaatatcaagttgaaagaaaatactggcaaaggtcttggcttgtcatttataagctagaattaaaaatcattacacagatcacagatgttagatatctccaaagatgacttagaggaagataataaggatctgatcatttagatattttatttttcaagtagtcacttaaaattttaaatttttgaccttggggaaggggcagctgtgggcacagcttcagcaaacttaaatattcttgcctgccggctctgaagagagcagtggatctcccagcacagcactcaagctctgctaagggacagactacctccttaagttggtccctgaaccccgtgcctcctgactgggagacacctcccagcaggggttgacagacacctcatataggagagctctgctggcatctggcaatgcccctctgggacgaagcttccagagtaaggaacaggcagcaatctttgctgttctgcagcctccgctggtgatacccaggcaaacagggtctggagtggacctccagccaactccagcagaccagcagcagaggggcctgactgttagaaggaaaactaacaaacaggaatagcatcaacaccaacaaaaaggacttccactcagagaccccatccaaaggtcaccaacatcaaagaccaaaggtagataaatccatgaagatgaggaaaacccagtgcaaaaatgcggaaagttccaaaaaccagaatgcctcttttcctccaaaggatcacaactccttgacagcaagggaacaaaactggatagagaatgagtttggtgaattgacagaagtaggcttcagaaggtaggtaataacaaactcctccaagctaaaggagcatgttctaactcaatgcaaggaagctaataaccttggataaagggtagaggaattgctaactacaataaccagtttagagaagaacataaatgacctgatggagctgaaaaaaacagcaccagaacttcgtgacacatacatgagtatcaatagccgaatcgatgaatcagaagaaaggatatcagagattgaagatcaacttaatgaaataaagcaagaagacaagattagagaaaaaaaaaaaacaaaagggaatgagcaaagcctccaagaaatatgggactatgtgaaaagagtgaacctacgtttgattgatgtacctgaaagtgacagggagaatggaccaaattggaaaaaactcttcaggatattacctaggagaacttccccaacctatcaagacaggccagcattccaattcaggaaatacagagatcaccacaaacatgctccccgagaagagcaaccccaagacatgtaatcgtcagatttaccaaggctgaaatgaaggaaaatatattaagggcagccagagaggtcgggttacccacaaagggaagcccatccctgttagtcttaccagcggatctctctcagacaccctgcaagccagaagagagtgggggcctatattcattaataaagaaaataattttcaacccagaatttcatatctagccaaactaagcttcaaaagcgaaggagaaaatcctttacagacaagcaaatgctgagagattttgtcaccaccaggcctgccttacaagagctcctgaagaaagcactaaatatggaaaggaacaaccagtaccaaccactacaaaagcataccaaattataaagaccattgatgctatgaagaaactgcgtcaactaatgggcaaaataaccagctaacatcgtaatgacaggatcaattcacacataacaatattaatcttaaatgtaaacaggctaaatgccccaattaaaagacacagactggcaaattggataaagaggcaagacctatcagtgtgctgtattcaggagacccatctcacatgcaagacacacataagtttgaaataaagggatggaggatgatttaccaagcaaatggaaagaaaaaaaaaagcaggagttgcaattttcatcactgataaaacagattttaaaccaacaaagataaaaaaaaaaacaaggcattacataatgataaagggatcaatgcagcaagaagagctaactgtcctaaatatatatgcacccaatacaggagcacccagattcgtaaagcaagttcttagagacctacaaagagacttagatttccacacaataacagtgggagactttaacacctcactgtcaatattagatcaacgagactgaaaattaaaaaggatattcagaaaaaaaaaaagggatattcaagagttgaactcagctctggaccaagcggacctaatagacatctacagaactctccaccccaaatcaacagaatatacattcttctcagcaccacatcgcacttattctaaaattgaccacataattggaagtaaaacactcctcagcaaactcaaaagaatggaaatcataacaaacagcccctcagaccacagtggaatcaaattagaagtcagcattgagaaactaactacaaaccgcacaactacatggaaactgaacaacctgctcctgaatgactactgggtaaataacacaattaaggcagaaataaattagttctttgaaaccaaagagaacaaagacacaatataccagaatctctgggacacagctaaagcagtgtttcaccaaatgcccacaggaggaagggggaaagatctaaaatcgacaccctaacatcacaattagaagaactagagaagcaatggcaaacaaattcaaaagctagcagaagacaagaaataactaagatcagagcagaactgaaggcgacaagagacacaaaaaacccttcaaaaaaaatcaatgaatccaggagctggtgttttggaaaagatcaacaaaatagatagaccactagcctgactaataaagaagaaaagagagaagaatcaaatagacacaataaaaaatgataaaagggagatcagcactgatcccacagaaatccaaactaccgtcagagagtgttataaacacctctacgcaaataaactagaaaatctagaagaaatggataaattcctggacacatacaccctcccaagactaaaccaggaagaagttgaattcctgaatagaccaataacaggctctgaaattgaggcaataattaatagcctagcaaccaagaaaaggaccagagggattcatagccgaattctactagaggtacaaagaggatctggtaccattccttctgaaactattccaaatgatagaaaagagggaatcctccgtaactcattttatgaggccagcatcatcctgataccaaaatctggcagagacacaacaaaaaaagaaaatttcaggtcattatcactgaggaacatcaatgcaaaatcctcaataaaagactggcaaaccgaatccagcagcacatcaaaaagcttatccaccatgatcaagttggcttcatccctgggatgcaaggcccgttcaacatatgcaaatcaataaatgtaatccatcacataaacagaaccagtgagaaaaaccacatgattatctcaatagatgcagaaaagtctttcgataaaattcaacatctcttcatgctaaaaattctcaataaactaggtattgatgagacatatctcaaaataataagacctatttgtgacaaacccacagccaatatcatactgaatgagcaaaagctggaagcattccccttgaaaaccagcacaaattattcataaactctttaaaaggatgctataacatttttaaaaatattataagcatattctaagttacaactgtgtactaggagggcaccacacatctttttttttttttttacagactttaaaaggaaaaatattgaaactaagaatttttgtttttgttttgaaaaattacaggatctcactctgtaacttaggccaagtgcagtggtgcaatcatagctcaccgcaagctccagctcccaggctcaagggatcctccctcctcagcttccccggtagctgggactacaggtgtccactgccatgcctggctaatttttttcttttttaaagtagactgggtcttgctatgttatgtaggctgaagaatattttcttttaacaatggtaaaatacccataacataaaatttaccatcttattcatttttaagtatataaactaaaaatattacaactttataaggtaaggattcaattcatacaagtcagtagacagttatatatttatctttatataccattgagaataaagccaccatgaaattgtttacatttgtttttcaggtcattacttctttttatgtggagcgtggaggaaatgctatgtccttcatgggaaaaggtgttacaaagagcacaattctttgcttgcttcacttatcccatgagatgatggcccaggctgggagcttggtgagcgcgttaaagctgtctatcttctgaacatttgcttgaaagggaatgtgctgtgtccaacacatttcaagcatataaacttgccacatgaaaatgtctcttttgacttttctttttaggtaacgtgaatgatttttgactagaatatttcttagaagttgtatattaacaaatctgaatcttatttgaaattgattcaaatgtgcatacactggaaaactacattttgtctacattatgggaaaaatagcttctgtcaaaaaattgttatgtttaactttttaaagagaaacaaatttttttgtttgccttttttggctgaataatggattaaaaccaagtctaaaatacattttcacgttgttttcattaaaaattcttgttttaaccttcctgcattttatttttagaaacttacctcaaatatttctgtttcccttttttccctctaggagtggatgtcactttggttcttgcctttgggtagtcatagtgaagaacatattcctactcaacaaggattggcttggttgattccattatgggttgatcgggacccagaggtgagtgtgaaggagaatcaagtgtattgtgtttagattaaaaaacaaatgacacggggccaggtgcggtggctcatgcctgtaatcccagcttgttgggaggctgaggtgggcagatcacgaggtcaggagattgagaccatcctggctaacacagtgaaaccccatctctactaaaaatataaaaaaattagctgggtgtggtggcaggcacctgtagtcccagctacttgggaggctgcagcaggagaatgctgtgaacttgggaggtgaagcttgcagtgagctgagattgtgccactgcactccagcctgggcaacagagcaagactccatctcaaaaaaaaaaaaaagacacaaaacatatatacatatacatagttatattatgggattattgtagtgactctaccttatgttttatttaagccctgttttagcttaggctgccataacaaaataccacagactgggtggcttagacaacagacacttcttttctcatagaagttttggaagctgaaagtccaagatcagagtgccggcatagtcaagttctggtgagggctcttcttctggcttgtagacggctgccttcttgctgtgtattcacgtggcctttccttggtccatgcatgtggggcaggggagggaggggtggtatagagacagatttgtctttttttttttattataatgttaccagtcttattgagataggaccactcccttatgatctctttaaaccttaattatctcctagaaaccctgtcttcaaatgtagtcacttgagcataaagacttcaacatatgagttttggagggacgcaattcagttcatagttttccatccctgagcccctgaacttcatgttcttcttccatgcaaaatgcttttattctccctcaacaacctcaaaagtcttaacttattcccaaatcaactgtaaagtctaaagtccaaaatctcatctaaatgtcatttaaaccacatctgggtaagtctccagatataaaccctcctgaaacagaattcttctgcaggtgtgaacctgtgaacccatacaagttatatgcttccaaaagatgatggtagaatagacattcccattccaaaagagagaaataggaaaaaaaggaagaagtgatgggtcccaagcaagtccaaagcctagcaaagcaaatttcattagatgttaatgctcaaggataatgttctttggcttgatggtgtgccttacaggcccaccagagtgacagcatctgtctagatggctctgtgggatgaccccacccctttggctgtcttcaagagccccgcccataaagctgtcttcaagggcagccatgttcctgaagcactgggcagggtcatcattctggcccacagaaatcagaggtctttgaaaccaaggaggaaaagccacccttgagtcctgtggtgggattagcagcctggggatctctgaatcattttttgggtcattcttttcattgaagaatacagtagtcctcccttatcagaggtttcattttccaaaagcaccctgaagatcagtagtagccaaaccctccctcacaatgcctacatcattcacctcacctcatctctttatgtaatcattgtatcatctcacatcaatacaagaaggctgagtgcaatacaataagatattttgagagagagaccacatttatgtattttgtattataacatattgttgtaattgttctagtttatttttagttattgttaatctcttactgtgcctaatttgtaaactttaccatagatatgtatgtgtaggagaaaacatagtagttatagggctcagcactatctgtggtttcaggcatctactgggggtcttggaatgtattccccatggataagggagggaccactgtagcacatatttgcttacagaatccaggaagtccaacagctttccttcattctctgcatctttctctgtcctctttagttcaaactggcaatgtctttgctgatataatcccatctctattcctggcttctgctgagatgtctgattaagtccatgaattgcacccgtgatctttttcttaaatgggtattcagccacaccctccatgttctctttagaacaagctttctcattttttttgcacagataggctgagaatttttcaaatcttgttcttgtttctttttgcttacccattcttaattccttctttaattcatctctctccctttgcattttgctataagcaatcaggaggaaccaagccaatttttcaacactttgcttagaaatcttctcagctaaatatccaatttcattgctcacaagttctgcctttcacaaaacactagaacatgaccacagcttaaccagttttcttgctactttataacaaggattgcctttcctcaaataaccttttttaaataacactttcctcatttttgtctgagatctcatgagaattacccatgtctacgtttctggcatccacctcaaaactcttctagcctgtaacccattacccagtgccaaagtcactttcatgtgtttaggcatttgtttcagcagcatccccactccttggtacaaaaatctgtattagtgtgctcaggcttccataacaaaataccattgtctgggtggcttaaaaacagaaatttatttcttacagttatagaggctgcaagtccaagatcagagtgtcaacatggttggtttctggtagggcactcttcctgatttacagagggccaccttctcactgtgtgctcatatgacctctccttggagcacgcacatggagaaagatttctctccttcctgaggccaccattcctagtgcagtagggtcccacccttataacctcatttaactgtaatcacctaatagctctgtctccaaatacaggttggggattagggcttcaacatacgagtcttgaggagacacagttcagtacacagcaccctcattttcaatcaaatttgttcgagtatagattgaaaatataaaagagaaaaggttatagtatctattaccttcagaagagtggaaaattattggagaagcttagcaattttgaaaaaaataaaaaggatctggaaattatagacatgcaacacttaagtgtcatataatgaaattaaattaaatgcaaaaaattgcatttgcattacaatacaaaattttgtattatttctttccagttttagccagtttacttttttcaagtaaaatatgctattacaataaaatcttatttatagaaatatttgaaatacattttttagtcacattgaacttggacttactacttgacaattttatgactgcatttttaaaaaattctatagctgtcattgaaactatatttttggattcgaattcagaaatttaccaaaacgtgtggcttgaacagcagtggttctacagcaagcatattataccacatcaatcttatttgggaacgtttttctcttgaataacttttgaggaaaatacgaaatgccttgtaaaatgataattgcctctttgtttagaagttttaagaaagttaaaatcatttatttggaagaaacaataaaaaattaagaaaggtagaacaaagaatagctaccttttttaagaatgaagaattgaaattgtgttcataaaatgtaagtgccctatgctttccttagaaaaaggcttgcaaactataatttttatgcatctttttatacccagttttactttgctttgaaatttgcttatatttaatttttcctatattactgctttcttgaatcatggaatggaggacactgtcttctataggtgtctcttataatttaggatcataaaaccaatggatttttttaaagtgtgatatttatgtaccagaaaaactaagaattcatgttaggaaaaaggcttatttgattcaacaactttctctttaatttgaacaggtgagattcacttcactgggattaggatcagcactgaccacccttgaaacgggctgtgtggccttagcaaacagttgtcagaacatttccggtgggctctggggaactgtggtgaacattcttctggaccagtcagaatgtagtatggtgcgccgggaggtatgtctgtcttttctcctttttttccttagaaattctttgtgatggtatccgtaagcgatacttgactgccgctcaacatggtggactgaccactgaccatgatctcttctgtctgtgaacacccaaacaaaatgacagtagaggatttaaaaggtattcatgcacaggaaaaactggagtccttccttccgataagataaaatcggaatatactatattttaatgtgaactttttttattatgcattgaaaggtagttcacaggaaaaattacttttatattatctcagcatttatgggtctctgatatttatgaagctttagtatagataagaggctgtcaaaataactctttgtagtatttatcatataacatgagagggaaaaataaaccctattttaattctttctgaatagcttgtggtttttttttattgctgcttttgttaaagtaatgattcatgtaaatggttttaaaacaataatcaaattgtacttagaggcttatgaaaaaaaacagcagctcctgggtccaccattagcagtcgccagttccaagctcaaaaggctagttttgttgctgtttgccttcatgtttttaagtagtgatgtttatatttatggctgcttcttgatttatcaactttaaagcttttccatcacttctagttatcatggttggaaatgtcagtttcttagaatcctcttgttaatcctgtcattctcccattatggttatttcatctttcattaagcagacaatcaatgctcctatttgtatgattatttaatttgatcatcttcaggatctagtcaagttggacatttgtggtttgtatttctagttagcaagtttttattgaaaggagtctgtataagagaagggagaaagcggggcagaggggtgcgtgtgtttgtgtgtgtgtgtgtgtgtaatctgaaaggggatagtagaaacctaaaattatatttcttaaatgctaccagaagaatttatgttatacaaatcattttttaataaagctgaattctgaaataggaaaagatatatttcctgatgaaataatttcatatgctgttaggtcattacctaacaaggtcattacctaagaaggtcatcacctaacaagaaatacagtttgacaattctcataatgacctctcagcatgtgcagttgaccagagatgtcttttgctattaattacaatatattggttatttcagagatgaccacaagatggcagtattgacctttttttttttttttttttttttttttttttttttttttacattttcaggcggcatttattcttcagaatctccttgtaattccaatgcctacagaaattataaaggattatacttggcaggtgggtgattttaaacaattatcaacctagtagatgtttcaaattaattggtgataaattttcagtataagtagtatatttcattattgatgaaactatatacaagacagcaagggcctcttaaaatagaacgtagaatttgttcttatgccgaccagacttaaaaattcttctctatagtgttcacaataatttaaagcaaataataatagttaacatatgtttactatgttttaggcacccttctagaaatgtaagacatagtaacttgtataattgtttgagttgtgaactgttactatccttattttctaagcttaggaacttttgcatagagagtttaaatagtttgtcctaaatcacacagctagtcagtggtacgcctttgctttgagtctaggcagtctcttacccactttgctgtattacttctctaatttagtaataataaacaaatttgtagatagttaaatatgtgttgatgttaacatctttttttccttttctaggttagtgcacagtgcgggttatagtgtatcttgctttgttttctgttgggttaactttctttttcatgttctgaatatcacatcagtaaatggttacctaacatttttatagcttacattaaaaaaattctagcttcatgggatatatgtacatgtttgttacataagtatattgcgtaatggtggtggggattggggttctcgtgtactcattacccaaatattgaacattgtacccagttaggtaatttataacctcagccgcctcccccactccctccttgggagtctcagtgtctgttatgtctgtctttatgtccatgtgtattcattggttagctcccacttatacgtgagaacacgcaatatttgattttctatttttgagttagttcacttagataatggcctccacctccatccatgttgctgcagttttaggtaatttggaagatacaaaagtacacttattggggatataagatgtgctgtttctgtccttttacctatccatatattttcaccttatagggatatatttatcatattgctacacctcactcctcaaaatcctgtataaatctaaggtttatttttaagttttaattagactatactcttagaggagttagtgaaacaagctgaaccgtagcaagggcaagtttccgcacatgacccgaagcatgaatccaggtggttgtcaaggcccaggtagcatttaactcttggaaggcttacctctccaaactttacaaacccagggtaaccctaccagtcattgtaaatcccaggcttgtaatttgctcgtaatttctttaacattgccttctgataatggctgcttatctactttccatgttgtaataaaaccaggagacaaaactggagggaatatgcaggattaatagttatattaatagtgtagtagttttggtacctgttatccggagactacattttaaaacatgttgtttttggctcaaatacaaataatctctactcccattgttaaactagtgacccatgtacatggatatacttggtgatgtactaccaatgaatttttaattattgaaataagtataaaggcagagtatattaaagttcctgggacattatgttgtaatacagaaccgtatgtagctgttcatatttttctcttagaaattaaatagtaaagttcctgtttgttgctggtggcatgcttactgcagtttattggttttgttattctccagtcttcatcatggaaatccttttctactaaaaagtggaaaatagtgatttaagttagcttttggagttttggccttgctaagttggccaaaataaaaaaagttggagagccactgctgtcccaaacaatagttgattacaacttttgctagtcttaggaaaaattagataaataaggacaatcttgtatgctttttaataaactcagattttcttcctctcttttcagtctttttttttttttggttatttttgtttgtgtaagtgtccttccttggcagtgaaaatagttaactcagtatatctgtcatccaattttaagaaagtttagtggggtctgaaattccaaagtagaaacagcttctgcaagaaggaaacaagatggttgtctctgggtgcagctagtggggcacatggtcctttgcaaccatgaaaaaggggccacatagccagtattttaaaattcaaacagtctttggtagaattatgaataataatcttattcaacaaaatgtttcatttacttattttagtgtccctttcatagtgttgtggaggatatagcatgaaacagcatgtttaggagctttgttaaaattttattttggttgaggtaaatatttgattttttttttttaacaaagagaattgcttctattgctttgcactttgttttcctgcctgcagtctaaattaatgcccgctagtgctcttgtttcataggctttctgaagcattctctttataattactactccttttcctctccttcctctgcacagtagcataaattcctacttcatgtcatgacatagaattgttgtacttgtgaatagtaataatatgcatatatgaattatgaataatattatagctgagtttcccttttattgttagatgccagaaagtagagcccttttatcaattgtgactttttctgtatgtacttaaaaaaaaaaaaagatggggtctcactgtgttgtccaggctggccttgagttcctgggctcaagtgatacgcttgcctcagcctcctgagtagctgggaccccaggcacatgctgccacacccagcttaccttctaagctttattcatggttgcactttttccatatctctggcttttttctttcttttattcctgatatgcatttactatcatgttacaatttacctttccttgtaatgggccttaaatcttttctcggacaagataggaagtaaataatttaaaacaatttatttttttaaagtattaaataattttaccaaccactgcaattcccattttaatcttccttttaaagacactaacatttaatgtcttaccactaaattaggttattttccatatttgcattatttcttaccatttaacttaatcttcctgtgtagaatgtttgtttctgacaggactacattttttatattttaaaaaatgtttctcccaacccctaccacagagaaagtaagtgctccatctgtcttgactgattcattaaaatgtgcaaaacatttgagttatccttttggtcttaatatcataagtaaatacagttagaaataaagccttaattttcatagcataagtccccttttatttttctgtggatgcagaagcatactggaagtggggtggtcaccaagaggaggagcagatgaagtatctcggcctgtcttcccttgacatctagcactcctaccaggggccttgataccaggcccctgctggatatgagaacccagttcctgctgtgtcagtctttggtgtgtcacagctcttttatattcaggacactaacttttcagagggatatttacaaacattggtcttgttcttgagtcaaactcagcctcattcaaagctacatcccagctgggtgtggtggctcatgcctgtaatcccaacacttggggaggctgaggtgagaggatcacttgagcccaggagtttgagactagcctgggcaacatagtgagaccccatctctaaaaaaaattttaaaaattggcctggaatggtggcatgcacctgtagtccctagctactcaggagactgaggcaggaggattgcttgagcccaggagtttgaggccacagtaagctatgattgtgtcactgtgctgcagcctgggtgacagaacaaaaccctgtctctaaaaacaaaaaccctgcatactacattctctgccaagaagagaaaacagagccaatattcagttgacacgaaactgtattgtggctcccaactgtccagtgtttttcagaccagtttcccacagtctgactaggagttaagactcctgaatgtggatggtttcataactgggtttagtttgaagactagtgtcagaaatccgtatccctgaaactttaacaaccaattttagagttgattataacaagaaatctattgattagagatggattattgatgtaattttctcagttcatttctgtaaacatttgttgagtgtctaaatattggagattcacagataatccaatttagtattcttgggcttatggcctacaggggatgacatgtacccaggaaacattgttataatcatgttatgtatgatgatggtagcttatgcataattttaataatatttcagttctttccacttgaaaatgatctcacatttaaatgtaaagggtaatttcatgcacttaaataacataatgggttgtcagtttgtgatttaaataaacttgttcatgctctagttgctttccatgtttgtgacaggactttgaattggtacacagactttttaaactttattttgaaaaaacttagatttataggaaatttgtagaaacaatacaatttttatgtactcttcacccagattccccaaatgttattttacacatttacttcagctctgtctagtgtcttctttctaaactattggagagttgtagacataatgcttcttttcctctgaacacttaagtgtggatttcctaaaaataaggatatcctcttacataatcacaataataattatcataattaggagattactcaaggattttcagttgtcccactgctgtttttaatagaaaaaaaagaaaaaaaaatccaatcctggatccaagatccagctcaggaatacacattgcatatacttgtcttacatatttgctttcgttcatctgaaatagtttcaaaattttaaatatttatgatcttaacatttttgaagaatgcaggctacttatttgttgtaatatacttcaattagatttgtccttttccccaggtttagatttgagttacgcatttttggcagaaaaaccatagaagtgatgggttctcagtgcaacatgtcaagagatattatatctctctttcccattgttggtgatactaactttgattacttagtaaagatagaatctgcctgttttgtcctttgtaaagttacagttttttcttttggaaggaggtgctctgagactgtaaatatctgtttctcatcaaactttctttcactagttttttgttttgttttgttttacttttttttcccccataggttattggggaacaggtggtgtttgattacatgagtaagttctttagtggtgatttgtgagattttggtgtacccatcacctcagcagtatacactgcacacagtttgtatcttttatccctcaccccttcccacccttttccctcaagtccccaaagtccgttgtgtcattcttaagcccttgcatcctcatagcatagctcccgcttatgagtgagaacatttgatgtttggttttccattcctgacttacttcacttagaataatagtctccaatctcatccagatcactgcgaataccattaattcattcctttttatggctgagtagtattccatagtgtgtgtgtgtgtgtgtgtgtgtgtgtgtgtgtgtgtgtgtgtgataccacacacaccagtttatccactcattggtggatgggcatttgaattggttctacatttttgcaattgcaaattgtgctgctataaacatgtgtgtgcaagtatcttttttgtataatgacttcttttcctctgggtagatacccagtagtgggattgctgaatcccactggtagttctacttttagttctttaagaaatctccacactgttttcctagttttaaattccattcatgattcttacctgaaacagttattacagaattgttgccaaatgatttcctaactccatcatttctttctatgtttattacatgctactgtaaggaagaacttttcattcttccttgcttatttagtgattcacttatttacaccagcatggattgaagattcttaagtttgtttaatgggctataatctgtttctatcattatttgtttcaatgttcaaatcattcttgctttggccaggggaaatttcttcataatggttcttgtgtctttatcaatatttgagccatttccttacttctggtacagcaaagtgttctagactgtccagctccatcctggaatcagatatttgctccaagggctctgatttcttttcatggagaatggtatttagaaaccaagatctgcgttctagatgtattcattgttcctggggtgtcattgcttctatgtcctgtgagtgaacaaagctagtaattgtctgtgtatatgttttaaatagtcagctcatttatagttatatattattttgatatttgatatgattaatatgtattatttttatcttttgtttgttatgaagcatcatgagtatttccagaagacaatgagtacttggtaaactgatatcattgtaatgatattcatattttacatgtagttttggatttctaatgtatttagggtcatttttacagtctttggattatagcatttttgttatatatgacaataattcatttttctccttgaaaatattatatcttcttaaatgttattcttactttgcttctagtaccttttcaattatagctaatgggtatattagcactgacactaggagtataatatgcattttaaaattagtattctgatttattgcattcttgataaagatgttttcaaattaattggagcttgatatgacataattaatttgcagttttctttgtaaatgtatttgtaatggcattctggtgatttgaagagctttcttactttccttctcagctctctctggcaattcagcagacgatctggcagccccagaactcacctgagggcaaggctagtcatgatacagaagtcttgagacagagcaattagacctgattgctctaatttccccactatgctagaagataaccccatcaattactgatggatgtatggagcagagcctagtgtgtgcatgaaagacttcattgttctggcccttgaaccattagttatctgtgaaagcctgagcctggccatcctttgtgcatatcctgggcttggctccattataaagctctcttaataagtgtagagaatggggattcaggcttaatgcttagttaaataaaaaataaaataatttttatgtaatatgtgcctatttcagattactcggttttcttttgagcagttcaagaatattttgaatgcactaattgaactttttagaagaaatttttttttcaagtaataaatacatatggttaaaaaaaagctaatagagcttatagtgaaattcactgtccctctccattcactgagacagttttacctctgattttaattcttcagggagttaccactgtatatctaaatagcatgtttgcaataatatatttattcatacactactttagtacctaaggatttagctcatgtacacaatttcctgcagataccacagtatctcatagtaccatagtggtattactgctcttatttctccactggtcacacttgctcttcctggttttgtcacccatgcatcatatcttttgaccccaacccattttgagatgagtaagacatggctgagattgtacctgtcctttcttcagtctttcctctgccgtttctaatacccatctttaatagttttatttttactttttgctttgtgagcgttgattatgtttacattctcatctgcagtctcaattttatctgtaggttgcttctaaaagttgaaaaccgtaactcactacagagacacttagtgggctgtgattacactttcttatctcggcttccaggaccaactcatctaatactcagaggaaaagttttctggtatttgtatgtatgtatacatgtatatgtgtgtgtgtatatatgtatatataaaaatataatttaaaaattgatttgggtgatttattttcccttgaggttcctgtttgttttttcttacattgtgggtccatatcatgtctcatgtctaaagtttttctaagctcttaatcatcctttctcttctgttagaatttcttttcctagtcataattctcaaaatgattgtagtggtaactagtgacaagtgcatgagagataaatatcacaagttcttgcatatttgaaaatgtctttaaattgcactggattgatagtgtggttagttaccatatgtttggtgaagattgttcctcccaagaattttgcttcactgtattctagcatccagtgctactgatgagaagttgaattttcatctgactctttttacttctttatggctgatgttttctttcattatcatctctttgtcctcaatgtttagaatttttttattatgtaccttttttccatttttcttgcttgacatttattaagctccttaatttgaagatttggatcttctatatatttttttggctctgacaaatcttttcatatttatttcttttaagatgaatttcctttttttgtgtgttatattttatctttccagaaattgtaagtcccttattaggcctcttgaatttattttctctgatttccttttgtatttctatatcttaaacctttttgcactattttctatgatattaaattttttgttcataagctaaattagcttcttcaatcttggtaggctaaataatttttaccatgatttataaacagaggaaaaatagaacagattctaaactttatttgatagatttagttataaatttgtgtctcttattatgactttcttacctatattttctaagtctgtgtttatattaataggaactagaaaagaatttttaatttattgaagggaaaatgtgattaaactaggttctttatcactgtgacaattttacatatttagagaataattgcaagagttctaataccatatttacatgtgtaacttctcacttctaaaatacttaaaaactaaagaaatgttagattttagaagacagtgggtttgtaactcttgtcttcctaacagttggtatggccatcagcctcagtaggccttgaacagaataaagaatcagcagatttaagatctctcaaagagctgtagatgtcatttttttctgtttttaagatttatacagtttacattctcttctctattttcattaaaggtttgtgaattttgggttgtggtaactgatagaggaagcattcatgtagacataattttgcaaaaatatgaaaaattgcataattttatataatctgtatggcaaaatatttttaagtggttctttgtatcattataaaatatattttgaaaactagtttttgtacaactttgattaatcacttttgatttattgaattttttagatggagtgaagctagtaaaccctctacaattcttgtcttatttgttaattccttccctatattattataatgaggactctaatttgtgatgttaagcagtttattgcaaatctcttgggtgtttggcgtgttttgtacgtttaagtatgttataacttgcttaaaagatagaatttcttgaagctgtgaatgttaagattgactgtgattttgggtgaatacttcattctatataataaaataaggtaatgtattaaagggcgccagtacctgtaacatataccttggttaataaacaggagccacataaccccattcactttgtattactctctattttacctgattcttctagacctctgcatttaaaataacgacagtgaccaccatgtgctggctgttcattacagtagtcttatttcttatataaattgctctgtttaggacgagtaagctcacagtgttggtagatttattacaacacagcagtaacaacttcatagtcataaaagacattgaatattgaagaggtttaattataatgatgtatataaatgtccttaaaaagaagtgttaatagaaataaccttgttagtgtaatcgtgcctttaacttgtgaattcctttgtcttcctgaagagtaagttaaaatatccatcttcttttggtgatggggagggtgagagaacagacacacatacaaatcttatggttaaaggtcaacttgcaatatgttttgaacgtatctttcctgttggctcttagatttctgtttgctatcttttatttttctctctcttatggcctgttttgaaatcttaactttattatcatttcccagaaaatagaaatatttataaactaatggtaggattatttgcaaacttcaaaccaatcctcattgcttgctttttgctattagatactccaggaaaagtagtaagtcacaatgcaaaaaattgtttgggaaaaatgcaaagagaaaaattgtgtaatagcagattcttttcagcctcctggtggcagttcatgtgtgtgtatgtatacatgtgtgtgttttttttccttgtcaggattaattcagtgggaagtaatgtgacagattttgccatatggatattgatggaccttttcattttacctggcttagtgataggtataaaaaataattctgaacataatatatggaccaccttatttcatatattttaacacctattattttactattatatgtaggttgaaaaatactgcttttattgtgtttttggtgcaagtatatgatttcttggttaaagctgatcattccatagaaacattttaaatgaaatggcccctcaagagaaagatcagctttgtcccttcacgggggtgtttaggcagcaaagacctagagtattatggaataatttgtcctaggtcaggctgctataactgtgtaaggacaaaagcagagtggaaggagatgggagcatctgggacccatttgtttcctcgagaggagacaatggatctttttaaggaaattgttggataaatcagtgtctcctccttctttccctctcttcctacagggtccctgtgttcatgatgaggactctggcctatcgctcattggaaaacctgcccttcaggctcttttatatcactgccatttttatgaacatttgaatcagatggtaaagcattgttacctaggacggtgtatgtttgatttgaatttttctgcttttgatagaaattcagaaagcaatgatttaaatggtaagtacgatatctttgtatttttatttttgtaatatgtaacttgtaaaaactgttaaaaatacatatatttgttttaaaaatttgaaaaatgaaagtatacagggaaaacattcatttccagttctaccacccagagagatgtattttcttcccgtcttctttctctgtatagcctttgtttgttttatgtaattatgttcatatcttgtgtacatttttgtatttccttctttcactaaatattctgcaagcatttttctatgttataaattcttcatggaaattatttttgacatcttattaatactttataagttatgcccatcagtacagttttatagtttctttctctgttaacgtctcaaacttttttggaactttcacttctaggcaatgtacagtttttttatccttcttgtgaatgagactttttcccactatattttctaattcattttgctcatgtatcaaaaagttatttattttagtatgttacttatttgtcacaatattttcctgaaacctttttattccttttgtttgtaggttcttgtagatttgctaagtataagatctgagcacataaaaataattatatcttgtaataaatagtaatttaataatataaatagcttttatttttaaattcatttttataataattttttagaatcttgccatagtttcaaacttacagaaaagcttcaggaatagtacaaaagaattctcaaatgttaacattttacagtatttacatcttgccacatgtgtgtgtatgtgtgtataaataaacggatatgtatgatctatatatactctttttgagccatttaagagtaagttgaagacatgaagttcctttatccccgaattattaagtgtgaatgtgtgattcacttttctgtttacttcttggaagaatcaagaaaatgagatttgatgaagttttgaacattttaaatatccctcttagaaaagtgactcacttaattgtttagatttctctggatcagttacttagagcatggcccttaaactaacagcattggcatcttctgtgaacttgttagaagtgaacactcagggcttccactctgacctggggtattggagcctctggggctggggctgaagcagctgctttagcaagctctcagtgattcttatgcacattaaaaaaaaactctccttagatttttttttttttaaatagtggtctatctcagaagccagatccatataagttttttcctttctttagttttgaattggtttcctgtaatgcgtacccttttaattaattgttacagttcctaggagggtgtccatgttaacaattttctcgttgttgcaggtttagatgactcattcaagttttggagggctccatctaggacaagtcaggatcgagatccaagttctctctccacctcagaaacaacggtacttgcaaagaatgcataagtcctttattttgaatctctgaaaaaatttgagtttgcctagtgggagagttaagaatacaaagtgtaaggttataacagctatgatttattcgaagtgctttctgcagaattttgctaaattattgtattcaagctgcacatcagtcatacattatagatacttatcttgcttttctgtgtgcgcaagccactctgaagtaaagtaactttgtgatcattagtgctataggtagcagaactggagtttgaaccagggtgtgtcttgctacggtatagctacactgaatatccctttagttgagaattttcaacctctctttcctaccttttttgatagtacgaaagtgtgaaaatatgtttttcgttagtattagaagagaacaaatcctacatgttaaaaatggttgattaccctgaaattgtgcttaagggcagggcaatatgaagaacattcaaatgattctagtgtggtgctgacagctttaaacacacttctaaatacttgcatcacatagaagtttatctggaatacctgaaatttatatatgcctgtttgcatgccttctttccttcccctttcattcatgcattagttgctttttttgcagaaaagtttgaaacactgagtatttataaggaatgattgatactaggtttcagttatttacaaacatacagaatcatttattctcaactgggaaatgttacttttaattttaaagtgtttttgaaataattagtgtattatacaacatatcaggaagggaaagatttgatacacctgtttccaggaacaaaaataatatgagaataataattatacagacattataatgtaaagattatgtttaatctatctcctagtttctcaaaagactgatactttttgctacagttttaagtctttttttccctagattcaagagaagtatttgtgtttagtgctacattggacctttgtatggaaaagtaagataattacccgagttccactagatgtcatgctttcctttccaaggtggagatagtgtgtacctttgtctcaacaagagcagtaatatgataaatgccaaactgaattgtcttaattggttatttagttcacagaaggacagcatgaaagtgtgcttaaaagtaaattttgtttgttagcctatttgtcaaaagggctatagactagccttgaaatctttgtacatatttcagtttttttgcttttagtaggtactcagtaaataataattgctctaattaactttgagttatcttagctattttgtggtgagcactgaagtcatatttatcctatacaagaaaacctaaatacaaaaagcaaaagcatatcaaccttttgaatttctctattttgtaataacatttaatcttacaggttagaatactagattttctgagaaaatttggaaatatgttattaattgtagtcattattaaagaaagaagcaccccaattaaagtgaaggtctttaacttgtttgtgtttgaatgtaacacagacttttagaaatatataccaatggaatcttttcagtttttttaaaagaattttgtaatatgtgtaaaatttatttcttattattttctctaaaggctagtgtattctgttagaatttttacagaatttactttttactttctttttcgggaggtttccaaacaacttttagaatgggtgacttttagttacaaaaatagtcttcgtaccctaattctactagttatattttctttaccatacccaagatgatgtgtatctttgtcccaacaggagaaaaatctggagagtgttttcattctgccagtgttactttaaaccaaagctgtcagtacttcgaccaaggcatactttcttatgtataaaaaaatgttgaagttacaaattgaggtataagttgagtggatgtaaatcttattaatcagcttatctgcttatttatatctttgttttgtttatctcagaattgagaaaaaatgcaatcctttattggttagttggctggtttttccattttatctttccaaggaaagcatcatcttttgatttgggtcatgtcatccagcatgctctcctgggttactatccattttgtgctgttaatgccaagttagggactttcatgctgttacctaatgtgtattagttccgttgtttggcaagcttcgtaaggattgttgggtcctgtatgtttgataaactgcagatagagtaagcagagtgtcattgttagctttggggcatcgcccttgtaaatgcttcctcaggagtggcctctatcgaactcaatattctcctcctctggggtaggaggatgcagccattaggtggtgtttttcttctcgaaatcacgtttatatccaagatggatagctgtttgtgcctcttacacacctgtgtgcagcaacagctttatgaccaaaatttggtctcttctgttgttcctgagcagaactatgtctgtatttttttaaatttatcaattgtcaaaataaaatatgtgggaaatataattcctttctttttgagcctttctttgtgaaatatgtgatctttcaaacttttttctggaacacagatttaaagaaaactgattttagtttttctaaacatttaaagagaatttttacacttcatagtcttaaaacaactgaaaagcattgttactattttgcaaaagaggaaattagggcatggagtgaggtcccactccatggagtgcatgcttgttcaagttcctagcatggtaactggtagaccattcttttgagtccagaagtatgtttgcttcctccttcactctaaggccagatgtgattgatcccataaaagatggtgtagtcaagggacagtgaggtttctttagagggaaagatgaaatgaaaagtggttttgtgtaggaagtggccactgaaatgggctttacaatattatccccttctcttttatatgcatacaaacatttgcaagggactgaaaagattcaaatattccttaggattcagtgaccacttaacaaatgacaaaagtctacttgagaacataaagcatacttagactttctaactaaatatgaagttgtgttgtactgaaggcattaacattcagaaaatgcaagaggttgtttggagtagaatgtgggacggaaagctaaagtttgatgacctgactaatcagataggagttagttaagaaagctgaatcagcttttggatttgaagaggtaagatataagagctataaagataaagatgtaaggatatttcagcagcatggaatggcatgaaacattacaactgatatgagagaaataacgtattgacactcatttgatggtagttaaaattgttttatagaaggaagagtagacagaggatagtttaagcagggatggatccaagaggctttctaaaagaaaaatagttttgacataggcatcactgataggacatacaaatacctccagcatggtgaccccaggaaaacttgaggaggtggtagtttgtgtgatgatggagagagaaagaaaatgttatactctgtttaaataaatttcagctacctgtggattatccagagtctaacaacctcttatatttagttaggaggaaaatacaagtgagacaagctcttggaaatttgtgctcttagattacacacaggatggcacaggaactgtgactgtgttgtggtgatgatctgtctctttaagtggtcctttggttagacatgcaagaatcgtctatcatcttctgctcattccttcagaggacttttctgagctttcttttttttacatatattgtacataatccatttgaattatgaatctattagttgaaataatttaaacttcttgttataatttggttagaattaatgattacaaattgagaagcatgccaaagctttcctgctcctgggcatatagagaaaggtattatttattaaaatgaacacatgaagcttagaatctcttagaaacccttcatatcttatatttttccatgttttcaaaatgtggctagacttgtactttatttttttcacactacaatccttattttctccctttgtacctttttaaaaacaattaaataaacttttttggcaccagtactgcttttgagggaagttgatggaactattacaagatcattttggcaaatacaatattcaagttctgaattaactttcaaaaaaagttaaagtgtctagtgaaatcacttgcttctgtaaggcagatacaaagaaaatcatttttgtacattgatgcatttttgcttatatgacagaaattgttttttacattccagttctacttggatatggcaaatgactctgctattttcagtgatttcaaagggactttcttaattttagctgcttattttacactgaagcataatttagaaaccttctttagttaccaaatctgcttacaaacacactgaagaacaatttttttcagtttttataagcaagatttgagtccattttatttttttattttcccctagttttgagctaaaatgacaaataaaattgtatatatttgagatatacagtgagattacttgacatatgtatatgtgatgaaatgattaccacagtcaaattagttaacacatctgtcacctaagagtcaaccttttttttttgtggtgagaacacttaagaactactctctttcaagtagactgtgcagtgttattaaccatattaaccatattcaccatgctacacattagaccatattaaccatattcaccatgctacacattagatccccagaacatactcatcttatctgaaagtttgcactctttgaccaaacatctccccttttccccagctcctatcccctagcaacatccattacactaatctgagtctgttttaggacagtacctttaagtagcatcagcctgctctaaaaagcttgtattgtcttttgtaatatctgtaaagtaataaggctagaaatatattcaaattcagatttttttgtcttaccgagggattataaattgaagatctcaggatatgtcatgtggcagatgtgaaagcgagggaaaagtctagattgtgattttgcacttagaccattctaatgaattgagcaagtgatagatacaagaattagactctcgctgttgtaagaggacaaccctagttatcctacttactgtgaggtacagagcagagcagcgagaagcttgacaggaacggatgacttcagcagactaagtttgctcttaaactaagccaattcctcctccttcacctgggatggggcagctgaagttagtctagctgaagttccgcggggacacagggggatcagggagaaagaagcaagcctctcctcgcaaacaaggccagccagctttctcaagaggtacgtctgaggacttcctctgattctaacgaatttatgctgtcatgaatgcagttctggactgagaatcctagtctcaactcagacaaatcccttaacttgtggtccttttctctaaatgaggacgtggactaggtcaggctttttgtacctatagcttcgtaggctcatactgcaccttccagtagctaatacttaatgccaaaattgtctagttattacttggattttaaggtgaaaagtaacatgtttacatatcgatgtactttatcaaatgtaaccaaatactatcgattggagattatatctaaacaagcaaagatttgagcatagaactgggacaatttgctttaatacttttttgcttttagttattaaaatagcaatatattagtttagcacacttaaaaaatagaggctagtagaaatataaatcatccataatcaattttaaagcaccatataaagcaatcattgtgtttccccaaccacatggggtaagttataatacaataaggtactttctaaaagcatcttttctaaacttgtgtatcccttctgtggactatactaaggaaaatcacatctttattaatgcctgacctttgtcatgaatcacaactttgctttcttctaatgagccaggtatttagtgggcccttataagctttcttttcccacaccgatcgttgaaaccgcaaaccaggtacctattctatttatatcagtaataaggccttcttgagtctttatcagttgaaagaatgttcagtgaaatgataaaggatttcagcatcattatccccttaacttttcttatacaaccaaaagagttgtggcaggagccagatatattagcttgtgcatagtttgtgatatcagtcttggcataggattattttcttcacagaactataaatgttgtcttgatatctgttgacaggaacattttttcacatatctctcattgccaaattgtaggcaaatatatttttaaaaataaacaagcttgctgggcgcggtggctcacgcctgtaatcccagcactttgggaggcagaggcgggcggatcacgaggtcaggagatcgagaccatcctggctaacacagtgaaaccctgcctctactaaaaatacaaaaaattagccgggcgtggtggcgggcgcctgtagtcccagctactcgggaggctgaggcaggagaatggcgtgaacccgggaggcggagcttgcagtgagccgagatcgtgccactgcactccagcctgggcaacagagtgagactccgtctcaaaaaaaaaaaaaataaacaagctttaggttatttttacttagtatctggatctaatactatataaaataaggcatttgatgtttgtttatgattgacttatttagactgaacttttttccagatttactttttagattatgtgcttagcctacattttttagctgcagctttctcacttatttcttggcatcatgactgttatacttacttaatgtggtgaaagatggttaagggctcaagttaaaagggggatttaaaaaactgtatattccatttttagtaatttcttcaaatttatattctctttactattagaaactgcaaatgaaaataaccttagtttttgctttcatttcatcatggtaattctaaggtactctaagtgttaagatatatacacaatcaatgtacaaatactgtgagctatataggatctgagtctggaatgatggtttataacttctatggatagctaatgttgtgttgcatgtactgatatggaggctacccaggtatgggcacttcatgttacttcacagaagagaaattgatggtaaggaaaagagttatctgacctcaccacataagtgtttttcaactaagaggtgcttagttgaacacctcttagcgcaaacacatcactttgcgctttttcagtcttagaaggtcggtctgctcattataaacctgtaggtgaaattgtacttgctttccacggattttgttatatttaatgttgtattctgaagcaatctcagcaaactggcacaattttttagtgttcttccttgataggaggtgaggtagagaaaaatcttttaatacttctaattttttaggcactattaaaatttatatgtgccatttggaacattaaaaatatctttattgtcaatcaagaaatgcaaaatatcacaataaattatagttaaggtggtatattttagcctttctaacatttgggcaatgagggaattggccttatgggaaccttaaactcctaaatgggcctgaagtcaatactgctcctttgagttactgatttatgtaaatgataacaattcctttaagaagtggaaatgccatttaaaaaaactgctgtaactcccaagatatggaatcttttctagttatcctaactagtataattttgtcttaaacctccttgtttaaggatatcttgtgtgtatgttgcctgtgtttcattttccgtactgtaacattaataagtaaaataatttactgattcataggtggcaccttcattggggagtactgaatttcagccacttgtgcagtcaacaacacttctacctgaagcctcccatgaccagtttgtggctcaaggtatccttttagtgaagacattctaccttcaaaaagaaaaatgacaagttggtccagacagatattttgaaagtaaatgtctaaagaacaaaattttaatgaaataagttgtagaccattatgaaatacatttagaaccaatatatcagaaattaataaaataaatgctcttaactaataaatggaatttggctcttaaataaatagtccaattcctgtgtggctccttattaggcgctcgtaggtatttgacatttgaatttgggaactgatgggtataacttaactttattttttcccttcttttgagaaaacactttgctacaagtaatccacttgaaagtaaagcgattctggttttaagtattttctaaggctatgcttccatttaaaggcacataaaatgtattgagtctttattttattagaaatgcacaatatacaacttgggacttatttttattaatggcaatatataaattttgctccttgtgctgggaactgcttccaaccctgctgtgcttcaaatttgcaactttgctttttttttttttttttaaattctagagagtatataagccttattcagtagcattaaatttttgacttgaaaggactatactatctaaaaagaaagtaattttaaacactggcatacatataagtatatgcagaaaaaatactttctgaaacatttagaaaaacttgctgaattaaaactttgaactttcattacaatatttgttccaataatttcctaaacagtgttccatattggtttttagtaattcatgttcactatatataaaattatttaactgtagaaaatactcatttgatcttcttaagaacaaaaggagcaaactcagattatttaaatggctcaggacatagggcatgaaatgaaattcgatcatgaatttcatgaacatttatctctaaaagcatgttgccttactctgatttttaacatctttattgagatataattcacataccatataattcacttgtttaaagtgtatactttattggttttaagtatattcagagttgtgcaaccgtcaccacgatcaattttaggatatttccatcatcttgcaaaaaaaccctatacccattagcagtcactccctgtctcccccattcttggcactctacggaatcactaatctactttccttctttatagatttgcccgttttggacattttgtatgaatggaatcatataacatggtcttgtgtgactggcttctttcacttagtgtgctgttttcaaggttcatccatgttctagcatgtatcagaacttcatttatttattgacaaataatattccactgtatgaatatattacagttacccattcatcacgtgatataggcatttgtgtggatatacaggctttctgttttttgtttggattacctttgattttaaatttattttattttcaagtattaacgctttttttttttttttttttttttggaggcagtctcactctgttgcccaggctggagtgcagtggcgcaatcttggctcagtgcagcctctgcctcctgggttcaggagattcttctgcctcagcctcctgagtagctgggattacagaggtgtgccggtacacctgcctaatttttgtatttttagtagagcttgggtttcatcatgttgcccaggctggtctctaacccctgacctcagatgatccacctgccttggcctcccaaagtgctgggattacagacatgagccaccatgcccgtccacaaatagtatgctttcaatgtatatttatgcaattttactctttgccaatcatttcagcacatatatatgaccaaaaaaaaaaaaaaaagcatataaaagaaagaatacccacagaaaggggaggcatgaacagaggatgaatcctcacaattttttggtgatatatgacactatcaggtatattccttttttttcaaaacttggaaataagagatcagggtgtcaaatgtcctccttagttttacaaaataaattagcaagaaaattgaaaaaatatgtatcaatttatattctgaactagctctctttacagaaaaattcaaaaaaggtttctatatatgcttgctctagaagtgctgaagatatgtaatacatattttatgaatactgaaagatttcccttgaaattgtttggacaattttcattagaattatctcaatttaattttttccatttttatttccaaagatttatcattattttttaagagacagggtctagctctgtcacccaggctggagtgcagtggcatggtcatagctcattgtagtctcgaacacctggactcaagtaatcctcctgtctcagtttcccaagtggctgggattacaggcgtaatatttgaggggaaaagaacacaaactctcatgtaaaaatgagcagaaaacatgaaaagataattcacaaaggacctaaaagtagcctttatctttggaaaaatattatacaaattaatactacccgaagatacttttttatttattaaattgccaacaattaagtattggcagtacattcttttggcgaggctgtggaaaataagcactttcatacattgttagagaaaatgcaaattagtataattttggaagggaatttggcaatagataacaaaactatgtatttacctttgattaaacaattccacttctaggaattctcttttatttatctccagcaatataaaaatacatatgtacttgataatttagcaagcattgtttgtaattataaaacatggaaacaacacaaatgcctgtaagtagaaggatagtttttgatagatatataacaatatatagataatgataaacatataacaaaattacttataaataaaatttatttttaaaataacaatggagaactacagctattagaaagagggggctgggcacagcagctcacaccaataatcctagaacttttggaggctgaggtgggagatacttttcacgatagtgagactgtatctctacaaaatataaaataaattagccaggcatggtggcacacacctgtggtctcagctactcaggaggctgaggtgggaggagcacttgagcccaggctttgaggcttcagtgagccatgattgcaccagactccagcctgggcaacagtgagaccatttctccaaaaacgaaaaaaaaaaaaaaaaaaagaggggaggatatcttcaaacagatatggaccaaattttaggaaatattgtcaagtgaagaaagaagcacaatgataaagagtatttatagtttatgatatttacagttttctacttttgcatatgaaagaaggggaaatttaaaatacgtgtatctatttgtgtagaaagaaaacaggaaggaacagctggaaatgaatgagattaattatgagaatgggtgggagttagttaggaaataagagaggatgggaacagtgtagaagagattgaggggtgggatagtgacccttctctgcatgtatcttcttgtataggttgacttttataaccatgtatgttttacttgctgaaaaaaataaaatcaacaaaaatgggaaacaataacatggaatacaaaccaattaatccagctacatttcacatgaatagcattgaagtgagagaggaagtaaccccagtaactctcagacatatttttaggactttagtcctcagactattggcaaaatgaactgtaaccaagcattgaactctagttactagttttattttttgcagtattattagttagaaattctgaaactacttattgtgttcataaggcaaggcaaataagtaaatatattgtagacaatgaaagccagaatttttactttcacataacggaaattacaaatatggaagggaaggaagatgtttaatgttggattatatttggagtgttggattatatttggagctttcagtatgaatcaattattttgttttttaagagatgaggtctcattctgtcatccaggctggaggacagtgctgtgatcatagttcactgcagttgccacctcctgggctcaagcgatcctcccacctcatcccgagtagccaggattaaaggaatgtgccgccatgcctggttcatttttaaatctttttgtagagataggtttctgtatgttgctcaggctgatcttgaactccttgcctaaagtgatcctcctaccccagcctcacaaaattctggaattacaggcaaattaatgatttttaattcgtagataaaatatgtttatgtgcccaggggtatgtatgtgcatgcatacgtatatacacacacgttttctagcttagaaacaatgacactctaaatagcaatgtatacatttagtgcccaaatcttgctttccaaactccattctccactttagggaatcgacactttggaacaaatatccaattttagagcttggacgaggaaagaacaagatgaacctggaacatcttgctgtgccagaaagtaagggaatgctcaaaggttaatggaggtgttcactaatgtagggtgcaggtaccttattactgttctaaagtctaaaagtattttggagaaaagggagctctcatacagtgttgttgggaaccactgtggagaacagtatgcaggttcctcaaaaactaaaaatagaacctaccctctgatccagcaatccagctgctgagtatatatctaaaagaaaaaaaaagtatatcgacgagatagctgcactcccatgttgattgcaacgccattcgtgatagccaagatagggaatcagtctaagttccgtcagcaaatgaatggataaagaaaatgaaccatatatgtacacaatgaaatattactcagagaaaagaatgaagtcctgtcatttgcagcaacatggatggaactggaggccattgtgttaaatgaaataagccaggcacagaaagacaaatattgcaactcatatttgggaactaaaaaaaaaaaaagttgaactcatgaaaatagagagtagaatgagggttaccagaggctaaagagtggagagccagagataaagaagggatggttagtgggtacaaaatacagttaggaggaataagatctagtgttcagtagcacaacagggtaactatagttaacaataatttattgtatagttcaaaataactaaaagaatggagttggaatgttcccaacacaaagaaatggtaaatgtttgaggtgatggatgtcccagttaccttgatttgagcattgcacatagtatgcctgtatcaaaatatcatgtgtaccccataaatatgtacaatgattatatatccataattaaaaatttaaaaataataaaaatagtaagattttactctgaagaaaacctaaagattatttgaatttggacacacctttggcccctcgagtttcagaaaaaggattgtaaatcatctttttgttctcagtgtctgaatacgtggggcatgaagtcatgttctgccctttctgacctgtctcttctgcatacgacaatgtccgtgtgtacacatctacacatctacatccacacatggtggaaggtggaggtcaggagtagtaggggtagcctgacccctaacctcaaggttaagatgagccaagaagctaaggcaattccccaactatacattatcattttcaggaactttcctatgattataagaacttttgagtattgtacatagctgtaaggtaaataataattcttatgtttattttcaataataggtcaccag
